United States Patent Application Publication US 2014/0057251 A1 - sequence listing, part 34

SEQ ID NO: 36721 - DNA, 7201 bp, Cannabis sativa
  modified_base (3993)..(3993): a, c, t, g, unknown or other
ggggggggggggggtctgagcctgaggatatcagcggttggttttgcccccagagagctagttggccagatcttagcttctaaggatggataacggtgcagtatgtgttttagggccacatgcgcattcggtcttaccacctttctcgggtggacagaggcgtcaagccttgttttgggcaacacaatagatctgcacatttttggccttcggctagacctcgacaagtgatcaagaggtcttccttcttctcttgcatatacttcctttcgtatagtcttacatcggtagccaccgtgcatatctctgtcttcaactctcaatgaaagcacaaaaatatttatcgaagtttttggcaattgaataatcttagagcttaagaaagtagtgaaggtataaataatgtaataacaaacaagagatttttacatggttcaggctttaactatccttagtctacgagtccatttcattaggctcttaggctggtgtttgtttatacaaatacaagaacgatggacaatgaatccttcccactgtgttcctcttaaataagaggaagcttagtaggaatatttggagttaatggtagggttacaaaaacgtgtatgcttgaggtgatggtgaatgagtcttttgtttgatggggaaggtcccaagaaaaggtctggatcccctttcctatgctttctttggagtatttataggccaactccattgcatgggctaccttggatggatcttcatagggatgaacccccaccgttggattagtaggtggcatattttccatgtggtctttaccaatgtcaaattgtattggctgtattggtgggtctttagatgcatctcgcctcaaagccattctcatttaaatttccctcatccctagccgttagatttttgggcatgtacacatggccatgcatgctctgcatgctagcatggcgtgggagacaacctctgacatcgtacacaaaaaagccttgtcattaggtctgtagcctgcaacgtgtgggctgatcttttgcgggtcaaaggcgtaccccagactggcgtatctcggttagagaagatccatactcttcgcatgatcgaaaaggttaagtcttccgtaagggagtgaggcactagctccggatacctttcgcgtggccagtgctcggggagacttctttcagggagacctttcccacgaggttggcacttttattcttccgaattgctaagagagttgtttaggcggcttggtgtcttcttggccttcttcaattaatctccacgtgtcatgcttgcaaaaatacagataacactaagcctttgtctttcctttacctacacatgaaatgatacatgtgagtcagcaaacacagtaagaaaaataaacatataacatatgatcggcctgtagctaggcccccatacacctatatacaagtcttataagatgaatcaagaacgttcttagcagaagtacattctctatgccatatgcactaagtatctttctaatactagatttggttgggtttgttcgtactctaagtaaaactgatcattataccacatacactttgtactcatcccgtactagtgttgataacgatatgtcataccctgtaatattacactataccacatatactctgtactccaatcatactagtgttggtagtttatatacatatattgttcatgtatactaaatgcacatatgtatatcttttatactaatcttacctcgtttcttaattcaagtgtgtcgatcaacctgaatggaaatattgcttgttgaacggaggccctatgtcagatttacgtaaaataggtaattattactcaaaaaactcttgaggtgttaaattcaaaactaaaaatttccttatcgataaatagtgtgcaataccataaatatcgagaaaacatgaaccttggagttcttgaaaacaccccaactggtaaaccgaattcccaaaacggtaaacaatatactgagatcctgccttggaaaatagttcaccatttttgaaaaaacggtgcaccgtttttctaaagaaatcctaaaacacctaattccaagctcaattttaccctaaattacatgcaactctccataacacctaacaacatgtcaatgaacacaacatgccaataaacacaattcatgcaataaatgtagttaaaactcaagaatttgaacaataacattgttgagccaagtttgagttcttgaactcaaacctgctcaaggcctttaaaagccaacaaaaactacccaagtaaaccttaaaccacttcaattgaacttagaataccaaccatgaacaacctaggttcgaacagaacctaaacttccaaatttcatgcttaaacgaacccaaaacctattcaagcttaagaaaaaaaaaaggaagaatacctagggcttaccttcaatacacacttgaattctattgggttctcactaaatgataataatacataacttttgaataataaagggtttaaaacaaccctaaatatctcaattttaagtattttcaaattcttacaaaatatataggtatttttgaatgtatttttaatgttttaaacaaccaataagtaaaaaaaaaaaataatgtctaaaattcaaaaaaaaaaaagtaatatatttgtaatatcatatttctcttataattcaaataagaaaaataatattaagatatgttaatttttgaatttaaacaattacggttaggatatttaaaacatattaaaacaaattttaaattttattagtatttaattagcatatacgataattaatatataatattttaattaaaatgatataattaccaattaattaaaatatttctaatatgataatatctaatcttataaattaaaggataaataaaattaataaataaatttatttcaaatgcaagccacaattcaaaaatatctaaaaataaaaatcaattttaacccttttaatatcataaattaataataatctattaaaaaattaaatattattaattttcaattgatatttagattcgaaattaaaaaatataacttttcacttttttcataatttttcggtaattatttattaaaaaaaggaatttcaattaaaaatcacacaagtcgaaaatagttactaattagcaaacgggctaccaagggataacccatttgcgtgcagaaggaggaggaaaggcccgacattcttggctgtgcggagggtgacaagaccgagaatctctatcacgcccgagagggatgcgtgcaaaagggtcgaagatgagagggatgtgctcgggatctcccaagacgagaccaagaaatctcactcaggtttgaaattgcatgcacggatgccttggttcatcccaagcttgtccagccatactcaaacttgagttttggttcaaattttgacccaaattcgattccgtaaaatcctaacatgcttaaaattcaatcatctttatttctaaaaaattttaatcactgaatatgtaaactaaaatattttttatataaatacatgtaatttcacataaaattcatcaaaacacaaacactcaacatgaaaacatctaaatccaatcagaaacatttaaaatcattttgaacatatttctcttgaaattaaattattaccatggctctgaggccaattgttagaacatttttttactagaatcttaatttactaacaagtatatttgattatatacattataatctaccaccctataatataaaattcataaaacgataaataaacacataaaaagaatagaattctaacattagttgcagcaaaaattagcaatttcttcattcaatcatgctaacccttgatttgctttctatagtagggtatggccaagtgatgaacttggattgcttccttgcacccgagaagcgataattatacgcttacttaaatatacttttaatgattcactttgtatatttttgattgcttatatnaatagttaggccttctattcatattttaagtttaagtatttttttaaggcaccttggtgtctcatttagtactttcctacaaaatgcgatctgttagcattcaacttcacatgtagtttaatgttgtttttatgagttatatctcatttacaactgctatctttgaatttcctttcttgcaagaaaggttctttaatcaaaactttaaaaatataaaaaatttaaagtgtagtgggtttgtaatatatcatgtatttccagatgaattccggttaattatacacttacatatatatgcccctcaagtaattttaaagaatgaaactttgtaattacttgaaaaatgattcaactttattaataattgaagttctaaatattacattagaaatagaagttacagcattagtttactactagtagggtcgcaaatgttccacattccattggttttttattagcagtcgttaagccgtgctaacttgtaaacaccggttcctactattgccttgatcacataaggaccctcccagtttccattaaatactcctgcagacgcatctctcgtatttgcaaatactcaccttagcaccaagtcaccaacgttgaagagcctcttcttcactttcttgttgaagtatcttgtcactcggtgttggtatgctgcattagtgatttgtgactcagtacgcttttcttcaagtagatccaaggacaatttcaatagttcttggttttctacttgattatagaaatctagtttgtgggtcgcaatattgacttatgctaggagcattgcctccgagccaaatgctagcgagaatggagtatgccctgctgttgtcttctcagttattctgtgagcccaaagtatttgaggtagttcatcgacccatctacctttggcagcgtccaacttctttttgatagtatcctacaaggttttattaacagcttctacttatccattcgcatgaggcctggatactgacgagaagctcttaataatcttatttatctcgcgaaatttagtgaataattcaccattgaattgagttccgttatcagatactatcttaatgggtattccaaacctacaaattatgttcttgacaacaaagtcgagaacttttttgtaagttatggaaactagaggttcagcctctgtccactttgtaaagaagttgagagccaccactgcgtacttttctcctcctcgccttgtggggagtgccccaatcaaatcaatcccccatattgtaaatgggtaaggctaggtcatcatcctcggttccgttggtagtatgtgaggtatatgtgaaaatctctgacatttatcacattttttgacaaattcgtgtgtgtccttatttattgttggccaatcatatccttgtcgagttatcttctttgacaagcttggccaacctacatggtccccacaaaagccttcatagatttctctaatgatctcgtttgcttttgcaggaagaacacatcgtaggagaggcactgaatagccccttcgatataatttgccttctactattgtatagcgaggcactatatacaagagttttgtgtgtcacgttttcgtcagttggaagtttcccgttgagaagatagttgactataggtgtcatccaggtaggcgagctatctataatctcaacttcttccttttcacatatacttggctcgtttaacacctccaccggtaccaagttcaattaatccagttcattctgcgaggttagttttgctaaggcatcgacattagagttttgttctcttgggatttgttcgattttgaaataatcaaacttttccaagttcttccgatccttctctaggtactttgccatttttatgcccttagcctggcattcccctagaacttgatttacaattaattgtgaatcactatagcatacaagatttttaaccttcaacacttcagctatcttcaaacaagcgatcaaggcttcatatttagcctcgttatttgaactgacgaattgaaatcttaatgcatagtgaaacttgaagctttctagaaaaattaatatcacccctgcacccaagccatgctcattggacgctccatccaagtacaatttccaagtgtccgcatctcggtaaacaagcggattttcctctagagttattccttttatcaggaaagctgccaaggcttggcccttgatggatgttctagggtaataagttatgtcaaactgtcccagttcaattgaccattttatcaatcttccagaagcatctggttttgataaaaacctgtctcaagggttgatcagttgacaccttaatcgaatgttcctggaagtatggccttaatttgcgagatgcatggataggcataaggcaattttttcaagagggtgatacctcgattctaaccccagtaacctcttactaacatagtaaacagattgctggtgctttccctcttcttgcactcttgctgcactaattgcattgtccgagacagccaagtagaggagtaaagtttctccagttattggtcttgccaaaactagaggtgtaataaatgcctattaatgctcttaagggcctcctcgcactcttctgtccattcaaacattttgttgcctcgcaatacgttgaagaatggtagacacttatcaattgatttcgagatgaatctgttaagtgctgccattcttcccgttaaggccagaacttccttcagtttagttggtgatggcatctctatcaaagccttgatcttctcaggatttgcttcaatgcccctcgcgttgactatgaatcctagaaattttctagaggaaactccaaaggaacactttttcgggttaagtttcatattgtactttttcaatatctcaaagcacttcacaaggtctgttgtgtgatttccactttttatcgacttcaccaacatataatcgacgtagactttcatgtttcttcatatcagtctcgcaaacatttcattcactagtcattgatatgttgccccaacgttcttcaaaccaaaaggcatgactttataacaataaagccccatgttggttacgaagcttgtatgttccttattagggatatgcatttttatctggttatatccaaaatatgcatccatgaacgacataagctcgtgcctagtagttgcatccattaactggtcgatccttggtagtgg

SEQ ID NO: 36722 - DNA, 5135 bp, Cannabis sativa
ttcttacaaacaacattttcattttacactcatctaaaagtataacaggaaaatcaggatcaaggactccaatgcctaaaagagtcactatggctttttcttgtcagtgccatggaatttcctcccagcttcaatggcctccctgtttagatgacagtgagaaaaaattcgttagaatactttcgaacaagtttttgaagcaagaacaacatgccaagcatataacataattatatatatacatatattttaacttgaaactaaaccagccaaaaataccaagaattagaaatagagtaagagcatgaagatgttaacctgaaagcgtctacaagctctcgactttcaggattaagctgcacaccctcgtagaaggcattggctgcttcatcaaatttctgaaataatgaaagcagagtaagagaaacgataaaaaatcgtgcaatttttttttccctcagatgtttgactttctaaaaataaaaacactaagcatgcctgcattaagcgtaacgctgcgccttcacgatagcaagcttttggccaatctggtcttaatgctctacatgtctttgcatctgctaaggcttgctcagcttgaccaagacgaagccagcaaaggcttcggttagagaacaaagttccatcagtagagtctagatcaattgcctgtaaatgtatgatcaaacaaatgaaccttcatctgaaagaaaaatatagaacaacggaaataatttagcaaaaaatagcatgtacctgggtataagcatctacggcagtatcaaattccttccttttaaaagcctcctctcctcttgatttcgcttctgcggctttcttctttgcttcaggtgtcacctgaacaagttacttcatattcagccaacagcactagcaaactaaacccatctagtatctcattacatatacacattaaaaaacacaaaggaaatatccagaaattgaattattgagtaaaaaaaggcacctcaggaagatcttgcttcggtaagtcctttgaaatattagcttccttcaaacttcttgattcttcctgcaaagagagagagcaaatccaaacagtcagcgacaaagattggtgagtatacctttatactaaatattaaacttatatattccaatcatatcagagtttagtaaaaacttaaaacaaataccatatagacaagacaatataactgctccaagatgaattatgtcaaaatatataaatccatacaagtatttaagatcttagcaacaaagattggtgagtatacctttatactaaataataaaatcatatattccaactcatatcagagttcagtcaaaaaacttaaaacaaataccatatagacaagacagtataactgctccaagatgaattatgtcaaaatatataaatcaatacaagtatttaagatcttagtacctcctgtctgctagtttcagaatgcatgtactccagtatgccgtctattgtccattttgggatacagtcaatctttgatgtcaagggaaacaatatctcaacagcttcccggttgctccttgaagctgcaaccagtattggcttggtgccatcctgtgatgcgatgcaaataattgatatgtaaatcatccaaaacatttaataaataataaaaaaaaattaaagaatttgaatattttactagtaatagtgctttgactacctcatcagtcacattgggatctgctccagcttttatcaaacagttaatgatttctaggtccccatgatcagcagcaatcagcaaaggagttgctccaccagcactaatattcactttagcacctgcctggacaatagataatgcaaaagggagtgtcgcaaagagatgtaatcatttcaatgttcaaacagttcccaccaaagaaattgctgacataagaggtgttcttatagatattaaaccatatgaactaatcaacactttaacagcacaaaaattcgctttccctgttaacccgggcatgatgaggaaacacaataatagggaagggtctttatcggcaaaattaagagatcatataaagagtcccaagcaataagtttatatatgtgaaaaaaatccccccaccccactatatataacatagaaagttaaaaggctaagatcttatttctacttataatcatggcataaatataacgatttgcatgacaaaagacaaactttaattcactatgctacttgaaagttataagaagatattgaaagaaaaaaaaaacacctgaattagtaactccaggcatggaagtgagccagctgctacagatgacaataatggagtaatgtcatcatcagtttcagcatttggctgcagagaataacaagaggatgaagacaaaacacagcaaaacagagtacggctgtcacaaaaacctacattgcaaaattacaaagctaaaatcttacattagcattgtgttctagcaaaattttaacagcttcgggttgagcatgaccagcagcccaaattaaaggagtgccagcatcactttgtgaattgacatccacacctttagaaagtatatgcctcatcaactcaatatctcctgcaaacaagaaaaatagaaatcagaatttgttggatgttctactattgttgccaatttttacttctctgcgccaggaatacctcacaaattatgataacagctattatgctcaccaacttcataaccaaaagattcagaattaaactttgggattcaatcagtcgatttattaatgtttttcaacactagcaatggttttctttggtttaaaatccaatattaatacttacaactacggaaaggtttttacctacaactaagagcagcgtaagatataatgtcttcagctttacaaagctttacagaagagatagagacttgctctggttactacattggaaggtaattgacagctttctcacccataaattcatagacataagctaaccaataaaaagtacaaactaagaaaagaaaggctcacctatgcctgcagaatgatggagagctgtagcccctaaattactggctatagaaggatcagcaccatgttcaagaaggaatttagctgtatcagtgtgcccttgcctagcagcatgaataagaggagtctcccctgtaaatttgaacaatgagtttcttgtaataaccgcacatgtagtaccaaccattgcaattgcaatgatttcagcaagagatcaattccagtcagcagtcagctcatgttaagtgcaaaacaatataaagatacaatatataactagaaacagaaaaccacccaacaatgacagagggcaaaccgccaattcaaatatttacattgcctaaactagcttaaattaaagcatgcctatcaatctaaacaaaataaatgtgagacttgctcaaaataacattgtcaccaaatccaaatctctaccagtttaaaaaggccactcaaatactgaccatacttagctcaaagaatagcatgagcatccaatgagaaaatctcaaattgggtatgaaaaaaagtaataccatcttcgtctctagtatcaacatcgagtttgagttcctccaacaagtacttgcagacctcagtcttgccctctctggccgcaaagtgaagtgcacctcgcttgttggcatccttaatatcagctatcgttttcgccagtcctttcccatcatcaagcttctccgccacctctactcataacagaaaaatccatataaattcaaccgcaatttttaaataaatttaaacacaaaaaaaagaaatggagagagaaagggaggagcaataacatactcttcaagaaatcaaggttccctgagcaagcggcattaaagaacagttcaacttttttcctctctgcattttgataattatatatacacatcgatgtaaatacaaaatatctagaaaataagcaaccgactttcagagaagggtaggagagaagattggtgacctgcgagagcatcagaagcatcagaagaggccatgatcaagacggtaactaaggattagcgagccctaacagatttggacagagttgcgttgaactcgggagaatcgtcgccaccagggtttaactttttgaggtttatgtttatgactagttaatttaatttaattaaaaatgagggcaaaatgagtaatttaacgaaagtaaagattaaatatcttattttattttattcatctttaatttaaactcgtaattgtattatctttttttttaaaaaaaaaaaaatattattatatgaatacaacaacacactactaaaccaacgtgaaaaataggaaaaataattttttttttctaattattagtataaatacaagaatacactaccaaagtgagataaaaaaataaaaacactcaaaagattaagattaggagcaaataaaaaaataaaaaaaacatactcaagagattgagattaggacgaaagaaaaagatggatgatagaggaaaggaaaagatggttgttatttatcccgaggtacgtagtttctaaattttgatttgattcttatttttttttctcaatatacgattataactttgctttctcaataaattaattaatatgtactttttaattctttctttgttattaattagactttttatttcaataaataacaattcaaaacctatattttacattggaataaaatagaatttgaaccacaattattagagttaagaaatacaaaatcttaaagttaggaaacgaattttattaagtattaaatgattttttataatatttggatatagagattgaattattttcagtttggtttgatgtgtatttttttttttttttttgaaaacaaattccttcattcaaacattcaattacaaggattaggcaaatcttccaaaatagcgaggtttgcacaagggggaggaatcccaatccacatagcactaactttgttcatcaaagcgtaattggctaatatatgcgcaaccttattagtttccctatacacaaacaacagaccctttacattagcataggacaacaaatgtctaataaagtcacatttattgtaaataaatacatttattcaaaataataaagttacatatttgtaatatggtat

SEQ ID NO: 36723 - DNA, 5433 bp, Cannabis sativa
tatcaataagatgatgaccatggaaatggacaaagccaaagaacatctcacaattggatacaaagaggtaatattactgatccctaaattatcaaaagaatcaccaaactgaagcacggctgtcacagaagaaaacaaatatcatatctactccaatcaaggtaaacaccacatcattgcaatgaagagggagggaaacctactgcttaaaaaaaggaaaattaaaaaaagaaattgtgactgtatgaatccattaccattgacctatttaagtaatttatcatggcctgcctaaagtcaatgatcagttagctaaatgttagaaaagaaaatgaaaaatattatgaccaaaaacagtagaacctccaagtattcaaccttgcaataaaaacgacaaaacaatattttgatttatcaatgacagactgcctattaattgtgtgaggacttggccacatttggggtcttgttcatgtactgttttcctctgctattttgtacgtatgaacaatttatgttatttgtttccacagcagctaaactagcaccccctttttaatattactagcaaattatttcaaaagaaaaacgtaatccttattgatcagaagcattccagattaaatgctccagtgttcccagaaaatcactccagacatcaaataaattacctttcacggtattattgttactgtcaaaatcgtcgcaatgtaaagcgaagaacgtctcctccacttcttcagatcacaccaagtatcaaccgcctcttgcaaacacaatatgaatattaaatatgttctaatataactgaggctaatattcaaaaccaaatctgaataaaattgttacaatgtaccaatgaaattatgttacatacacaagattcagcagtacttaatatcccttttttaaaaaaggcaaatatgccacacccctcaagtgaagtagtgccagcgatgcactttcatatgatgacaaaagctgaaattaaaaaagagttaacctgcaacaatctggttgagaattgagaatagtcaaagaaacatatctcccacccaaatcttctcgaagtgcctgctaaaaaacagcacgaatgattttctaagttacaatctttgcaacttcctctctaggcatgtctcacctcaaccatagacaatttgtcagagttgtaaacaatagatgtgcagtacttgtatccttgtgaccagtgtctcctaaccaaacacgccaccagctcctaattccccctgctgcagctcttttctacgctgctcttctaaaggatctggactcttcattattcttcgcacacgcctagttacatcatgaaagatgaattgcttaggaaaattgatggcaggctagaacttgtacaataaaagttggtaatggtacgtatcaaaatacctgtcttgtgcatgttgagctggaaaggtaggcatgaactcttttgatttgggaagaggaacttcacgaaaccactcatgatttaaagcagcttcagctgtaattcgctgcaataaaattaaaaacctgtaagtaactacagtaacactgaaatcaaatcaaataaagataagcaaagtaaattaccctatcaggatcatatgtcagaagtttgttcaacaagtcaaatccagaatcagaaagaactggagatccagtaaatgatgttggtgggaatttcttacgcaacagattatacctgaaacaaaatatcatagattaagacatacatagaagtgagaaagacacagttccaccaatggagggtagttagccaagtcagaatcacccaaagctggaagcctgggaaaacagcagcaacaataagaacacctcagtgtcacagttaaggggggaaaattcagaaaataaatgatacttactgatgcttgacaaaattgaccttgacacccggcaacttcgaatatcctggccatattgtctcatttggtgtccctagaattctgaaaatctgcaatcataataaaatcagggaataaatcacattattagaatgtgaaaagttggaagaaaatgataccaacacctactactaaagtataccttgtcaagttgatcaaactcagttttcccattaaataatggttcctttgacaatagttcagccatgatacaacccaatgaccacatgtctatagctgttgaatattgttttgctcctaatagaagttcaggtgccctaaaatcaataaaattaaaacataaacaagctaatctttctcggaaaaattattagaaactaaagtactactgtaaaaactatagggcccagaacaaagcttactaaaaagatccctctcttaaaataatgcattaaatatagaaaaacgtgaacagttgacaaattactaacaagacatggcaaagagaaggatttaggaaaagattaggaaaaaaaaaaaaagaatctttgacagggaaaaacatccacaattaaagctaaagccccgaagtggaaaagtgtgatgaaatgaaatcaaactcattgcccactatccgaacttaaatttagaaataaaataatatttaagggataaaaacggaagaaatatgtgcaattgcagctcacctgtaccaaagagttacgaccaaatgagtatatggcttcaacgggcttccatattgacgtgacaacccaaaatcacatatcttcaactcaccccgattattcaaaagcaaattcgatgtcttcagatcccgatgaagcacccaattatcatgaagatactttatgccttccaacaattgaagcataaggcatttaacttcactctgactaaatggttgcttcatcgactccatgagtgccttcagatcatgttccatgtactccatcaccataaagatgctatctaggttattccccaccaccacttctttaacatctacaattgatggatgatggaaagaaagaagaatgttaatttccctaagagaagtcaaaggaaaaccttctctctccttctccatctttaccttcttcaaagctacaacttcccctgatttcttatccttggccctgtataccacaccataagtgccttcgtctatcttatttagtctctcaaactcatcaacacttctgcagccctgaagcatatttacacttctttgaggaggagctggggtttcaggtgcctcgagagaatcactatcatcctcagaatctgtatcagaatgactataattaatattactctgacgattctcatcgtcaacctccatggaatcacccttctctgcatcattatcggggtagtcatccccaatagaagaccgagcatgagcaccccgttcatctgattcagatgacctgcctcctatttcagagtcatctctcttaaactccccaagctcaggagttaacgacttattgcgtatactggttcccgatgactctggaccaggcatttttcttctttttggtatttcttcctcatccagaatttcaccttcatcaccaggagagctatttcctgctgcccatctggatgatgatatatttctggtgggtacataatcttcatcctcgtgttgctctgtttcttgatcattttccaattgttgcttcaccaacatagaagatggctcatccggtgactcagtcacagcacacccatctgtctcaggtgcttccaactggtccactggtgaggaagactgtagatcctcattatgactgtgtttaattggagaaatttgtacacttccatcaggaataacagactgccgaaataccttaggcagggggggcggaggaggtagtgctggaactgctgttgacgtcctactttttgtagaattagttaatttgtcatctctatcccatattataggtgaaaacttccttttccgctctaccgaagacctcgacccattttccatcttcagagcctcagtatctttaacaagagattctgattcaatggcctcatcggacccactctcacttgacaattcacccggttctctatccacagccttaacagagaacccacatcgcttgggcccccggcgaccatcaccatcaccaacacccccactactgcctgaatcactcctgcttgaagataatcgacgatcaccatttactccttccctctctttaacatctttctgcctagccctaatcttatcccttgcatcccgaactctacccctttcattatcacggctaccatttctaatgcgctcataatcttccttagcagtagtgaaatcccgcctggacaattcaaaattcgactccctttctctaaactcgttgtcgcgataacctccatgtctgccggccgccatgaatatataactaaatttcaaagttccaaatatgcagaaaaatccaatccgcaacgaaattcgataggtaaaacaccaagctcaaaccctaaaccccaattagaaacccacaagaaaagaaaaaaaaaaatccccaattttaaatcaaaaaatatagcagcacgaatccaaaaatctcagatccaaatcagtacaagatgaaaaaataaagcaaaaaacatcaaataatacagactagaccgcaaaaagcagtaacacgcagcttcagaagctccccgatcaaattaaagaagaagaaagaaaccgaaaacctagaaatggggaaacagaacaacgacgagagaattcctagaaaccgatggacaattctggggttgccatgcgagatagaactgtagagagagtgttattgatagcgcttaccggagagagtagaggcggcgagcgccgtttcgatggagaagagtcgcgagagagagagcactcaatcgaagtcagagagaagaaaaaggaaacaagggtttgcgataacgagatggattggattgggtttgggtttggccttggccagttgacgggtctctctatttttttaacattatttttatttatagcatgagtggaaagactcccacccattgtgtgtcaatacaccataggcctagctaccatgtgatttgtggtgactcaacatattcaataaaatatatattattcattctaaaacaaaaatatatacaaataataacaaattatttttaaaaaaaatactaataaccaattaaaaactatggactagactagggtttgtggtcgtgtcccgtttctatctcttgtgttgtttcttttcatttttatgtcttcgatttttggttggttgagacagcagtgttatgggcaccatgaacgacaacgatcttgtagcgttttataatacgatggcatgaggtcgatgatgattatgacgtggtagacgcgttctatcgatcataatgatttgatctatgttgtgaatagctttttggagaatctaggggtcatttacggttgaagcatggggaaagaatgcatttgtttcgctttgatttgattcaaattatggat

SEQ ID NO: 36724 - DNA, 8153 bp, Cannabis sativa
gtcagaacccacaatgtcccagttgtcctgataaaaagaactaccatacccatctggacctggagccttgataccaggaattgaaaacaaagcctcttttacttcttgcttagtgtaagtcattacccgttaactaaggtggccgaacttctataaaatcatgtgtttatttaatttattattctaattgtgtaacatgtggcaagcatcaacattaaatttgaatctgctatcggttggccaaatctgaggtcaacatttcttatgacaaaaaacactttttgttgaacttgatcggaaacaacccaagttgacaatatgtcaacctaggcacttggtccaagttctggccctctagaaattctgtttggttcccaaaaatagttgaatcttaatattttctgaaaacaaagaagatgcttggaagtgttcttggaaaattccactgaaaatggcgtaagtagacaaaatgtcaacctgggcacatgttcagccccaagtgtcaacctgggcgctgggccttacttttggcacccaagaagtgtcgtttcttccacaaaagtttccccatttttgatgaagatgaagaagatgcaaaagtcaaatctctgatctaatacttagaaggtgcccagattgatagattgctaacctaggcgttgcgtgctcaaaaataaactttctctaaaattgattatgatggatcaaatatgtttatggtatgtctagttaatgtcctaatgcaagttttcacccttttgcactaagacaatcccagaaactgaaaccatagtgagaaatgttaacttaggcatcgagtgaacctagtgcccaggttggcttctgagttgtaggttcgtgtcattttagctcatggggcttggcttaggttgctccatgtattcattatacataatactgaaatatagtgagttggattcaagttattgaagtccaaactttcatcctggagctcccggacctcccgaagtcaacctgggcgtagggctagggacccccctaggtcaattactatgaatcgagtttacttaactccgtgacatcatcattcatgccacatgtcaaatattgatgtccacatcaccaggaaaagtttctgtgataacatcaacttttttcaattcaaggctgattgaacatcatagagtgtaattgattctctttcttataacattgtatctttaaaatgaccaaatgatttagtcatatatagagtttcaagctttagccaaatgtcggcggtcgtggcttcttttgtaaccttcctcaaaaccttatctccaagattcaatatgattgcactatgagcctttgcaagaatctcgttcttgtctttctcacacatagaatcaggaagagatttttctttaagcagagcctcatacaatccttggtgaaccaacagagtcttcatcttcattctcaacaatccaaagtcattcgtattagtaaatttttccacatcgtattttgcagcagtcatcattatgagccaagctctgatacaagtttgttgggaatcaataaatgacttacgatgcaattatactggaccaacaaacactcaatcaagaacaatactctaaatgattcataagaaccatataatggattaaatagtaaaatagagaccaggtaacaccaaatttaacgagttcgagccttgtgcaatgctttacatctcggttggaacaacaacaaccatgtctttattgatatttctgttttcaaggttacaataatcctttcaacctattactgagattacaaaataaactttctctctctaatttaaactctcacactctaaccttgcacaatcacgatttttactgaagttgtttaattgtctaattctccaatggattacaaaggtgataactatttatagattatcattattgccaaaattagcttcgattctaccgttgctacttaatgccaccttaaattctctccaagtcagggccagcaacatattccacactagcttcagaaatgcgcttttagtacaaataattaatctagaagagtcaatctagatgagactatgcagatgaatacaagcactcccttcggacgggagttcaagactgacaacatgctatctggaaatatgtcttcagactgatgacaagctatccagaaagtttatccttacgaaggacaagttatctaaaagaaccatctggattcgaccacaactttacgaacaaagctttctagatgagcaccaagcttcctgtaacttctttctgaagtaacaactaactttccgtaagataaaacttgtaaccataatcaacaatatcctcatatatgacacaccttattatcatttgacattgtggataactttattttaacttttaataggcatttttctgcgtccttacattttcgcgaccattattttatgtgtattactccgaagtaggttccataaacaaaagagcatattcaaggtttttttattttttattttttccttgggtagttatgaatagtaaaataaaaagaaaaagttcgggaaaaagtataattgaaagggaaatttgacattttatgctacaaaaacacacatggtgttattttatgcacacaaaataaacataggttcgttattctttactttcaatttagttccaaaagtacccctcatttcatttccccccaatctctctaacttctttctctctcctctctctcttccaatctcagttttcttctcaccactgcaccaaagccaaccaacccattcaaaccaccgcctccagtttagccttcaacctaattttccagtgtcgaccactacaacactcaacctaggagacccaaaaacccactcgacccactcaatcgacccacgcgagacccactcgaacccagtcgacccacgagacccactcgatcctagtcgacccagtctccgttcaccatcatccccgccaccgtccacgaacccactcaaacacttgaaccaggtttggcttcccttatttttttttttgttatttatcctttaaatttagaatttgtgataaaactgatatacgtaaattattaaatttttgatttgtaagtttttgtgtttggagaagaatctaggttagggggaattagttttttttttttgattttggttgtttgtgcaattttatgcgattaatgtgcaattttgtgcgatgacattgtagttctatttgtgtgattttcaattttgtgcgagtttgtgcgatttgccagtgtggatttgagcgatatttatgcgattgtttctgcgtgcaccatttgagcgatatttatgcgattgtttctgcgagtttgtgcgattttgtgggacttatattgcatctgaaacattgtgggatgtttgggcgatatttatgcgatatgtatgcaatgtcattctggattttgtgtctttgcaatttgtgcaatttatgtgtgattgctgtgtgatgtatgtgcaatttatattctaattaataataatctttgtttgtaaatgtagatggctccagaactcattctcctattttcagagcattttttggggtgtatcacttacataggaaacaggtactttgcttcaataaaggctacgttcgaagcctttaacttgattgagaaggtgaaggaaactccctttggagttttttggaatgccaatgatctgaaattctccagggtgattgtgcatcaattactattgaggaaaaagaacgtgagtgaggtcaaaaatgatgaagtgtggttttacgtggtaaaaccgaaaccaaatttgggcagtctgagttagatttgatcacatgcctaaagatgagcggtggcccctccacagaagaattgagtacactatgtgagtctgatcggatactgcgggagtacctcaataatgcgaaaagggttacttttaaaaccctttggctagcttttgaggcgtgcgatgttgaaaatgatgtgtacaagctagggttgtgtgcatttgttgaaggtttgttgctatcaagggctgagggtgtttatatatggacaaatatgctaaagttagtagaaaatgtagacaagttcttcgagtatccttggggcctcctttcttatcagaagttgtggtcatgcataactaaaagtatgattgaccttaggaagatctacatggataaggtctttactaagaaagataagacgaagaagaaagagaagaaggagaaaaaaaattgctcaaccagatctgaagtacaatgtctatggatatgcaccggcgctgcaatactgggcctttgaggtgatgcaagatttggggaagaagtatggccagtgcagatggactagattccctcgaatgttgaattagagtactcccaattcggttacgaaacatgatgtgaagcaacctgatgtggctgcactatttgagaaaagggtatgtcaatcttactctatttttctgtgttgttttgatatttattttgctataagtgttatttttgtttatgtgcaagtgttagaatttgttgtgcgatattcatgcgacgatatcgcacaataatcgcacaaccaagaaacaatatcgcattatgtcgcacaagaaaacatacataaaccaattctcataatgttgccacgatattgcacacaaattgcaaaacaaattgcaagaacatcgttaattgtcgccaaaattatgaatgtcatccctaaccttcgacttctgacacaaaaaatggtacaatgtcgctcaaaatcgtaaaaaaccgaaaaaacctagaaaaaacacagtgttcgaaacaaactttacctccatttcaaggacacaaaaatgacaaattacaactaataatattcagatccatacaatacaacaaaaaataacactatttactaagaaaaacacttacccattgttttgtagagtgtggtggatgtcgggctaagctcattttaaggtccggccgagattgttgagggtgaatatggtggaggtccgacagtgaagacaaatgagagagagagagagatgatgactgagatttttggatttaaggagagagatatttttgggttaaaaataaaagataaatatagttaaaaaattgttaggaggggtggtataattaaacaccaaacttatctttttagcctggattatcaaatttcgcaattaaaattagcttcacctttcttgtacatttgttgacatggctaggcgagctttgcattatttccttggttcctgagtactgatcagtagaattggaaagtacatatgaaaactgttttaaaactgtttttacttaataatacaaggtgaaaagaagaaaataataataataataccataaataattaaatattatcgttggtcaattaatgaatgggactctaaatgaattggttggtttgattgtgttgtccattctggacttgtgataagtgaccgctgacttaacaagccgaaggagctagcacatgccatgattagacaccaaaataaataaaggttaaagtgtttattcacaaagcatgctacgggcataatagtagactttgctccatacgtgggttccatgcatattttgaacttacataaaaattcatcaatataaagcactaccggttatatttacttgaagtatgataaaagttattatggatattctctcaaagttattaataattataaaattagaaaaatattaattgagataaatcttgtaaccgataacattctattttttattttttttctttattgcagatgactttctagttaaaagtttaagatttactatgtctaaaattaatatttcacatcatctaataatcgataatactgattgacacttttgtatttagtgagaaaaatttagcctaaaggccgagagccaaaggaaatcattgaataggcagatctgtgtaacaagaacatcttattacctagataaaactaattttgccatagcatgagttacaccattaactccaataaggcaatgctggaaagaaatattagagaaaacattacatacatcaattatgtatttcacaacactactttttttctttttttttttttttttttgagatactatttcacaacactacttaaataagcatatatcccaattgacatgcgatttgttctcctaatgaagcaggagccaccattcccaatccattctcgcagttagaaacatcacaaattgcacaaatattcacttaaataataccagtgggaggtgcgatctacttaccaccagtaggagaacaaatcgcatgtcaatcactccctgcttgccctgagtcattattaactctataacatgtctagatgtccttaaaaggcccattgacaacttgaaaatcatcaattacaatattttcactcacccgtttgtttcctttttactagatcctaaagaacaccataattattttttcaaaatctgcctcaggattcaggaagtatctcatttagttgagtcaaagtactatgtatagcaaccagcttctcacaaccccaaagagcgtgctaaacaacatcttatcaaaacccttaagccagtaaggacacaaactggaagtgggaattcctatttgagcaagctgagtcagacaagccaaccaattgtgggcttgacttttgaggtaagcatagactccacatcatcgtccaccacttcgaaggcccctgagaagtggaagactgaccaacacctttatggagacaaagaaaccaataaccattgtgtatcgtataataaccaatctctccataatttcaaacaagattatcaaaagagagctccacttgtcttggaattgaaaggatagcctcatcaacttcacttccaccaagcgagtactgaaacaaaatccacatatataatataagatatataagctacttattttattgtcaattagttttgagataaaatcgcacgtaccttgtcaaattctaagataacattagagccaaacaaaactataatgagtattcgatccaaatacaataattggtccaaaaagatgattaaaaaaaaacggtttgtaattttggaatagtgaatcaaaagtgtcaccagtccaaaaagacaagttaaaaaatgtccgcttgtgattcgttataagctaaaagtgtcgccggtctaaaaagacaagtcaaaaagagctacaattgtgatccattgacattgttaaggtgtagaaatataacaccatatataagatgtatgagttactcttcatggacaattagttttgagatgaaactccatacaccttatcaataattctaatactatcacacagtgaataaacacaatcaaagaacatcttctctgggcatataaactttattataggtagaaatgttacctcaacgagtatgccatcttgagccgatctagggctgcacacgggtcgggtattcgggttttcggatggtcgggttcgggctttcggatttcgggtgtttaaaatgtgtaaccgaacccgattttcgggtggtcgggtccatcggatttcgggtcgggtatggcaggtttactatggtcgggttcggattaacacccgaatcaatatttgcataaaaaacttctatggtttggtgtcatttcactgtcaatgaaaagttcatatatgaaccactaccactgtcaaagaacaaaaaaaatgtacaaataatattataataacatttttatttttattttaatgaaaatattattttaaaaataattagtaaaataaacttagcttttcaatggacttagacgagaggaagatgaataatctcactgtttggtctgtagactttaaatgctttgtttcccaaggtgtttattttattttaatgaaaatattatttaaaaaataaatagaaaaacaaacttagtttcccaaaatgttatatatatatatatttatatactccaatacgcaggtatgttcatttggttttttttaaaaaaacttagtttcccaaggaaaatgacttgaactttgttcagtagctatttttatacccacgtacgattatgacatacttttgtaggtgagacagttacaaacgtgaagatagatagcctctcttacacatttttatttcataataaatgaaaaaa

SEQ ID NO: 36725 - DNA, 5564 bp, Cannabis sativa
tttatttttatttgttttgcctttgcgctgctgtgagaaggcttactgagctagactaaaatcaattatatgcttttccagatgctgttacaaaagaaaaatctcaaggatatctcttccggtctgtgcttaaatgcataccatatcttattgaagaggttggccgaagtgataaaattgcagaaataattcctcaacatggcaatagtattgatcccagttttcgtgaggaagcattgcaggtacttaaccggattataggatgtcttcctcaccgtcgatttgcagttatgagatggatggcaaactttattctgcggctacatgatgaattcctcttctaattcaaacgtcactggggcggttgttggaagtaatgcgtttttggagagcctgtctaagtgatgataaattagactatgacactcaagatacaaagcgtgggggacaggttaatgagggattcaaaatatcttctttccatcgatcaggggaacctattgaatctcgtgcatttgagatggatgttgttggtctcatcttccttggttctgtggaaagtcaaattagacctataacattggaactactacgatgtgttcgtgctttaaggaatgatgtgcgtgaactttcatctcgtgggctggcagactatactttaaaatatggagccaggccaatctttataattgatgtccatgtggagcatggggtaggagttgttcatctttacatgttctttcaagcaaaaactttgtattgatttgtaaatgaaaccaacattttgtccttgtagtttttctggttaaatgtaaacttgaatctctgatttacaggatgacattgttcagagctgttattgggattctgggtgtccatttgatttaagatgaggatctgatgcaatccctcctgatgcgacatttcagtctataatatttgagagccctgctaagaataggtgggttcgttgtctttgtgagcttgtcaaatatcctgcagagctttgcccaagttctgttcaggaggcaaagtaagtatatatttataaagtttgcacacaagcttggcttgttatctttgctcttcatatctggggatgctgaaaaatagtggctttctgtcagatatttttttagcttgccatagcttccttattcctaacaattgaaacttctgggatgattagtataaaactgcactaaaagtgcagagcatggttattataaaggtgtttggtttcatcctaggcatgtttagtccaatgctgagcgttttgttgaaaaaacaaaattaaaagcgtttgggacagctttaacacctgcacccctcggatcaaatgaatcttgaatacccgcccgagaagtggctctgctgaacattcgtcttaccctcgggcatgtgcttgatacctgtgctttagggagaagaagggaatacccaaggctggtaccttttgttactaatattggtcacccataaaacctgcattgccaacttctaatgatttatgttggtggatcaaatataacccagttttggcaaatgtgtgttcttggggtaaaaccaggttgaatttgtatatcttgtatctcttattttcattagacttttgtaatctatgagcttctattaactatgaaattccttgccatttgttgttcattaatcaatatgtgtgggtgtggtattcaaaaatataaaacatcccacattattaaaaatcctgaaaagtctttgtgaacttcaattaaggatagaagatctgaccaaaaaaatggataaaatagaagcaaattttgccagatgcgtcaaaaggtaactagaaaaagaaaaaatgtgacaaatctaagattacatattacatatttgtatttcaccttatatgaaattgttcacgcaataaaatccattgtatttcgagtacagtgcaatcataatttaaaaaacattgaaaaatggtaagacaaatttgcactgcattgtgcacacaccttttcttacacttctgccacaaaaataacaccttttttacattgtacaacatagtatagtctatctttattttgactcattcaaccttcttagaaaacttcaattttctagtccaactcaacttgatttagacaacaaatgtcttcattgaaagctccacaacatttccccgcaggtttcatttgagagggagtgagactagcaatcaatcactatcgaggtgaacttcttttgaacaaggaatacgcatcactgtaaatggccatcaggttcgagaacaccgcaaggacaatcataaatacagacaacgccttgtccttcttagttgctatgttgtaacgatccctaaatcgccaaagaataacagaagttacaagagagaagagccttaaaaacgttcactttcacgagaaataagcacctagcgatcgttagttggttatgataggagggtgttttttattttaacacattcacagtcacaggcataaggggattctcttctagattttgttccctaaatcatcgacaataaggaggagctggacattaagtagaatactaacctgagagtaacagcagctggaaagatgaatccaaggcagacagcagcagttgctccactgaattggaaagcatcccagatgctaggtataaagtttgcagccatgaaaataagagcaatgagcacagtagtgaccagtgtgaatctcttgttatcctgcaccaaaggccttgatgaggggaaaaggaggccatccaagttgagccgcagtgggtaaaagacgattggaaatacaagcattagatgggcagcgtagctaacacgaacagcatcgttaagaatggaaccgtatggcatgccaagactggtgtcgaagttggcaagcacatcatcaagagtgtcatcaccaaatagaaggaagccaaaaacactcgtcatcacatacacagtggtgcacaaaccaagtgcagatcgaacaactggttgcatctgtctagaatcttcaagctcattgtctatgctgtgaactggaaatgagatacaaaggaaaattagtattacattgcttctctcacattgattaaaaacttccaactggcgactacatgttaatatcaaacattagcttcacgctggtttgatatgatggatccagctgcatgaatgttgcggctaatgcacgatcaagtttgattaaaacttctctagaaaggccataatgatcctatcattcttatttggggtgaaagggttgtctccaaaggatctttaagcttttcaaggataatgattgtaactcaaaataggaagtataaagtttatttatgttatattcctcaacctaaaaaatatacagggacagattgcaaactataagcaaaatgtaaaagagtgccctaccattgtagtggcatatatatgcaaccaccagaacagggacagctgtgaatagcttgaaaactgatgtcaaatcagtgacatcaggcaacattcgaggcatcttaactcctccggtagccaacttaaaaattgaaattccaatagtaataacaagaaatgcaactgcaagtccaactgataatgcagatgtgaaactcaaagaatctgcaaccataaaaaagaaacaatatatttattctgagaaaccagtaactactctatgaacatgggacatcaaagacaagtaaataatctgatcaaaaggttcttcccggtcaagaaataagactaaccgattcgcttaaaggatgccaacggtgaaaatatggcaagcgttgtgacaagtagaacaaaaaatcgcccattccaccagtgtactccaaaccagctttcgaggacaccagggtggtgaacaccacttgaagtagttccagaaagtacatcaccttcagataaacaatccaacatggttagactaatttgaggattccattcataataggcctaactaaagctgtcattttgtgagagataatataatatgtaaacaacaaaagagtagcagatagataataaaataccaaacaatctttcttacccataataatcatgtacacagtaagcatgccaacgttgtttattataacacatacttgcaccaacacctttccgtattttccaaaggcatctttcataagacctccataagatactgacttcccagctttgctgaatcgaagcatcatttcaattgaagcctcagtcaaaaatgccataaatatgatgagagaaaccccaagaataagacccaatactttcatggtagcaggcaaagccatgattcctgcaccaataattgtggtggataaattgaaaacggctccagagaatgaagccccattgaactcatcaaatccaccttctccctcatgtcttttgggtaacaaaggggccttttcatcaatcactggcttactctttcgtgacctcttttccctctttggttcaatattgccaatcgtcatcttttacacctacaagaattcccaccccccaaaagaaaaacttttgaacatcagaatgataattcgctcaaactgtttgcacagaacataaattagatctctaaaaaacaaatggctattttcaaattaaagttaaattttgatgaattctaaagcttgcatcccccgaccattgaaaaaatataagacatgaattaaaattctaagcttttcaataatcaagccaagaagaatttaatccacaaaccatcaacaacgaaatctaaacaaacccaattcttaataacaatcaaagagggctaattttccaaaagaaaaaaagtagcaaattacctgataactgaaccagagaaaagaaacccaattataataatccaatccaaacgaattggaacacgacccaggagaaagaacaacctttaataccgagatagaataaggtaagagaaatgaagcttgattttgaggataaaagcgtgacccagttcttgaacagcagaaaaattacttgtgttgaggtcaagctttgatttttatagactaatcatcaaagagaagttgatacacgcattaaaggtggggcttttttctttttctttaataaaatgattttttttttggttactcaattatttatgggattgtagacaagaaaaccagaagagcatatttcaataaaatattagtaattaattaatttaaatataatcaatattcaataccacggacgttgtcaattgtcttattagtgttttatttataatattttaactaaaatcgatgtgaataaaataaactatcatttaccattttcacccaatagaaagtaactgtaatttactgcgctatggtcaaaatttgagaaaatataggaaaatcatttgctgaaataaataaataacaatttaaaaattgaaaatataaattaaagacagctgtggtgtgggtagcaaaatgtgagacctaccttacctatatatattttgtttatatatggacacgttattcatgaatattgtccaaggttttatttcaatcaaataaaaagcaagcaagtttggccataatagctgatgagagctttccaaatataatacata

SEQ ID NO: 36726 - DNA, 4766 bp, Cannabis sativa
acagtggtgcaagcgttacgtaattctcttcttatggtttcatactttggaagtgttatttgtgattgtaagatgataaatgatttgagaaatgtttatgtcaattttattagatattttgcaaatagtattgctcactttttaggcatcttatttagtaactaattatgtaatcactatagattgcaattaataaagataatgattttatttaaaaaaaaaaaaaatattaagcattgaaactgaaatttgagttttaactcgaaaaatagtggcctaccaatgaaaccacacgcttgctccgagtaaaagcatctctcctttagctcggaggttcccaaagatctcagtttcgttcaactcatctgccatagctggtcgctgccgccattaacgttacgctcaccgcttctggtacttcttttcttctcatctactttctctcttttcactttaaacattaacctcatttctatcagtatataaatttcgttgattttagttatattcgttaaggatttgttttagggtttcgaaaattagggtttgtaagtaggaacagtcggtgatttatgatctggttagggattgctcgtttattgattgtaaattgtttatgagaatggctgataatgatatgtatgtgtaatcatgggtttataagccaaggcttagctaagcaagtgttgcatgttctgtaaaggaaataagaaggtgtatggatgtggttatgggaagatttaagtagatagagagctctacccacatctgaaaactctgaagttgtattgctgtaagagctttcttagtggtgggtggagttagtcatctgattgcatagagaccaacccacaatcgattagagaaagatgctggaaaacccttcaaacgcagcagttgcggcagcaacggagtcagcaactatcgtgaagcgttatgctcctcccaatcaaaggtacttgactttacactgttttccttttcttaccttttttgaaacattctaagataattttggaatctttgtatctaccatagatcaattaatagtttcaataatcgtcaggtttgcaaacttcatgcttgtttttcaccttattagtgaggaagatatggtatgttatttatctactgttgaatttatggttgctatagggatgaggtccgtatgtgcaacatagtgaagtttttatagccttttggttagagagatcttgctgatttggatttgtttggtgttacgaacgtttgctatccctttttctctattattgtattttcttagttaattttcatctctttttattgtttaaaagaaactaatattggccagtagtgatgcccattgccctttgtttccacttccacactactacatcatatgataattcttgattaggctctaagcatgtactgctgagcaacatttatattgatttgaaattttgttttcatgtatttttattctcgtaatctttttatttatgacttttcttgaaagtttcgatatggaatttacaggagtcgtctgcacaggcgcaaatctgcaggtcatccaccttttccctcaccttttctttttattttttgaaggcaacttgtatacttatctgtcaattttttctttcgttattcatttccttaaattattttggattgaatttatttgaatcaatttagatgcgtagaattgcctgccccaaacttaaagttggttcaattaggtttttgtttatgtttatggtcttatttgtactcgagacgttgtagtagtatagtatgccaatttccagcaaattgttgaaaaaagtgatacggtaaggctcaattctatccattttgagaaacagataatctagagttatttggctcaataaaattaaaggtgcatgcaagttcaattgattctgaacgttcaattgaattggctgccttttattgcatttttacctagccctgttgaaactggcatgctaaatatggttagcttttttaatgccaatttgtcttatttatttacattttccttaaatatatattgaagagctggggtcttacttgcctctctcttcactcttgtcttctatgcccttcttcttttggttttctctagggcacaattctgcttgtatgttgtgtgtaatcaatggttgtacaaagggatattttaaccaggcaacctgagctaattaattaggcattaatgaatggaccttatctattccaaattctaaggtaatgcttatgttgtctctgaccgtctgctatttatcgctgcatatctttatttaaattagtgaggataaatgcttactgaaatgagagagcatatagtttgtattactttcccattaaaatttaaaatataaacaagacaaaatgccgcagatcgatctgatcgaaccaacaatgtttatggaaatgatgtagacaagaatcaagtttctggctctagaaatgttcctgtcattgatcatggggatgcagggggtagcagtcttctaaatgagaaacctcgcgcaaggttgattgctttagaggggtgttccagtagtgaggcttctcagctactgaatgaacgtaagattctatgattttattctaaaggtcattatatgatgttgaaagaaaaggagaaagtgaccattttaagacaagtacaatttctttatatgacctacaaattaactaataaagatttcataagtacttaaatatgtactgactggtattaattcaatcaactcaattttgaaataagagatgtcatcatgtatatataaatatttgctatatgtatgtacataaaatagtttctttaggcatgggactggtacaagtgatttgttagtatcatttattataatttcaatggctcatttttatggtgttctagaggtaaaatgatttcaagattctttgtattcaaattttttactgataaaacttatttgctttatgtaatctaatgcaggctgggcagccactatgcagttctacaatgattcaacagttgagcaaccaggttagtgaagatgagaaagaattaaggtttctgtatatgtatatctattatctatctaaattctaaagtacattttgagattttggttttattttactttttaaaaaaccaagcctagttctggacctcctgatttatcacttgatatcaaaacaagcatttcattgcaaatttgggaaaattaattggcttcagtatcaacagtattctgtacaaatctacaaaatttagagaaaaggtttgggtactattcatgaatgaaaaaagtatgcaaatcattcaaaaagaaaagaagaatatcataaataggaggataataccagaaaacaaagaagcataacaagattacaacattctccaaattttataagtaaatctgaaaacgtaagacttgaaatcttttctgtatttctttcaccagatagtgatccccaaaactagatctttttcccaaatagataattttggtgagtagtgttgccaagttatacatcccttctgaacaaaaatacaaatgaaagtagagggtaatggtataaaagagcttaagaagggaggaaggaggatggagatgcttattggtatactcggtttaatttgcgggaggatggagatgcctaactttatattcttgtataatttttttttttttaaaactatggttgatcatacacaaatactttagtattttttagtagattgtatatgttattatattatcgggaagggtatgtcctggcaatgtatgcacatagatgtgaatgctaggactgtatctgtgatgttatatggtatggtataatatgaagttataggcaatgttggctatgcttgctgcgtgaaagataggtagggttactcatgccctacacctatcggtatgtatgtgttttgagcattgctctacctggaccagagctctttgtaaagcaggtacatacaatggtctagggactaaagctcagatgatgagcagtacaggtcaatctgagccagctcgtgagagctagctaacagggtaagtggtatcggcttgagagctagcttaaagataacttgttacgggaggtaatcaacctcaaagacctctacagtctagagagcttgtaccgctaatcatttaagttggctctcgagttagtaacacttaccttcttagcttgctcaataacaactactcatcattatgctgacttaaatggacttgtaccacgcttacacacagagctgctccaactaaagcaatgcactacctgaaaacactcgctctatctcaaaacacatacatattgatagatgttggacatgaacacacccaagaccaatctatctttcatacaacaagcatacccaaaattgcctataatattcgcaagtatacacttgcctgtaccagactatataacctcacaggtagtgtctatcatgcatttttagatcatttacaatctattattacttctagcaacatgacgtcatattttcatatcaatagttactctagttcagacttccttaccttgagtcgtaaagaaattgtaacattagttactctagtgcatttctagatccactcacattacattaaatattttttaattcacataaataaatacaaaaaaattaatacaaggcattacaccaaaatctcgaacatgaggaacatgactcttgggtaaggtgataacgtttccgttgaagatgtcaaacggtaaaatgtattggttgtgccaaggaattt

SEQ ID NO: 36727 - DNA, 6231 bp, Cannabis sativa
  modified_base (303)..(320): a, c, t, g, unknown or other
tcaacaattttaagacgttctttctgctatgactactaccgatgaatgttctggttctactgctgacattaacaagctttttcgttttgagggttgcactttaaacgttggagacagaagatgctgttttttctgactatgaaaaaagttgtgtttgtgcttactgttttgaaaccagttgtgtttgagactccacctcctgccgagaagaaggatgaagtcgagaagtacgaatcgcaggttaaggaaaaggactcctggtagagaatgattttctgtgtaagaattttattttgaatggtnnnnnnnnnnnnnnnnnngattattataattctgacaaatctgccaatgagatatgggaagcattacagaaaaaatatgataccgaggaggcgggaacaaagaaatatgatgtgagctgctacctgaagtttcaaatgaccgatgataaatcagtcgaagcccagtctcacgagcttcagaaaatagctcacgaaaaacaaataatcaaacccaaacccgaaacccgtttggcgtcttttcgggttgaacccgacccgaccaaacgggtttttgggtgatcggtttttttggcggcgggtcgaggcgggtagtcgggtttttcgagtttacgggtctaaatgtgcacccttttgctgcaaaataattcaggacgcatgattttataaagtttaggaaaaaaaattctaattagcctttgatttatctgatttttcttaaggacaaaatttttgtgggtcccatgatcccatatttgttaaacccctttagccaactcaactcaactacgtaaaacgtaatcctatttctttgtctcggagaaactcgctcactcagccatggaagctctgtcaggagttcctcgaatccctctccgcaagttcgaaccagacaccgataaaatcaaacggaacctgctcgagaagggcgtccaacctactcccaaggtcatccacaccctccgcaagaaagaaatccaaaagcacaatcgcaaactcaacaaaacccaaactgatcaagccccgccgcctccacttcatctcaccgaagaatcccacttcaagacccttaaacgcgagtacatggacttcaataaagaggtgaattcgaagatgggtgttccgacggttggaaatccttgggagaggttggacagtctcaggttaagggagctggccggagccaccaccgaatacgccggagagaagttgaggcgagaggagctgagggaattgggccgagtgtttgaggcccggaagcgcgatgagttgcggtgggttctggaagatgacttagagattagtgaagaggttctgaatggcgagaaaaaggtttgggacccattgaagcggagacgaggagaggttgaggtgattcagtttcttgttgataggtttgtgatgatatcatattgttctacaatgctaattgggttttggaaatgttgaatttttatttctcgtgtatgattaaatgattaatggtggattcttttctctgttttggttcagactcagttctactaagcttgccattaaggactggaaactttctaggattatgaagcagtcgggactggcgttcactgagcctcagttgcttaggatcgttgatgggcttggggcgaagagatgttggcagacagcaatgtctgtagttgagtgggtatatgaggataaggaaaggggacgaaataaaagcaggtaaatttgattgctcacatgaagattttgaactcccttttgtgcttatagatcggtcactttgtcctagaagagttataggttcagaagcttggggtaaaattatcgtctgaaactatttgatacaattctcatggtctagttccactgtcccataactcactaaggttgttcgtacttcatagtgagttgaaaattttaatttggtacatgaagttagttcttgatagtaaggacttgatgatgatgggggggagtcttgaatgtcatatatgcaattttctggctgatgaagatgagattcactggctctatattattaactttttttacttttatttactataaattaagctaaaatattgatgtgtcttgtaggtttgtttacacaaaactcatggcagttctagggaaagccaggaagccagatgatgctctaagtgttttcaatctgatgcgtgtaatgatcaagaacttttattcagattccactctgtatatgataatgttggactctctaacactagatcatccagggaaatcgtcatatatatcctgacatggctgcatatcatagcattgctgtcacacttggtcaagctggtcgcctgaaggaattgctgaacattatggaatgcatgagaaagaagccttctaaactaaaaaatatacagttcaagaactgggatcctgttcttgaacctgatgttgttgtatataatgctgtaagataggcctttttatgtatactctactttttattgcctggcatagattactctacatttggttggtatttaaatttcccgatttttttaccaggtattgaatgcgtgtgtgccatcccagcagtggaaggcagtgtcttgggttttcattcagctaagaaagagtggtttgaaacctaatggagctacttacggacttgccatggaggtagctatctcatgatttgtttactccttaggttgtaatttttgcatgagtcttaggaagttaggctgtttttgttgcctaggtaatgctacaatctggaaagtatgaccttgttcacgaatactttagaaaaatgagaaaaagtggggaagctccaaaagctcttacatataaaggtaagttttgttagtagctttcctggaattgatcagcatgtttggtgaataatacatatttgtgtgcatgtctcctcagttcttgttaaagcattgtggtgcgaagggaaagtgaatgaagctgttgaagcagtcagggatatggaacaaaggggtgtggttggagcaagcagtgtatattatgagttagcttgctgcctctgtagcgtaggaaggtgggaagatgctatgttagaggtaaatttgtttgtttgtgaattctggatctggttttcagtattacttaatatttctggtgcaatttgacttgtggcctttagaggctgctcatataaatgctactaccaaaaacttataacggtgatgtttagtagttaatgaaaatcttagaaaataggatttgttggactgtcttgttgttacttctcattttgtgatttaagcagccattgtacttctagaacatgcaaagacttgttgaaaagtactttctttgagacctaaacatataacctttagggtaattagtgatttattgtgtaaatatggctgattcatttcctgcaaatctttgggagattagaaactttggcatttagttaatggtaagtacctcccatcgcccattggtctctttgatggttatagtaaaaggatgagaattccctgattttctgagttccagtcacctacctagtgtcttggttgcgccagatcctggaagttaaaatgctgtgaaatttttgaatcctaagctcttttttttttccctttttctttttaatagtgattttcttggtttctcacctttgaagcttattatttgtaattatattttggtttcctgcaacataactgcaggttgataagatgaaaaaattgtctaatactagacctttggcggtcaccttcaccggcatgattatgtcttctatgcgaagtggacatattgatgactgcatatctatttttgaaactatgaaaaatcattgctcccctaacattgggaccataaataccatgttgaaagtttacggccgtaatgatatgttctctaaagctaaagagttgttcgaagagataaagaaagctaattctgattcctgcccatctttggatggtcataagacactccttgtcccagatgagttcacatacagctcaatgctcgaggcatctgcgagcgctctacaatgggaatactttgagtttgtgtacaaggagatggttatctctgggtaccagctagatcaaactaaacacgcatcactacttctgaaagcatccagaaatgggaaggtaatccgtttgccttaacttaaagtgataatatatttttgcaatctaacatctaatataatactaaatgatgagacccgatccttctggtgcaattgttaggaaaaaacacaagaacaatagtaggaaatagatgaaattagtgtattatatttgtttatagttacacaaatatttcatgtcaggatcttatcagcaataaaaatggaactcaaaatacaagtcaattgtactgtgaaacatagatattacattgccttaatggcactattttacatcatagtttccactgttgttcgttatgctagttactcattgagcctagttatgaaaattcagctagtttttgttcttgatacagtggcatttgctggaaaatgcattcaatgctattttagaagctgaagatattcctaattctttgtactggaccgaaatggtgctccaaaatgtagctcaagaagactatatgaaagctgtcactctgataaatgcaatggctcttgcgccattcaaaatcagtgaagagcaatggaaagaactttttgagaagtatgaagagaaaatcggtcagaataacttggagaaactgctagactatttggataatggtgatgtaaaatcagaacccatagttgtgaacttatcaagagcactgcgccatctctgtgattccggcatatcaggaaatttctctagctcaattgattgtggcagtgaaaacgtaaataaatcatccttggatgataatgttggaatgacttttggcgaagactccgactcagatgaagatcctcctagcttcagcatagatctcactagcatggaggttgatctcgataatgacagggaaagcaaccttctaaccagcacaacagggttaactacagatgaagctttgaacggtgaatctagtgaccctttacatggtagttactcaacaactgatataactgaaagcttggtggatgtggatgagagtgaacttgaaaaactgttgaatggggttcatcattctgataaatctgacttgccttctgcatatgaagttctagaggcttggaaggaaagcaggagaaaagatggggtcttgttctcatctcgacttggccagaaatgagtagtttttggttttttgtctgttgcaactgtgtatatatgtatgtgtatacatcaatgaacgttttcgatagtaatctagttaaatcaatacatcatagcgagtcacagttgttcttgaatatatgctgatattttaaaattgaggaaaaattgtaatgtgattcataccattggtaacgggtagaggataccaaattcatcagaaaaattgattaattaatacaaaaatcaataaaatgactgacctctatatattgtattagtttattaattttatttatgtttgtaggaacttttgcgaatgtgaaagagttctagccgtctttgatatggccaagcacgtcctttgattatcttttgttaattgttaagggaaatttgatatattatgcttaaaagttaaaagtggtgtttaattaaaccaaaaatataaacatagtaaatatatgtcaatttttcaatattctcccaaaattacccctatcctttcactttccccccattctctctaacagccccctctctctctctcctccttcacgctcaattcgaacccccaacgcttcccctccgttcgaacgcttcccctccgtttgaaccagcaagctcgaaccagacaaccccctaatcaacccagcccctccattcggctcccacgaccctctcgaccccaagctccgacgaacgacccgagcgaacaacgagacccacgagcgaacaacgagacccactccaatcgactccaatcgactccatcgacggacggcctctcgacccaatcgacccgagcgaacaacgagactcactcgaatcccactaaccccactcgaatcccaccaacccgaggttagttttttggaatttttctttgaattttatcctttaaaatgcatacatttgtggttgattctggtattgaattgaaagttgctattttttatgttatttgtgataaattgtgcaataaaactgtg

SEQ ID NO: 36728 - DNA, 2930 bp, Cannabis sativa
  modified_base (52)..(62): a, c, t, g, unknown or other
aatccttatgtatttattttcattttgttagagaattcatatttaggatgtnnnnnnnnnnnacttgttagtaaatctaaatcctagtaaaatatttccaacacgtactacatcagtaagtgcctcattagggccgagtttaggtatccctccatttagaaactagcttattgtctagtattggcctccaaaaagttaaggtcgtactttcaagcccatccaatcaaagtgttgactaaccaaccactcaggcaagtcttgatgaagccaaaagcatcaggacatctacttaaatgagtagtagagcttggtcagtttaaaattatctatcaacctcaaacattaatcaaaggctgagcattagttgatttaatcactaaatgaacaagcctcaaagaagatgacctcatggtttgtgaagaccagaaccacacgcctgagattgtagcttaggattggaagctctatgtagatgtgtcctccaatgagcatggctttggagtaggtctcatccttgtaactcccaaaggatttcacactcattgtgtactgcagttcaaatttaccacaacaaataaccaagttgagtatgaggcactcctagtaggactttgattgggatttaccatcaaagccgaataactagagatctacagtgattctcagcttgttttcaatcaaatccttggaaaatatcaagcacgaaggactcaaaatgataacgtacttgagcaaagctaaagatctgttagcccagcttaaacactactcccttctacaagtgccacacaaacagaacgcaaaaatgcatattccttagctaaactagctagcatcatggaattcgacactctaagcatagttcccgtcaaatacctcacttaaccaagcatcagagaagactcagaacctatcctcatgattgataacactccatcatggatgaccccaattaataagtatttagaacaaggtattctcttccacaccgaaatgaagccaagaagctgatgagaaaaacaactcactttatcatcatggaaggagtaatgtataaaagaagctactcaatgcctcctttgatatgtgtcataaaagaataagcaaagctactcatggtcaaggtacatgagggtttttgtggcaaccatgctaagggcaaagcctctccaaaaagatattgaggcaagggtacttttggccaacaatgatagaagactcaatggactatgacaagagacgtgacaagtgccaaaggttctccaaaatacccagtgttgccccaaatgagctcaagagtatgaaaatttcttagccatttattgtctagtgaatcgatctcgtaggctccctacctaagggaaaaggcagagtccagtatgcagtggtggcagcggattatttcactaaatgggtggaagcagagcccttgaccaccataatatcaaagaaagttcttgaatttgtggttaagaacatcatctgccactacaaacttccacaaaagatagtgttagacaacgaaacatagtttgacaatgaccactttactaatttctgtgagaggcacaaaatcattaagagttttttagtagtcacttacctacaagaaaatgggcaagtggaagttgtcaaccgaattcttaaagttagcttaaagaaatgccttgagaaagctaaagggaattgacctaaataattacccgaagtgttgtggtcttgtcgcacaactaaaaaataacaactagccctactcctttctctctagcctacgggttcaacaccatcatcacaccaaatactcacctatgataaacaagccaataatcaattgctggctaagtctctaaacaaagttgaagaaatcagagagaagtttgagctccgcaaggccacgtatcaataaagggtcacctgaagctacaactccaaggttaaatataggaaattaagcctagaaatatggtgttacgacgagtattcttgaacacaaaagatgcagcagcaggagtacttggaccttcttgggaagaaccatatgtcttcatggaattgcttgaaccaggaacttacaagttggctcgctatgactccaactggaatccaatgcctgtaccaaggtaccgaaatagggtgcacataagacgatactacaaataaggcaaatttcttcaaaacaacacacttcaaagtgagattcactttatttcatgcaagtgaatcaattgcctcttaaaccaaacagatgcgatgaattcatctctaggtcaagaggtccgtcaccaagttatagcccctacattgttagttaaaaaaggcatcagtgtagtggggatcacctcagataattctaatgaaaattcagttaggtgaagctattttgtttttgtttttgtagtttagcgataatgatgatgtaattttttttttaattttcgatgaataaaaacgttgaacaaagcttttttcggtactttattttaattaaccaattacagctaatagatttaacgacactcccaagtattgagaaccttgtagagttggtcttgatataacttcagttatttcttaagtgagttaaacattgtcaaccccacgaatttttggataagtggtcgagtgctcaacatgtaatagttcctcaagacacgtgatcaaggaagcccaacaggatttggtatggcaagtgaccaatgaaggcacttctttaatcacttaggggggcacatacaccttggtacacgagagctaggtgttaccctggtacacgggagccaggagttataagggcattcacttttttttttgcacacctgagtagtactttcatggtaatgaaacattaagaaaacgttgatgttactcccaataaccaagtttcttaaatcatgaaatattgtgcaagtgttagagctcatgcgattaca

SEQ ID NO: 36729 - DNA, 5702 bp, Cannabis sativa
atatatatattatggagatggggtttaatttaattcttgcggttgaaagagacatgatggggttccttacatttgatatcaagtaacatggaattaccgacaaacaaaaaagctcataaagaccatagataatatagttgatgccattttaattatattgctcttttcttttaatagctggaagagtgacaatgattaacaaagaaaaatacgaatctacaagaagaaaaaaaaaacactatggtccaaaagtatggtgggagagtcccctcaccctttctttcccttttctcaacattccattcttatctagttcacactcttttatgacacttgggatttattagattttcctggatttgaattttgacttacatgatgaattaaagaaaaatgtagagaatatggaaaataagaaaactaaataaaaatataacaacacacatagtacacacaccaaattggaaaatggtagagatttattgctgtgagctttgtaataattacatgttaatttaggtgtgttctattatgggattagccagccaaggaatctactctactccttgatgagaacttctctcttttacactacaaaacttcaggcaacaaaagagcccttctttaaaatattcctacccctaaatctttcaacctgcaatgccaaaaaagttttagtatatagtaaatgatatcatatcctccacttactatatatatatatatatatactactatgcaatgcacgataacttatcacctatgtcgaccaaatcagaaacagagccacatgaccttttctaaaaactctaaacagagccagctaggaggagttatgagctatcctaccaaataaataaaaattgaataaaaataattacaatgaattgggcaagacggcaggctctgtaccatgcctgcatgttgacctctgctatcctaactaacctaaccttgtatttttatgaggagagagaataataatgagatacaggagcccacctgattgatgattttctggattttcaggtcccctactagtactcggtttgctggtactcggttggaccattgctgggttctgttaaaattaaaagtggaaaaaaacagtaagaaatggatcccataataaatgtgataaatgaaatggggtcaagtactgatatgaaaaacattaaatatttcataagggacaaatggataatggtattggcacggcacactaagcaagtaatgaaggaaagtacaagttgttttacctgctgtaatggcaattgcatctgttgtgaaccaaaatactgttggtaaggatcaggaaaatttggcacccgtgactgatttggattttgtggtgtggggaatggctgaaacatataatctaactggtcagttgcttgacctctgggtggctcagttgtaggcacagggggcatatgaaaggctggcataggaaaccttggtcccaaatgagctgctgtagctggtggagacattggtgaaccagctaacacatttggaaagggcataataggtcggttcaatcccatttccattcccatgcccattccgattcccattcccattggtggcatgtattgttgcattccgggaaacatcatcgggaccatgccgcaacccattgacatcatctgcaccatttgatcatataaaaggaagttgaaatgaagatgggaaatgaagtaccttctctatgtatagtttctatgattacaacgttgtaattgtctctactctacttttactattcctattaattatagaaactgttctgttactagacaggggaccctaagaaaacaaccccaaataatgtaaccacatggaagcatgcaaactattgaacctgctcatttcacgtatcaatcatgcatggatgtacttctacttctcacatgggcttcacaaatatcttgtacgaatatgtacaaccctgtctggaaatgagaccttgaagaattatattacaggtctggaatcagaaaagaatttaaggcttcatcattcttaattctatttttcacctttctctttctatgtgcaaaggactctgctgcctatatggacttgtatacaaaaacccttccacaagatgaacaaatttatgatatcataatgaattttcagaaagtaagtctagatagtaaacctgcacttgtagctgtagagatttcaagtattctattgcctcatccagcattgaagctttgtcagactgaaatccacaaaaagcaaaaagcttcttaaaagacagagagagagagagagaaagagagagcacctaatcccaaacatattcccacaatccattctaaaaatacaatatttgacggtttggtatttgtttggaaaccttgttacagcgaggtataagttcttgcaaagccttcatcttttcgtttatcctatctcgacgtctctacattagaagataaaaactccagctttagaaggaaaagtaacaacgtatatagatacatatatcaaaaaataacttaaattcaaccaaacttagaataatccttggtaatgaacagaccctttcagagagattatggacctcggcagcacgagatctttttgtagatgcaccacgtgcatgtttctttccatcgccagattcaaactcaacttcctatcaaaatttaatacagtaactatattaatcagattatctccatatcagcaaacacttatcccaatttcaccgaactaagttttctaattttatgcagcaatggttctaattcttttaacatattttggggatgtgaaagataagaaagagtgaagaggaaggggagaggaaaagaaatgaatcaacgatttcaaagtataaaagtgtctcacatcacatgatcatcaaatagatgcgagtatacttcatttcagactatagcttgttaatattctttttgagcaccaatcttaaaatattcttctccattgaatatttgacactgaagtgacttacattacagtagtccttataagttttcttagcactaattcaactccatagagcctttgatgcttcccaatattgctccaatccaataagcataatagttcctccctaattataatcaaagcactcaagtatctaccctttacctgaaatgatcagtcctttcattcatcatacaaaaccctatttattagtagtcacctagcatattgaatttaaagcatagggggagtcaagtccaactatatcttcttcttcttcttctccaaccctttcagcttttctatttcttagtttcattcttcatctgctttaacacaataccagactctagtgcagaaccaaatttgtaaggactctttaataaaatgaaagccttccttactttttggcagctaagcaattattgcacccgctaattagttctaactctgtgttagtacatagtacacatacataagacaaaagatatatttctcaaccactaacccagaaaaataacacgtacaacaattaagtacctgatactaacttgaatcaagactactaagatattaattaattgaaaattgaaaacaaaataataataacgttgccctaacaaacaaaaacaaaaacaaaaaggcagtcccgcaatggccgccgccaatcccataaatgaaatattaatcatttggaaatttgaaatttctgtacataaaagcagccaagcagttcagtggcatttataatagagacacgtgtacagaaaaatgaaaagattgggacggagggactgaagtggacgcgaaatgcaaagagacaaaaacccagaaaaattaaaaggaaaccacaggtgcggggcaaaaacaaaggatgctcacgcttaccgacgaccacaacgacacacacccccactgcgcacgttagccaagaggggtgcagtgcagtccacgacactacgctacactacacacattgggaaagacaaccatacaaaaaaaacttgattcggttaacgaaaacgtgctaccgtctagttcttatctaattttcagtactcgaaaatatgtgttagaaatactttttttccaaatttttttctatttacaaaataaatttttgttagagtgtaaattttttatacaagcgtgctaatttaaattatccgaaactctattttctgtacaggaaaatgttatagcaattttagacataggaggttaacctttgtaattagcatcctccaactaaaacacaaacaagaaattaattgactcgaatgataaactcactcacctcgctctgacactcggcgtcgtctatttccactccttttctcttccgatcatcgctcgccgccattgttttcgccgctactagtggttctgcgctggcgctcgagtctcccggagatgaaattacagtcacttcgcatcgaatctccttcccctctcctccttcacctaaattaccgaacgatgtatcctcggggcttctcagattgggaccgaccgccgccggcgtatcgcacgaatccaccgcggttttcgaacaggacgggttgaattcaaccgtcgacggtttagcgagcctagagaagtgaccgaaattctccgtcgttctagctggaggtataggtggcctagacgccatggaaaccggcggcggcggtggtggcctgatctcggaaaattgactaaggcgcataggaagaggaggagttgagttcgtggcggtggtggtggtggtttcgctgagctgagggtagaacaagtcggtggagaattgaggatcttcaacgagaggatgatgaagccaggaagacatttcatcttcctgcataaaaagatgctgttgctgttcttggagatgtagatgattatgatgagcttgtgcttgggataacctactttccatgtcggcaggcggtacagcgtcgtatttaaacggaggtgataattttctcatcgccgatgatgatctctggttctggctttgtgtgactacctgaccgttctgccatagaagctccataatatcgtcctctggactaaaacatttcacaaaatcgttctctgttcagatcaaattttgcttcaaatctcaccataaacaacaacaacaacaaaaaaagtaattaagaacttacagaaaagattttctgggaggacgagagtgtccggaagaattgggatgagttgagtaatcatcatccatttcgaaatcgggtacgcagtgattcattctcttattaactcttaataattctgtcaagataaccactcaaaatccctgctctacaacaacaaaagttcacactcttattaattatccataaaaattaaaaaaaagaacaatcgtaatatatataaaatgaaattgaattaccgaacgaacaaaaagcagtgaggatattgttatggcggtagtggacgcaaagaaccacataaagtctgtacaaatatataataaacaataataacgattcaggtaagataatttgattatatatatatatggtgaaaccagattgtgcagagattattgggagattcgtggtttgtgattgtagttcttggatgaattgaagaagaaaagtaaggcagaaaagtgtttgttagtgaaaaaagagaagagaagagatgagatgagatgagatgaggcgtttgattgggaaatggaaagatttttgtgttgctttgtttgcttcttgtgttactactcttgtcgcttc

SEQ ID NO: 36730 - DNA, 5668 bp, Cannabis sativa
tttttaaaccatcagttttcaggaaattgttcctttgaatgctggaaatgttctagtgattgaagataacgaacctgctgcaaaatggttgtctttagtcaatcagtctctgaacaaaccgtccaaagtcgctccaaggcgaatgaatacaggcagtggagcactgttctttgctaagccttctcttagaaagatcagtaaaaatttcaggacagaaagcaaaagaaaattgaagtcatgtaattgcacagctgaaatggaaaggaagcatagcatggatttctgttgtcccctccaacaaccgaatttaagtgaagtggacttctcttctgaggaggatgatgaagattctttgactaattccttttccaatcgaaaccacatgaagtacagccttgtagcaagtaagcaaatggtgggaatttttgttactatttggatgaggactgagcttgttcaatatgttagtcatttgagaatttgttgcattagtcgcgggatcatgggctgtctcggtaacaaggtagtgccaaagtttcataagcatattacttttgtttcactcaaaatgttgtctgagacttagatatgtgtttgtttggttgcagggttgtatatctgtgagctttcaatttcatcagacaagcttttgttttgtctgtagtcacttggcatctggagagaaagaaggggatgaacttagaagaaaccttgatgtcatagaaatacttaaaaacactcaatttcctaggatttgcagatctccatatagtagaatacctgagaaaattcttgatcatgagtgagtattctatattctagttgatttaaacacttgtaacagaatttttttatctgatatatctgttggaaaatgattgtagtcggatcatatggcttggcgacctgaattaccgtatttctttgagctactctgacaccaggaaacttctagaggccaaaaactgggatgccctctttgacaatgatcaggtatttaaccatgaatgactaaagaagtgttcatcttaataatgtctctagaaacttagttattgaattttttttggtgtattggttgagttgaatactacttcttgggtcactatggggcttgaatttctaaatagatttgtaacatgtattttgtttatatatagcttaatattgaaagagaagcagggagagtatttaagggatggaaagagggaaagatctactttgctcctacatacaagtactcttataattcagactcttatgctggagaagttcataaatcaaaaagcaaaaggagaactccagcttggtatgtctaggattagaggattcaattatatgtttttccgaaaatttaacaaccaagtttaattagttaagaaactgcaggtgtgatagagtattatggcatggaaatgggatccaacaactcttttactggcgtggggagtcccgattttctgatcaccgcccggttttggcagcatttttggtggatgttttgactaatgggattgggagtagttccaagaggggattatctagttccaatatgaaaattgagattgaagaactcttacctaccaagtagtaccgtcctctataataactgcaggtaagttcttgacttcttagcacaaaaaccgatataaccacttcactcataccaagtagttgattttcaaactaggccatgtgacagtgttacaaattctaaatagaaaaattcattgtcaataactattatgccttgtcttttttggccagaaaattttaatagaggtattcacattttgctatttgaaaccccattcccaccatagtctatagatctaggacccatactaacatattctgctataatttttatttgaattgaggtctaaagctttttgcattgttcccttgcacatttttcaggtactaaaagctgctaaccagtcattttgagtaaggtgatacccaagttttgctgattatgtaagaagtaaatcattttatgcatcataagctgtaaatagattcagggaagatttgacataattcttgtatcaaaaaattgttcacaagatgtaattttcgcagtgcgcgctgcagttcttgcttcataatggaatgttccaagagattagtgattctgacttaaaatgagtaaactttgtaactgagatctcagaattgaatttgcctagaatgtttgtcaactaagaaaacattgtagaacttttacatttgatctttctctttactaagattaattagatcaaagacattatggttagggtccaaaatctaattttcttttccttagttgatttagccttgtaacccctattgtaacccagcttgatcttttgatctgtttccagtaaaagtcaaagatgtggaaagggaagaagaaagaagtttgaaattttgttttttcttatatttttaatgatttgagtccacatatgatgttgttgttgattaattttcaaatcattattatattagctttaacagtgttcttattcaaacttcatgctgtagttttgcattggtaataccatcctttgttttcttatgttcagtgcctaaataaatattcaaggcccaagtacaccatcaactaattctgataatatttctttacttggtagacaagaatccaaagctaaccaaattatttctaaattataatcacgtgacttaatcacatgtaaacccaattctataagcattttattcttctttctccttctgggattttaggctttggaacttggaagctgagatagtcaaaagactcaaaagattgatcacatgacacagctgcatattatattaatttaatagtattagtaagcaactagtaagaagtttttaaaccaaagatactctcaatctctttctctcatatcctgatcttattgctgtataaaataagcccttctgctcatcattggaacaaaaccaaacataggaaaataacaaagacatcttcttgagtcaacaaaaaccatgaaattattgactgcagttgtttttgccataactttgatgctctcactttggctttgtattatggcacaagcaagagttaccccttcttcttcttattcttcactaaaacttaccttgaatttcaactcccaaagactaatggccacaaagtctaagcagccggctattgctgctagttttcgaacaattcctccaagtattccaaatcccactcaaaacaagtaagattttttcttttatataaagtattttttttctttccttccactatatttgggatattaactaacacggcatgattgtttgtcaggctgaagcctaggaaaatggggtgatttgacaagaactttcaagattttacgccctcaagtgaccagtagcaaagtgttagttgttagatccataatattcaatgtaattttgtttttttatatttttttgattgttaacagaagctttggaggtagattagtgatttttgtttctagaaagaaaaggtgatagaattgtgtaggaacaatacaatttttaattttaaagaaggttacatatatttagtggataaagcttttctgcacaaatgttttgtatgtacttttcttaggcttgatttcggttatggtaatggtccgtcctcagtactaaaagccgattattttaactgggccgggccagagcctccttctagggcctaagttaaaagggcccaaatgttaccattttttatgaaaaatgattcgtagaaattgagtaacgttcaattacagaaaccaatgtttgcgacatggttttatatatagctttgttatgttttgacttgcaatgctccaataccataaacaagtaaattttccttgatcagccatgaacacactaattaacaacgccgaccgcataggccaaatcaagccgagtacaaatcaaccatagccatacccatacgtaatgttgcctattctacatctattattgcagtatctttcttcatatgttgcaatgtttgaggaacaataagtttgaagtcgcacgggaagccaataggaatcacacgggcacttattctcacacacatagaagcgaggagacgaaaatcgaaaaaaaatgtatatgcattttagttagttacgacatatatttataataaaagattatatctataaccataatattagtttcagagtaataattaaattagattgtatatacgatagaggtcaagggttcaaatctattaagaaaatcattttttttaaggtttacatttgtccctgtcataccaaaaaaaaattacgctccccttactttaaatttgaggtccgtcattgttcttatttacttagagcactatgctctctaaacatactacttagctaaaatagggagtgagtattaaaaaaaaatgagttccaactccaaccatgaaaaaagataactctctataataattgatagggagattttaccttgctctctaaacatactccttagttaaaatagggaacgagacttgaaaaaaataagctccaactatacaaaatatggctctaagcatctctaatggtattctcaatttttttaaccaatatagctaaaaagctaaaatagaaagtcatttttattattgtttgactctataaatagtaaaaaagtaatagtgcttttaattaaaatactattaaaaaatattagcaaaaaagtaaggagctccctacgtttagagcactctctatccattctgtattatagagagtcattttttgatgttttgagctcatttttttcaagcttcactccttattttagctaaagagtatgtttggagagaattgatagggaactacctacatttttattaagtttttttaatggtattttaatcaaaagtaacattactaatttttattattttatcaaaatttaatttatagttggcaaattcgaagtctaaaatattattaaaatgattaaatactaatcaagattgagagcatgattgaagcaataataataaaaatcattttattttaaacttttttttaactattttagctaagaaaaataaagagtattgcgttagtaaaaaatttgtaagatccatggagaaatgaatcaaaataatttttttattttgattatgttttatttgaattatttcataaatacacaaaaatacagttgtaaggaattttaaaattttttatgatttttacgattttatttatagaaaatgcggtctttgatgtatatttatgttatactcttgttaatttattgttgattttttttatttgtatgttattttttgtttggatattatttttatgttactttagtgtaattttcttattgtttttgtattttttatagaatactgtaaaaatatataaaaaaaatctttaaatgtaaaaatataaaaaatttacaaaaaaaatagtgtatgtaattatctttttttttttagtattttactaggagttttatgttggtttttatttatatggttttactaattaattaataaggtgattcataggttttttttttttttttcttgtcataaggtgattcatagttttaatacggtgaaaattgaatattttttgaccatttatttttaagggaattaccttatatactgttttttaacctttttttttttttt

SEQ ID NO: 36731 - DNA, 4972 bp, Cannabis sativa
tacgtgattggcgattgtgatggaaacatattaatgctggaagacttttatgtacatatttgataaaaatgccagtgagtagtaaccatatatgataaatatatattctttgtcttaatgggttccagtcaggctaagtgtggaaaaagtattccttcaaaatagtagaaaaaatgcgactttgtatcattgttaatcttatctgaacactctaagaaatatacttatgtctctgtctccactactagactagtagtgtactacaattgagtctcccatagtcaaaccccaaaagggtcttcttttcttttcttttgttttcttaaaaagctttgaacttttcttttgttgagctcctccttgatcttcaatggagacaagaatgaagctacactttctctttctttctctttcctttctcctccttcttccagtatcagcctctttcactccactagacaattaccttctcaactgtggttcaccttccaatgttacgctctttaaccgggtcttcattggtgattcatccaatttgggttcggattttctctctacagaccggtctatctcgttcaagaaccagaacccatctccaaacttgtctcctgtttacagcacggctagagttttcaccgctgcttctgggtataacttcaacatcaagaagaatggcactcacatagtacgttttcacttttcaccttttgttgctcctagttttccattaccatctgcaaattttacaatttctgtaaatgggatttcggttttgaaaaattcccatgttagagatactttgattaaggagtttataatgaaaatagacaaagctgcacttgaaattgtattcacccccttgggtaagtcgggtttcgcttatgtgaatgctattgaagttttttctgcccctgatgactttattgttgatgatggagttaagtatgttaaagctgatggagatgtagagtacaagaatctctcttctcaggtttttgaaactattcagagaattaatgttggaggttcaatgttaaccccttttaatgatactttgtggagaacttggttacctgatgaagaatatcttgttctagcatctgctgccaagcctgctgtcaccactcacactccaaattatcagaaagggggtgcaagtagagagattgctccagataatgtctatatgactgcccagcaaatgaataggactaacttaaatgttggctctagatttaatgttacttggaaattcccagtaggttctggtggagttccacacttggttcgtttgcatttctgtgacattgttagtcctagtcttaactcactctacttcagtgtgtacatcaatgggtactctgcttacagggatcttgatctctcaactttaactattcacttacttgcttctccagtgtatatggattttgttgttgattctgatgattcaggatttatgcaagttagtattggcccttctgatcttagttctccatcaagggctaatgccattttgaatggggcagagataatgaagatgcttcatgccgtcccttcgcagtcaaatggaggggtaagtaagaaaacagtttggattttggtgggttcaattgttggaggagttgttctgctgtgtttggttatacttggaatcattcttcctttcagacgaaggaagaggaggccaaaaccaagaccaagacctgcagagagtgttgggtggacgcctttacgcatatttggaggcagttcactcagtagactgtctgaaggaaccacccttgcatcaccaggaccaaacggatatcttggcttgagaatccctttcactgagatcctatcagcaacaaacaactttgacaagaataggattgtaggttctggtggatttggtattgtgtacaaaggtgttttgagggacaacacaaaggttgctgtaaagagaggtcagccaggatctaggcagggccttcctgagttccagactgagataacaattttgtcaaaaatacgccaccttcatcttgtttcacttgttgggtattgtgatgaacaatcggaaatgatattaatttatgaatatatggaaaagggaaccttgagaaatcatttgtatagtccaaggtccacaccattgtcttggaagaaacggcttgagatctgcattggttcagcaagaggtcttcactaccttcatactggttcagcacaaggaattatccaccgagatattaaatcaacaaacattttgcttgatgagaattatgtggccaaagtggcagatttcggtctttcaagatctggtccatgtctcagtgaaactcatgtaagcactggtgtgaaaggtagtttcggctatcttgatcctgagtactttcgcaggcagcaactaacagataagtcagatgtttattcatttggagttgtgctctttgaagttctttgtgctaggccagccgttgatccattgcttcctagagaacaggtgaacttagctgaatgggcacttcaatggcaaaggaaaggcatgctcgagaaaataatcgatcgccatcttgttggacagatcaaaccaagctcgttgaaaaagtatggagaaacagcagagaaatgtttggctgaatatggtgttgataggccaacaatgggagatgtgttatggaacttggaatatgcactccagcttcaggaatctgaaccacagactcaacaggaagaagttggcaatgtcgattcgcagcagttgtcaactactacaactcctagcaatgcaagaagagtagaagaagaagaagaagctgacggcagtagtagtttagaaattaattcaagccaagttttttcccaattaatgaccaatgacggcagataacttcaccacatgctgctgcagcattcggtttttactcagtaaatctactctaaatctccatctatcacaagttacaacatcagaagcaacatattttaaaggtacttaagtattaacattaaatattcttccttcttttcattattttcccctttcatatataattttgattgcaaaaacatactatatagtatcacaatattcatatagaacacaatacatgggcttctaatttcctagcctaaatagttcagtggcttataactgttgtatggttttctctattgttactatccactggatatataattaatgaaactgcttgaaggtgggtctctctctctctctcacacgtattgtatgtatcactgtacttgctctttcatccatttattcaaccttagtggacatcaattaaaattcaaaagactagaggcatattatgttaggtgggttgtattgagtcattgctcattatggttttgcttaccagtgcattagactctaggcactcacaggcattagtgaaaatggtactcaagtatttgagcaacttaataaccaaatacctctgtatacatgtattcccatgataaaatagaaaagacaattagcaaaaaataaaaaaataaaatagacatagtcatagtcatcatatatccttaaaactagtttcaattttggtagttgttttctgttcattagttgtagttttcttaactacagcagagtattggattgattcttgaacaaagttcattcttttgaaatatataaggaagcatagtacaataatcaattatagaaatcttgcatgatttgaaaaatgaagtttcatcatgtgagtgtaaataacaataaaagtagaatatactaaagcacagccataaataaactttcacttgttaatatgattgaataggacatagtctagaatcaatgaacaaaatagacaactcttgtcttttttccattagtttttgagttgaatagtgtaaccagcagcataggaacaacacaacatatgtacaagtactacataaattctataatatataaaagaaaaatgaatatgaaggcccttaggcctagactaatctagatatcaagatatgctaatgttatggtgttgattcactagaaagtaatttcattttcagctttgatttattgcaatgtattatgtacaaagtgcaaatatgatgtgtgtggagggagggtccccttatacggctggaaacacaatggtctatttttgggccaatggaatatgccattattcttcaatttttgcaacaaaattccaatcgggaaaaaaatgtgcagagagtggagaaataatataattatctagttatgattatcagaatttacataagtgttagctaaaaaaaataatcattttatattcaacttaggaatttaggagaggtggtatttggacattctctccactaacacatacacccaccatgttgtgggggcttatcatataatattattttttgtcctcaatgtatcactatctttttgtttttgaacaaattgtgtcactagctttgatcattatggtatcttgaaattttctttaattaatagttagaagcaatgcactttcccatttgcaaaaagttcaaaagtttacccaccgccacatgtgtactcaatggtattttaggttttattttaaaaataaaatcttctcaatagttctttaaatactacaacttttttttgaacatgaggaaattttattccaaaaaaaaaaacagaacaaataacaagcaaggcaagctgcaataacaacataccacaaaaacaactctaccagctattgactatacttgatgcataattatctcttcttttttttttttttaaataaataaatatataaataagccttgtgatcctcaacaacttttatcacatcacatttttaatctccctactaagcactatagcagagttacaaacatcatcaaaaatacaactacttttatttttccaaatcaaatataaagcagctaagcatgtcaaaaagatctatttagttggggcgggttggagctccgattcgatggatcacctctaatc

SEQ ID NO: 36732 - DNA, 5216 bp, Cannabis sativa
  modified_base (3998)..(4000): a, c, t, g, unknown or other
tgattaatataatattaataacatattagcagtgtaatataaattaaattatttattttttattaattaataaagaataaaaataaattaattttaaattttcttataaaaacttgttaagaaaaggaatcccttaaattttaaattatacatgttgctgttgcgtttatgtagcaatgacacaataatttaacagaaatcttatatagctctatgtataataatttaggagaatttttaaccgataaataaaagattttgtaatgataataattggatggtaaaaaacctaaatgaagtatataagttgaaccttttcgactattaactttaacctggctgattgggtcactcttattgtccttttcttcaaccacattttctaactttatctctcattcccaaattaatgactcccactcactcacgttataggacctagtctactttgtctaattcttctttacacatttgtgtttaaaaaatttaagatataatttgtattactttccctaatttttgtttttgtgacaaatattactttccgtaattagtattataaatatttcaattttttttttttttttttttaaaaagagataaaattaaaacatttataaatagtatttactgaaatttttaaaaattaattataaaataaataagcttcaaaaaaaaaaaaaaattaaagaaatagagaacaagatttataagtagtttaagcgttaagtagccttgttccatgagtcagtgttattgagcttgaaaagtttcaacatatttcttacaagtgtttttgcccgagaagatgaaccctaattcttaagacttgatcctagaaatggtttttcaactcttttcatgaaggggtgatgtactatttataggtgagatacgagtataggcaaacccggactcgataaaatttaaaggtgttaactaggcccactgatagggtaaaatacaatatatgctaattttaggccaattgagtgaggcccaattcacgagataaagatcgttcgtacgagtgaggaccatttgaggatgacatgtgtcgtgtgtagccacatccattatgagaatattagaattagttaaatactactaggttagttagcttttctgttacacagtttgttacacaactgtttagccattatacattataaataacgattccctctctttctaataaactgattcagatacaaatcaataagacaaattcttccttctctgttttctctttgtttcactaatatggtacaaaagtaaacctgtaatttaatcttcaagaaactcaagctttcaatcttgcatcaatggtgagaacttgagcaacctcctctgctaccatcacttttacagattcagtggttgatgctccgaatccgtctgctccaccaccacaaacaaaatagaatgttggccccgcacaaattccttcacctcgacaagtccattgtcctcctccaaatgattgctctgcttgcaaagatatgagaagcccctactacttgagcaccactgatcatcaaggacttgcccttgctatacatgttctcattgatagaaatttttagccatggaggcgagacttcatgcattccataggtgtcagaaacaaaactccctttcttgattgatctcttcctcaacctctactgaatgatcctcttataggttcttggatctgatgcaaccaaatagttgtcttggatccttcattcggtatcactagaaatcaaaaccagcatcatgtaccttgatactgcaactcaaatgtagactgaactcaataaccaatcaatcaagaaaatgcaccgcgtatcttttaattgaatgaatcgaccatcttttaatcaaggtgatgattcagtcaatactcacttcacacaacttacaaccatgtgggatgagattaaccagcttcaaccatgcattccttgcacctatgctgcttcagctcaacatcaacaacaacttaaccatgaccagatcttgcagttcttaacatgcttaaatgaattctaccatgctgttcaagctcaaattctacttaatgatccttggccaccattgaacaaagtattcgcaatgatggtgcacggccaagaacgacaaagaacattaggtactcgatttaatgtaccagtggctgctactaccccaattcccacaccagcacagagttcagatccttccccatatgtaaatcttgcatcaagaaacaaaaaaatgagacatacatgttctcattgtcaaaaaccaggccacttaaaggataaatgctactttctccacggcttccctcctggttatggaaattacagatccaatgatcaatctgcatcggacaatcgcaaacaaaacaacactcgcacaactcctcgtgcttcccaaattttaggagcctccattaatatgaacccctctcaacttacacctgattaatgtcagcatctgatatcactcttaacttagtaactacaactagctaattccacatccaatgacgttgttgccgctactaatttttcaagtagcatcttttcaattccctacaattattggattatagatagtggtgctacataccatgtttgctacgacattagatgtttctcagaattttcatacaaacatcatgctagatatgttacattgttacattacctaatggaaccgctgtcaaaataggcaaagtaggcactgttaaaatcaataacaaaatcaccctaacagatgttcttttgttcctcaatttcatttcaatctcctctctgttagtgcaattttacaaacttgttctagtagcatgttgtttacttcaactaaatattttattcagggtctttcatagtaaggattgggatagcttaaaagctaggcaatctctactatatctgacaagaaatcttagctccaagctccaccaatgccaatatttcaataaatgttcatattaataataactaatggcatacacgcattggacaccactctgtaatggtcacaaataaactcaataaaaagtttacattaccttctacttctttacacaattttcattgctccacatgccaattagcaaagtaaaataagcaactatttctttcccataatagctttccttctgctagtttttgacttgatccatattgacatatggggtctttatcccatccaatccatagaaggatacaaatatttttttaacaatagttgaaattgtaatgccttgatttttagggacgctacgtgtgtaattttataaactagtttaatacaaatagaataattaattattaaaaatcgtgactatattaaaaacttgactaaaataaaatactaaaaataggcattataatagcataaaaagtgtgttctcgggatccctattataaaaagtttacaaaaggactaaatacgacgacacctcaataacacaaaaccaaaatgcacggtagatacagccagcccaaaacaactccttgcaactcggcacgcaggccagtgaggtcaatatgtacatttctagagaagacagtcacctcatggcaactctaacttttccttccccttacctgcaccacatagcacccgtaagtcaccaagactcatcaagaaaagtaataataacaattatatagtttattattcgaatattttcatttatacacaatcagaatcaaaccattacgcattgttcataagatgaaatctaaatcactactaacatctaccacgaataaatatcaatatacatatatttgataatacaaaactattatattaataataaaatttatattcatttaataatataaattacatatatatgttacctcataaagtgaccatctttattacatcacattatctaatcacacaagtcgatgctttaatatgataatcctgtattgcattgcctaatcaggcaagcccgtgctatcgcctgacacccatgtatcatataattgcatcacctaatnnngtgagcccgtacctacgcttagtactcatatgttgctaacgcccgtaactacgctttgtacgtcaccaggaatattatatcacctaatcaggtgagctcgtacctacgctcggtactcatatgtcactgtacctacgctcgatactcatatatcactaacgtccgtacctacactttgtacgtcaccaggaagaaacccaacaatagttccattctatgccataacctggcattctacatgttgttgtacctacgctcagtactcacatgtcactgtacctacgctcgatactcatatgtcactgatgcatgtacctacttttaatatgttgccaagaatattgcatcacctaatcaggtgagctcgtatatcacattcataatatcatcacattatcattgcttaaccaatcaatctttttattatataacaatattaagcatatttcaatctcaatattaatcaattcacaataatattaattgtattacaataaaacgtactgtgcagtacaatatacttttcttaactttaattcagattcatacatatcggccaatctaagtagaaaactatccccgatgatctcgtccctatgtcacaataatagtaaaccaataagtgtttattctaaaacactacttaacagctgtgaaagacaacctaaggtttcctaccaaatccaatagcacaaatacactaaaacaaaacttatattttgactctaaaacaaacaccatatgatagagctcattgcaagcttcaaaacggtatatagaacgtccaaaacggatacccgaataaaaagttacgacaaaaatacgattcgcgaatacgcgaggctgcctagaaacggtaaacaggttgagaaccggttaaccgcttccaccagaactggttgaccggttcacaatcgattgaccggttgggcagggtggtaaaactcccaattctcaatttatgcactcaccaaaatactactgaaacctgtccaaattacttcaaacttcacaggacacatatatatatatcatacatacaactatacttacgtaatagaaatcaaaatcgaacccttaaatgaaaaacaccgctaatgtttgaacttaagctataaaaagttccaaactcaatttttaactcaaaatatcctcaaattcaacaagaaaatatcggaactagtcccatgactaccggagaacaattctataaggt

SEQ ID NO: 36733 - DNA, 2006 bp, Cannabis sativa
tattttttattagttcacaaagaattttgatttttctcagggactaaatgttaaaaaatcaaaacgttgaaggattcttagtgcaacaaaccctaaaaagaaaaattgaatttcatgtcgaaattggtttaattggagttgtaggggaaatattcattgctccactcccaacctcacaaacagctccagattttacagttcttgagtcactcttcacctgtgtttcaggtatggttttctcttttccgtcgttttcaacaaataatcagaaaatttttgtgttcttcctttagctgaacatattttaacaattaacttgtttcggtaaacattttatattgttcaatttcttatagcatacaaagttttgggcaagaatgaattaagaatcggagaacattattttggagaaaaataatattagagctttaagattaagagaaattccatcattgggttttaaagattattaagcttttgtatgaaagaagggcgtccatgcaatctatataggcaaatgggtatttgattttctacatgaaaattggaaaattgacaatttttattgtcatcttggtcgtggctgttttatttttccagtatccattattgggttgtagtgtgctatatgtatgacgaattgttttaagcttccatgcattcttgttttccctttccagtaattctgtggttttgtttattgtgatatgtattcttcttagctttactatcaactatataccatgaagaggccaatcccgtggagtgaccatgttgatattgatgttgatgttatatcatcagatgagtcttctccttcagactcagatgtaaatgtcagtaactttcaagctccagctcccaaagaaatgacatctgaaggtgagatcatggacttttaatgatataacttcaaaaatgcacttatatgtgaaacttctatagcatcaaatatgcttttttatgtttctgtacatctctggtttttcatgtctcatgttcaacacatttacttttttttacttgtgccttgagttttttgttaggaatatctctgttattgtagaatcttttttttgaataggcaagtctactgaaggaaaatatcaaaacctatgaatgttattttttgaattttgccggttctttagcttaaaatgaatgtttcttccttttctattggtaaacattctatttgcagaagattcagtgatcaaaagggctgagatgtatcaggaatacatgaaacaaatcccaattccaactaaacgaggctctgttattccatttatcacatggatgggattaggaaaatccatcaagcagctatatagacagcctttacattacctcaccaatgttcaactaaagcaatgggatcgattgagggttgacaatgaggatgaagacaagcccttagataccattattcatccttgtaaagctgaagccactgtttggctccttgaggaagttcatcggcgaacagtgtctcattatcatgtagctaagctctggcaatcagatccattgcaccatgcatttgttgattccattttcccccagttgtgaaaaatatcatgtctttagttgtaactggccttttgcccttggtttgcagattttggtcttaaaactgattgatgaattttgggatgaaataaaagccagtagtgttattttcttttctggagtattcatttcacttgaagcactgtattttaatcattgtccattattgagccaaaagaaaggggcatttaatagtggcaaagatggaaggaaatgctctcatgttaatgttcatcaagcataaacaacttccatcaatttgacatggttcttgaaaaatggatggaataaccaaagaagggagagccagaaaatgatccaaaatgttactgtcagtattcagataggttttgattaatgctatatcagagccaacaatgaaatttaagtattgagccagttatttacagagtaaagatatcttttcttttcgg

SEQ ID NO: 36734 - DNA, 1014 bp, Cannabis sativa
aacgccagttacgataagaagctcgtgttcccaaagaaatttgacacttgaaacatcattgaactttcttcatcaaggaacaaaacccaaaagtattttacttcaaagctactatctttatttaggtagttagaaaaacacaaacataggaaagggtgttgatagaattgttaaagaagagaaagctcacttttggtaagtcatagtcttgatgttgaagccgagtgtaggactgataacactggtgtcttcgccattaatcttcaaaacaattgttgtctttccagaattgtcaagacccctaaatgagtgacaaagaaatcatcaaattcattctaataataagatgagacataaagatgattattgaaatagaagaaaggaaagactttcatacaccatgagtatgcgcatttctttctccttcttcttaatcttcctaatgatggtaagaagacccatgttcaccaaatatctctttgagtcctaacagtacaaagacacaaggtcttgaatagcagagaggttgaagaaagtggtgttgtgatgtttcaatacagaaatgaccttgtgctgttcttcctttctgtggtgaaattaatggcccccataatccaaacagtcagctctaacaaaaatcatagttcaaaccaaaagaagaaaaaatcattttttttaaacaaaatcttgcttacagtatatattaaagaaaatgctgtagaaacttagatcaaattttcgacattgaatatatttgcacctcaaatttgaaagagaccaatgtctaatgattgagaattaattacatgtcttatttaaataaaattttaaaaaaattacatgttatataacttaatattatagaaataaatctgcataaattaggaaaaacaatcttatgattccgtgacaaaatcaaccaaattaacacatctcaaaaactgccaaacccaaatctcagaatttcatatagtttctattagatgtgccatttcagtatttattttcttgctc

SEQ ID NO: 36735 - DNA, 5412 bp, Cannabis sativa
  modified_base (4976)..(4976): a, c, t, g, unknown or other
tatccagttaatcagcacacaacccatttaaaacaaaagaacacataaaatggacgaaattataaaaatgccacattatgatttatatcttctagacaaatatcatcatttctaatagcataattgtgtgcttctctagctagagccacattatccttgacttgagcatttccattgaagctttcaactgccgaacctagccaacactgactgtttcatcatcaactgcggattcctaccaccacaaccacatcatcataatcgtcatggtcttcattattataacaatattttctgatttcctcatcaaggtctctttccttctttttctcctcttccgattgggtgagaagtcatgaaaggtggtccttgaactgttgtttatcatggcgaccaatagtaacattcttagtattcgaattttgttattagtattataagtagtactagtagtatagttgcaaagcttaccagctttcttgaacacaccatgatcctcgtttcgagaaggtcacttggatattacttttgttttggattgaataagtagaatttttaccccgaaattatgatacatctaggatgttgtccgttaaattattctttttttttttaattaaagtttgtaacttttattcatgcaaaacagttaaaagaatagctaacaaatcagtagggacaatccccttactataactacgacttgaggagaaacaagcagaactagctaaataattgaccgccttatttgcagattgtttaacaaaaacacaagaaattgaaagcaagtcttgacaaagaagcttgcaatctgccataataaaaccaaaggggaaggcatatttgaggtgctatggagagaattaataacagtttgcaatcggactccacaaccagcttttgaaaattttgagttttgatccaattcaaaacttccttcaaccccacagcctcggcacacataagttcaacctgcccctgcttacgaatagcagcaacatataagagagagcctgagtgatctcttgcaatccaaccaataccaaagaagcttgctaaagtgaaaacgaatgcattgacattgattttaatcgtatcttcatctaatatgcttcaccgctcttcaattactccattgacatcagagttattaccttgtgaacgaacgttagctaatttctattgattaaaataagcataagtcgaagacaccacaacagcagcaacatgctccttattgttccaaaccagatcattatttgccctccaaatacctgaacaaatcattgtaaggttacacattgcagccgaaggaaaagcttgcaacatcgaagtaaaccagtcggcaaaatgcaaaccagcaacatctttaatttcctgggcagcaatagaccaacactgctttgcaaaagcacaattcaccatcaagtgagtaattgtttcaggagcaagttgaaaaaagggacaatatataggaacctcaactcttttctccagtaactttgcatgtgttggaagactgccacgacaagcacgccatactatattccatacttttgctgctatttttagattccataaattcctccacaaacctgaattatcactccagcaagatggccattggtattttgtatatctttgtaagcacttttaacagtgtaatggcctgacgcttcaaaggaccaatacctagaatcattgtccatagaatcacttaagataatagcttgaaccagatctttatctcgagtatttagcgattcttccaggatatcattgtcccaagcttaccttccagtaaccatcagctgttgaacattgattccctcaaattcaggatggtctgaagtaataaaaggatttttcgaatgggggagccaagcttgatcaagaacagtatcagacctgccatctgcaatgcaccaacgacacccagttttgatcaaagtctgagctttaaagagattgtgccacacaaagctcgggttctgtccaacagaagcagtaacatacgagccattgggataatattttgccttgaagatcctaccaaccaaggagttttcattagtcaagagtctccatgcttgttttcctagaacccatgcccccaacatgttcgtgagccaccatatgatcccaactttccctaataataccccttccttgacccgaagaggaattccaccaatatttaacaagaattctttccatttcacgacaaagcttgataggtaataaaaggaacacactcatagcgtaacttgggagtgcttgggccacggttttaataaaaatttcttttcccgctctagaaagcaatttaccatcccaaccttccactcttttcctcaccttttctttaagaaaacctaaaacatcattcttatttcgatcgatagtacttggaaggcctaagtacttgctatgttcatcagcttggaccattcccgtgacagccataattcgttgccgcacagaggcatcaatattgttgttgaaaaaaatcaatgattttgccaagttcaccttttgccccgaggcaacctcaaatttatgcagcagagacatcacacgagaagcttcttcctccgaggcttgacaatatagatagctatcgtcggcaaaaagcatatgtgagactgatggcgcaccacgggcgatcttacaaccataaatccattgtctttgttcaaatctttgaataagagtagaaagtccttcaacacacagaatgaacaaataatggacccccttgtcttatgccacacaagggaataattggcccgattctctgtccaccatgaacaacattgtatttaacagaagacacactggtcatgatcaaagcgacccaactaatattgaatcccatctttaaacgcatagcttcaagaaaggcctactcaatgcaatcatacgctttgctcatgtctaaattaagaaccataaatccttttttccctttaatctttctttttaagtagtgaaaaacttcaaaggataccaaaacattatccgagatcaacctcccaggaatgaaagtactctggaaaggggagataacatggtcgaggagaccttttaatctattagccaacatcttggagataaccttataaagaacgttacagagaaaaattggcctaagatctcccatacccactggattttttttctttgggatgaggacaaggttagtatcattaagcccctgaggaatggaattagagttgaaaaatgttgaacaacaactacatccgatccaacaactgaccaaaattttggtaaaaagtaggcgtcataccatcgggtccaagagctttatcgggatgcatatcgaaaagagctaccttcacttcatccatagtaacaggttccattaaggaaatgttttgaagttgagcaataaagggtgttatacaatcaacaatctcatgccaatccaacaaagaagcttggaaaatattagagtaataataaaaaataacctgatgcaagccgttattccaatcaatccagttcccgtgatcatctttaagtttttgaattgtgttgctattccttctttttattgcaaaagcttggaaatacttgctgttacggtcaccatcttttagccaaagttgcttcgatctctgtctccaatacacctccttttgatggaaaatatttgccagcttctttttttcctcagagaataaagaacgtgagtgggcatctcttaactttttgagtcttttcaaggtagattttgattgagctattctacctttaaagtcccttgtaattgtattcccccacttagctaaaatttcaccacaataagccactttttcttgcatggtaactagaaattgtctacaacaaattacaaactggttaaactggaatgtgcaagttactaatcttcatatcctcatcaggtggatagatagatctaaaaaagcaagtttaggagaatggtgtatgctgctgccttagcaggttggtgtgtcacatttggtagctcatgaacatcaagatttggcaaccaagctctggttcaggtaatctctctttacaagagctcaagtggcatatcaagactaggattatttgtataatgcctaggcaagttgaacaaggagacaaaacttggtttgaccaattgtaaatattttaggtatagattaatccatgcgtccttcaaaagaaggagagctataggttgtaaaaattcaattttaatgcaatgaaacttctgattcataaaaaaaaaattaccaataactaataaatcatacatgtaataactgttaatattatgtaaaagcatgcaactatggatctattagaatttttgtgtgtatttatatttttaaatttcatgtaaaattgttggaattaaactcacttaacctgtcaagtcagtatgtccatctatttgctcatcagatgaatctgaaggggacccaccagcaactatatataggagttcctctaatcacgaaggaagttctgagttgagagagttctgagttctaatctccaaagctcatactttagattcagtttagtgagagagagtccaatatcatagtgagtgtgtgtggaggaatgtaaatgggagtatcactcttgaagtgatttccctcaatgtgaggcacgtctttgtaattacttagtgtgttgagttgtaatcttgggctcattctattgtgtactagtgactattcctattcaataaagatccactattcatccattattgagttaagttttctttgtcttattttaattaagttcaagttttgattttgtgattggttttagttttaatttgtttgtgtttcttgaacattgttacttctataacaacttgttttgagagtgaggattcaccacatagataatgcacttattttacaaaaagaaaaagagagaataatgaaatattagtggtgactggtgagggagggatgggaaaaagngagaggtcatgggttcgaactcaagacctttaaactattaaattattaattgattgtaaaataccattacgcgacattcaaaaaaaaataaaatactattcgtaaatgaaaaggcaaaaatactgtggtttagtctagtaatttcatacttctcctcataaagaaaggtcccaagttcgaattatctctcccccaattttttttttttaaaaaaaaaagaaaaagaaaatacagaaacaccatatctgaaagaaataaaaaattgtaaacatttgatgatgaactattatggccttgtttagttgatgttttgctttctgcttttagcttctcaagttgctattcctcaaaagaaaattactaaattagcttattttgaaaaagtttttcagaattaaaactagttacttttttttttttttgaacaaaagtagga

SEQ ID NO: 36736 - DNA, 3695 bp, Cannabis sativa
aaaaacaaaaaaaaaaacaaaaattatttcactaaccacctcactcacatagaaatatttgtctattttttttaaaaaaaaagtatcttttccaaacctgaactccactacatattaccctttaattttttttcattgaaaaatataatttttattagtaggtgagattatatataacaaagctttttgattcaatgggcctagtcagaatctcaccactgccaacctgggattcttttcatgttattgagcattatttaaaataacaaaaatacaaaacaaaaaatatagtaaaatattttaaagtgttagttagttattataacctctgctaaattgattttctgctctgttatagtaaaaattaaaaaaatgaggaacagaagcttctgtttttggggtaatctctgaaaattacagaggcccaaaaaaatatggcagaaaaaaaaaaaaaaattcaaaaaaaaatcttggttgaccccagcccaagaaaagataacctaatgtcttaatcattcaaattagactttttttttttgttaagagagaagagaccccactttaaaaattaatacagctgtttacaacacaagtaggaatcaaatccagaagattagcatttagcaatgccaaattgatatgactccattagaaattttattaaaagtaaaattgggcacaaacaattctcattgaattgacaaaaagatttcatcaaattatgtaaagacaaataaattcaacaacaaatcttttgattagaaaaataactcttcttttcttcttcttctaattaattagcaatttagtagtctatcttacaactggtgctctataataatgcaccaaaaattacataatgagattttacatcttggtaataataataataataataaaattcccttaaaaataatagaaaaaaaattacatcaagaaagataataacataaggatacaacaaaaaaatggtgctcttttatagagctaaaagataaatgtggcttaatgccaagaaaataatataagtacaaaaaaaaaaggggctttagttgttcatcggacggtccagattaactcttctatttacagtttgatgttgttgatcacagctcaactttcatatgagacacttgatttggacctgtattaaattttaaaaaaaaaacaattttaattaacaacattaaaattaatgacataattaatttaataaaaatgtgatttattcttttaccattaaggctctgtggctgcaaagatccatctgttgtctgattttgtccaaaacccatctgaacaatggtgtgcaggtcatcctcaccaaattgtggatactgaaaataattaataatgattaagtggataagttaatgattaataatcaaaaaagtgaaaaagttaataaaaaaattaattacctgagaaataagttcagaaaatccattgagttggggtaattgcatgccaaggctttggcataaagcagtatgatctaatgggtccattaagttatgggccatgggcccactagaaatgcccccatgaagtactgaattttgttggtgaccataaatggattgtgccgaggaatctaatgggaatattgagctgtttggttgaaatatctaaaaaaaaaaaaataccaaaaagataaataatcaaatcccaattcagataagtggaaagttttggttcaaacaaaaaaaaaaaatttacttacatcttttgacattagagtctccatgttggtgtccagcctggtattcacagaagacaacttcatagaaagaaactgaaaaaaaaaaaaaaaattaacaaaataattagtctcagtttagttaaataaatatattaataataaaaaaaattagaacttggaatcttgcaacatgatacatttttttttattaaaatatttgtaatcaaaatgtaaaatttacctcaacttggcgttgtaatgattgaacgtagtttataatttcatcaagcataagtgcttttccggtgacctgaaatatcaaagtttaatttaattttttttttttttttgaataaagtcaaaactttttaataagcataatttttaattttatgacatttacgtaccttgttacaaccaggaacaagatcttgaagaagcttcattctttcactaattttctctcttcgaacctatttcaatatacaatgtcaatacaatgtaagaataaatttttaattttgttttttaaggccaaaaattcttaccctttcagcaagactatgactatcagtagcttgaccccttcttgctctaacatgaatataatcctttggtggctccggtggctttgggctattattcttggcttgtttatcattattagtctcttcctctggttttggtgaacttttgtcgtttccattactaacttcagtttgcttgttgcgttttgaatttaagttgtcgtttatctcaacaccctaagaaaacaaagataagtcccacattgataatctataaaaataaaatacaatatataataacgaaatgggtccaaaatgctctgtttttggataatgttttacagttgagtaataccttggtagatgggtctttggattttcctccctttggattagcttttcttttccgggaattaagctcattggaaggtggtggtctcaaacaacccatttcgccatttgggttttgctctgaaactgttgactcatcttgagaatttgctgttgttcgttcctgtaataataatggtgaattttgtttttcaagtgccttaagggaaggactactcgaaaccctcgagagtttcccatgtcctattaatgggttgttgttgttgttgttgttattagatctaaactctgaattattgttcaaacccaattgggtcgttctgccattaaagcttctactcccaaagcacgaaaatctagctgctctttctgcaaaaccagggtcggcggacaattcagccaccgtcgaattcacagccatggattttcccatactgggcaatttttccaacttcaatttctgtggtgaattcattggtgtactgtaacacgacgtgttagtacttctatttccggcaatgtagggattcgccggcgccggagttgcagtcatgaaattctgggaatgcggtgagatctcgccggaatttcctatgttaccgagttttccgatcaattctctgataacgaagctgtcgtttgagatgttggagttggaagccacaggagatgagaccattgagcttagagcagagtcaaactgcataccttgttcgaccgttgacttttcccaagtggggttgttgttattgttgtaaaagccgtactccggggattgctccgatgaacaattgagctccatgggttgaatttcgagaggaccagatacagacacagtcgttgttgattgccagttattgggtatggtgagtccagcatttagaaaaaagtcattctccattgaatgaaaaatttaagctttttttttctttttctttttcaattttggccaagagagaatattagtgtttattagtattattacaaaagaaaacccaactaaccaaaaatgaaaatttaaaaactaaaagtgggttgaatatgattgcataatttgtgtctagctttaggctcgtattaaaaatatgaaagaaagaaaaaaaaaaagagattga

SEQ ID NO: 36737 - DNA, 2870 bp, Cannabis sativa
acttgttagtaaatctaagatcttggtaaaataaattccaacagtaggttatgtatttgaaggagtagattgtaatatagtagtgggggaagatgataatgaggaagtggaagaagtagattgaggtaaaatgtttgagagaaaggtggatgaggaattggatgatggaaatgtatctagtagagttttagggggaggaggagggatatgtgactgaatgaaaagtggagaagcagttgaaaactgatgaattgcttcatgaggggcagaagaagatggaagagatttcttgtaaggaaaaacagattcattgaacaaaacatctcgagacatgtaaactcgaccatatgaggatagacacttataacctttttgtgtaaggctatacctgagaaaggtacagggagtggacttataatttatcttatttttgttataaggcctgagattcggaaaatataaatacccaaaagttataagggttgaatagtcaagtttggtatggaacaatgtttcatgtggagtagcattatttaacactctagtaggtaacttgttaatgaggaagacagcagccctgtaagcttcatcccataattttaaaggtaaggagggatgagctaccaaggttaagccactttccacaatatgtctatgctttctctctacaactctattttgttcatgagaatgggggcatgaaactctatgaataataccattggtttttaacaggttagcgaaagccctatattcccaactccaatctgattgaatgacttttatttgagattaagttgtagctcaatttgtgttttaaattttgtgaaggtaggtaaagcttcatctttggttctaagtagataaagccatgaatacctagagtaggcatcaacaaaacttatgtagtacctagatccatttgaggagtctataggggctagtcaccgtaaatctgtgtgtgacaattgtaaaggagcagtataagctatttcagaattgggaaatggaagcttatgatgcttaccaagataataagcagtgcaaagatcaaaaatagttttattgctattggaaatgttacaattgttcatgatagatagaacatatttttggcaaggtgacctaatctgttatcccacaatataaagttgaataaaggtacattagagttagtattgaaacattgggagttagaaatgcaattagaaaaagcaaatgcatagggctttgactctacaggagtggagtttggagtagaaaggcattgatcaaacctttatagtcctttctcaacttttccaaccaataaactcttcataccgacctgatctttgacaagacaatggtcaggatagaaaataaagaagacattgttatccctagcaaattgagagacatcgatgagattgtttaaatgaagagattgggaattaaaaggagaagtgagagtagtatgatcaatatgttggatatgcaaacctgagttgtttcccatgtagatctgatctggagcttggacctcttgagatgtcatgagattgttggcatcattaatgagatgatttgttgttcccgagtcaaggtaccctaaggaattagcaattgatgcaggtgtagccaccatagcccgcatatcaacaatattaacaattctagggaaagattgaaaagatcctaggctagtgaaagagttatcaaaccgatagaaacattgtgtaataatgtggccctgtttgtgatagagttgacattgattttttagagttgtatatccttgaccaccacagtagccaccacgatgtccaccacaaggaggatatggatttggggaaaaggtgccagaatagctaaatccatgggtattgcctctataggaaggtgggtaggcaacatgacctccattgcttggtgaaggagtaggaggaagagtgggccttagtgttgtggatttagtttgagctgtaagattcacttcgtgtttgaagatatcaagctcagagtcttgttattctcgcacttcttgtgccataaggagggactcaacttcagcaatagtatatgcatctttccgagtggataacaaagtgatgacaacagagtactcacgcaaaagaccattaaagatttcctctatgtgatctttaggagactgaacatgaccaattgaaggtaaagaatcgacaagatgcttgatctaaagcagataatcagtgaggttacatgtgagtcgagtgggacaaaattgagtgttaaactgactaatcttagctcgatttagagatgagtaatattcttcaagactggaccagatctctgcaggtgtgttgcgaccaaccatgcatgtaagaatcttctcaaacatggacgagagaagccagaagacaagaagactgtcttgaatgtcatgttcaagaaattcaggactaacaattcgtgagtgttcatcttcaattgtgttgaattttggtggagtagaagaaggatcaaagtactttagaagatatttacctttgattggagcaaaaacttgatggcgtcatggaagaaagttattttcatctaatttgacaaataaggagtgattggacgacaaagaatttgatttaggcaaataagaactaactctactctagaacctattctctaacacatggcaacgaagatagggcagaagcacctccttccttccccttcccttggcaaccacacaatagatcacaccacccaaaatgactgaaccacgacacctcctactatgtaaagctgaacaaaaacaagaagagaaaggagtagagaacgggaagtgtggtgtgcttcagaggtttgggttcttaggtttgtcgtcggttgtgtaagagggagagaga

SEQ ID NO: 36738 - DNA, 7168 bp, Cannabis sativa
  modified_base (446)..(446): a, c, t, g, unknown or other
tttttttttatgtttttgcacataaaaaaagtagcatcatgtgatcatcggaccaccaacggactaccatcgaaccccatcagaccatatctgctaccctttttttttatgttttttgcacataaaaaaagtagcatcatgtgatcatcggactaccatcggaccccatcagaccatatcatcggactaccatcggaccaccgtcggaccttcgtcttcaacctttactcattttaacaacaggatggcatcggaccactatcgggcctgataaaaaaaccagttttttgctcaaaattcagatctggccatctactcacagataacaaacattactcattcaatttattcatttgacaatattgcctatcataaatcaccaaaaaaaaaaacaatgacaaaaaaaaaaaaaaatgggtcgaatgcttaccttcaacatctcggangtagtcgggtctcacggtggtcgtctgtataggcggtctatgtaggcggtgaggggtaggttcagttttggtgagggggagatgttgagagagaaccgagagagatagaggaagagagagagttgaagtttgaaaatgggaggaatatttttaggtttatcataaagtggtcatatttttaaaattttaaaatatattactttaggcataaaattttaagatattttattcatattttttcaaatagaaaaagttgagaattatatttgcatcccataacatgtataagaacaccttaatatttgttttttttcttacaagtgcactttaatattataagaataataactttgattagttttaaaaaatcaatcttaatatatatatatattttcatatttatttttaaaagatattttatatttatgttatatgtatatttttgagaatataagaaggaataaaaaataatataaattaaagataatttttttatataaaataaaaattattatatgaaatgcttttataaatttttgagggaaataaaactccaattatgtttttcttcaaaaaaaaaaaaaaaaaattcttaaactgaaactaattgtgcatttgttaaaaaaaattaattattaattatatatatagaccttaatcacatgcgataattagaaggaaaaagaaaagcgagagacgatggtaataaatatttggacagccgttttctaaaaatgataaaacaatccaaattggaataccaaaacatgatcatcataattaaaggaaataaatgtaataatatatatatacatatatatatatctcactatcgaaactaattaagatcataatttatattatcatttatgtgaattgaattatgagaaacttaaaaggttacttacgatcgatattgttaattaaaaggttcctcattattatgatcgagtcttttcatttctataactctcaccacataataaatacaattaattagcatataattaagcattattacaccattctataaataataaaccacaccagccaaataatttcactaatcacaactaaacacacaaaattaaagttaaaaaaaaaaaaaaaaaacaatggccaccacccaatattctctcaacaatacaactcttttggttttagctctagtgtttctggctctggctctgccaacatcaatggctcgggtcagaaatgatcatgacgatcataacgagctcatatttcggctgaaactagactcatcatcatcgtcgaataattgttgggactcgttgatcgagctgcaatcgtgtacaaccgaagtgataatgttttttctgaatggagagacttatttgggtccaagttgttgccaagccataaggatcattgggaagcaatgttggccagccatgtttggaaccattggttttactaatcaagaagttgatgttctccaagactattgtgatgatcaacaaactactactactaaaactcttcatgggaaattgtttccatgaattattatattttaagtttttttgttatgtgtttgatttgggttttttggtgtcagtttgtttggagttatagtactattgctgtttaactggttcaagtaaattatctatctatatatgtgtgtttacgtttttttcttttaatatatatggtatgaagtttgtgtttttcttatttaacattttgtgttttagttactcttaattgaatatatgttttggtgtattgatcctttaaatgaaaaattatgtttctctaataatataaaaaaattcaaatggatacataactaatttttttctgtcaataaaaaaaagtttctcaatttaaattataacagcaattatgagtatacgtaaacctcatataacataacttattacacaaatattatctaattcggtatcttatctgtatatgagtctataggtaattttcagtaaattctcgaacttcacttcatttaatttattgttagatatatttgtgacaaatataaaaaaaaaaaaaaaaatagcattttcttttcaaggaaagaattaacatatttgaaatgcatataaaacaaaacaaaaataataattacaatagagataactaaaaggataacataatacaaattattattcttcttcataccacctattatatcatgagtgttttagccgaaataactttctatggttgcaaaaacagccatgaattatactgtacgaccaaaaacgattattatagtcacaaaacaaccatagattcacactgtgcgaccatcatggtcgcatagagtaaattaagtgaagttattttataatgtaataatttaaaatggtaagtttactaaatttctcttgtattatcaccttcactacaataatacaatgcctattttttgagcttacatttaatattttgtggcttgcttatcaattcactgttaagatattataaaagaagatgcaatgcaaatgaatgaatgggaagcatatatgacatatcataaatatggcgttttttacaaaaagcacaaattataataatgaaacaataatgtttttggttttctgtctgttgaagaggtggagccttttgtctaatccattccatgaacactgttttttgagttttttcaagtctataaagttgcagacttatctaaaataatgaaacaattattcatttgcttacttagcttaaaaattattttttattgtttagaaaatgaaaaagaagactgacaatcattcatcatttgataaaaaaatgatagaactaaaaaggaaaggctagagtagtagaagtaggaggatatcatgtactagtactaccaatagctaacattttgtaagtaccttaaacacaagttgtaccagtccaaaatatttgaaggcatgtcgatgtatctcacggaagaaaatgacataactctaacaatgcagaaacatccaagcaagtaacccttctaactactgctttatcttctcctgaaaaaactgtttaaatcacatataattatgattgtaatataatagaagacaactgaaattccaagattagaggtaagggaaaagaaataaccttcatataataccatggattcatttagtacaaagtaggactatgtatagcatcactgttaatattgagaactaaaaatcattagaaaaactcctggccaaactagggaggacagagttatcttccatgagtttcaaccaaaaagaaaatcttctagtgttacgtatgtattacaacggtcacaattaatattcataaatccatacatattaaatattaattatgcaacaagctacaagtataggaccataagatttcaatgtggcataactgcataaattagaacattaccacaaggagtagccctctagataacaaagggggtgatctccgcaacaaaagctcctaaaagtgcaaagtgaatctctattcatctcaaggtaagactactcttgccaagtgcattgaaaccagaaatttttacacactgaataatgtaataatcacttctctgaaaagtagttttcaaattcactgcagttcacaactaaggatactaacattttagtgctcactgccaaaagtgggcatccaattaatgttaatgtgaagcaagcaatcttctcaaacaaatcagtagagcttattctttgtttcatttactcattcaaactacaaggctttagcactgctatgcctccccccaccccagcgtcgtctacgaccccttcgtttcctcccatcatctttctccttcactttttcaatcaaatccctttctcctcgtctcttatacatcttaaaagtgatctgtctttcttcagccatcttcctcaccttctccgtaatttcagctgcaatttctctgttatatagtttccttaagccacgcattaacttagcaaaagtatctgcttgtggcattgcatccgcttctatcatgtccaaacagtaggaacaagcctccttcacatgcccatttttgtacagtgaatgaatccatattgtccaggcagaaacattaatctcacatcctttattcacaatggaactccatatatctttagccatttcaagcttgtcagctcgtaaaagagtatttattagctccttcaacgtaccatactgtggggcagatactaaacccctctcaaccatttctttgaagtattgacaagcttcaaccagaaagccttgcccaaggaagccatgaatcataatcacaaaggtgtcaagccctggacttaacccagttgcttcgatttcattccataatcgaacaccttctttaacttcccctagtttacatgccaaccggatcacagcattgtatatgatcaaatcaggaacagaaccaatcttttgcatctccaccatgagctccaagcattcctccagctcttccttcttctcgtgtgccaacataatctgcaaataggtattctgactaggagtatggccttgctggatcatactatccaaaatctcataacccttttcaatctttccccacttacaaaacccacttatcaaagtagtgtaagtcatagcatctgcatgacagccactcctttccatatcgataaaaatacgcatggcttcttccatcttctcatgtttgcagagagcctgaatcaaaatggtatacgatactgcagtaggaacacagcccttccctttcatctctttcagaagatcataagcgtccgccatttttccagcatgagaatacccaccaagcaaattgttataaaccacaatgtctggttcaaaacccgcttctctcatctgaatcagtacaacttttgcctccattagcttcccttctctacaccaaccatacaacaatgaagtaaaatgctttaaactaggcttaaactgaatcttcatgtcttcaaataaagaagctgcttccttaacactatcattcttgcacaaagcatctaacaaacaaccaaagacatactcatcgggttcgcagccgtacttgggcatttcatccaacacttcaattgcttttttaaccattctagctgaagcaaaccttctcatcagaacaataaacacttcagatgttatcaactgagggttctccttcctcatctcctcgagtagtgcccaaacagcaccaaattggcgcatcttccccaatgacttaatcatggctttgtaaacttcataactgggtctgtagccaggctgctttgacacccacacaaagaacctgtaccccaagttccctgcatcaccacatcgatttaagacgcgttcagccaagcctgaacgcacagtgattccagattcttgcaaggccagctctagcttcgggaccctagagtggaattttcttaagattttatagatcttttcaacatcagatgcaaattcatcattgcaataactctcatcctctgcaccgttgaattgattttgaaggccaaccatcccaaacccacttgcaccatcatacgttcgactgttggatttatgattcaagccatattggctggaatcagcagaaggtgtggaagatgattggctttgtacagttccaagtacccttaagtaagttttccatgaaaggaggctaaaacgggtgcccggtttgaaagaaagagagaaagggtatttggtacacacaagaagccttgttttctgatacagcctctgcataagctaattcgataaagttcgtgtatataatcagtcaccattaaagcctagctttaagcagaaagcaaaaattagagtacaatctcaatgcaaaagcttaccatggtgcgaacaatgtcgggaacagtcagggaccgctgcaaactagaagaccattatcaatattcaatcatcaacaaccaaagtctttggaaatcaagcaaattttacttctcatatgaaatcctaaaacgacaactattgtattaattatacaaatgtacccacatgttactaagtacacctagggtatttcgtatcccttaccttgaccattttcaccttcatgatatagtttcctattccaaaattcttacttggctctttcttagtagttactagggtattcatcactgtttagagtgacttcagaacaaagaacagatcaaaagaaaactcaagaatcaaagaacagaccactccttagattcaacaatcatacccaaaaatcaaaatcagatatgacagtcatgcttcaccgttatgaaagagtcaagaaagatttttgagtagaaatacatcctaagctattgtccctttccttactcctccagaatccatagctaaaaatcagatgtatagctttgtctaatagtactttatatgcttatgtcttgtttgaataatattcgttttggttgttttgtgctaaaactctgtaaccatggttttcctccgcaaaaagtgaggttttcaatacattttgggagaggggtcagtctatacaagtgacctctttctcctttcgaaaaaacaaaaacagactatttgagcaatacttgaatatcatttcaggttgatcatagctactcgttctgtcataaaatgaacagtaaagacacttgaaagctatttactcacgcactaattcatgcagcaaaccaaaactcttaaatcaaatatagatataaaatcccaattaaatcaaatatcaatacaaatccccaaaactcaatcaccaaactatt

SEQ ID NO: 36739 - DNA, 2599 bp, Cannabis sativa
tatatacaactgacatttgcaaaaacacggtttttcattttctatcaaattgaaatctatatattttcaccatgcaaaattaattaatttattttttccccaggtacgtagtagcataatcgacactggtaattaatatgcatgtaaagtaatatttcgaaaatgatcatataattaatcaacaatatattgaaagacgagatcaaaacgcgtatgcatgcatataaataattaacatttattgataaagcaactgtttctttattatccaatttattttatattttagatatatatatatatataaatgcacaacaagctgctcatctccaaattaaaaatcaaaatttgcagcaatggcaacaacaacacaaaataatgagtttaagctcaaacttcttatcgatacaaagaagaaaaaggttgtatttgcggaggcaggaaaagacttggcagatttcctcttctctcttctctcattgccaattggtacaacgataagactcttatcctccaatgatattggtatggtaggtagcttagccaaactccatcaaagcttacacaatcttaaccctacttatatacaatccaatcgcaataaagatgcccttcttaacaccaataaaaattatcatattggtgatgatgatcaaaccatgaccctttcctccttaaccaaatgcaacctaagccaatcttatactaataacgttaatgatgatgcccttcctagaccggccgttgttggtaccaaaacaagatcatcatcatcatcatcatcatcatcatcatcaggtcgacttagcaaaagactccacgactcttcagttcaatatccgcgcccaatagataacatttgccgtaattgtggccattattattatcatccagaaagaggccacgaatcttcctgtataattgaacatctgtggtcaataaatgacatttgccataattgtggcaaatattttgatttaggccttcagccaccgccacctccaccgccaccgccgcctcctccgccaccactgctgccacctggagctgttgagaaagaaaatggtattgtgaaaggagtggttacttatatgataatggacgatctggaagtgaagcccatgtctaatatctccatggtatctttacttaataccttcaatgttaaggaggttggtgctcttcacaacaagactgtttttgttggcgttaaagaggtaattataatttatatatatgattaatcagtaatattgtttataattaataaattgattttaattaatatatatttatgtacatatgcagggattgaatatgttgaacgcatctctgcatactaaaacagttcttactcatgtgtttcttggaggagaaggaaggatctagctaaatctaaaactcaagtcaaagtctacgtttttgttcacccatttcttgaatattaatattcgctgaactatatatttttgttttatgtttttaattctgtatgttcttagttataagatatttttgtttaattaactatttaaaatggttgagcttcaacttaatattatatatatatatatatatatatcttaatttaagataatttcttccagtactgttattcaacataattttattttcaacagttttcagtttataatattatttgcactaattataaagatagtaagtacattatcagaaaaacaaatttgcactttatttccacgtcattaaaaaaagaaagaaatagaaaaacagataatacatacaaatttcctaatatgtagacgtcatttcaaagtaatatggaattcgtatttatatatagtgccaacgttacaaaaataatgtaaatttaaattaattatgcatgaatattattatcttaataacaatgaaactacaaaaatattttatctcaaatagactacagataatcttcattacaaacaatcattcatatataagctaaaataaaaaatattcattctttataaaaagagccaacaaatgacaacaaacaaaaccagtagactaataaatcaagttacacaagccattgtcatcacaatcgttctaaacaatactaagctaaaaaatgaataaaaacaatgatacagatttgactagagttaatagatcatctccaatatatagtattctatttagaggattgactttattggtgtctagcactttttataggtgatgtcttacgattggtaagcgataccctctacaagctatttgtttgagttatatgaaactcaatacttaattacataccgatagcggtatgacactgaggaggttgctagacactagtggtttttttttagaaattctcatttttttagctaaaaatagaatcacttttattgtttggttagtatttgattgttttaataatattttataatttgaatttgtcaaatacaaattaattttataaaataataaaaaaagaatactgaatttgtttaaaatactatcaacttttttttccaaaaaataggaagctccttatgaattttctagagtaatttgcggcaaaaccccctcaactatcaatttacttgcaaaaaaccatccaacctcatat

SEQ ID NO: 36740 - DNA, 3650 bp, Cannabis sativa
tatagtataaagtaaaaaaaaaagtaacaataaaatatatttagttaaataattaagacattaaatataagtattattggtagaggttcaaaaagtacaataaatataccaaagtaaacatgcttgtattgggattagaatccatgacctcctttaggtacatgaaatgactttactattataccaaacaatgtgtataaatatcacttttatttatgaatatatgttgtaactaactaaaatgcatatatatttttttaccgattttttttttcagggtgggcgactgccccacctcgcctctatgtgggtctgcccttgcaactaagaattagatctcatataatttaatttaataaattttaaaaaatatcattaattaatcgcaagacatcgtatgatgccaggcaccattagtaccatatagcaatgcttattaaataacttatagagataaatgctttaaatggtttttgataaatgtttttcatcaaaaaaataagaatagtttgattattaaagttttaaatggtttttgataatgtttttcatcaaaaaaataagaatagtttgattattaaagttttaaatggtttttgataatgtttttcatcaaacaaataaaaataaaaatagtttgattattaaagttttaacttttagatccaccttaaactcatttttttctacatcattaatccaagtctctctctttcattccaagttttcttttttgtactttcttcaaagcatcgccagaaaagattttagaaaatctgattttagggtttctcatcattaatttatgttatatatatacaattttttttccctttagatataataaataattattatatattaattattacctgaccgggagatatggccattgcattagttgtgctgttttgagagcttggactgtgagttttgaagcgattaatctgatatgggtcaattgacacatacagattcttcaaaacgacatcgtttgaaccaacctcaacacttatacttgaacacttaatctcaaaatctgtttcttttggattcccattaatctcactcttaattgtaacatatctgtttattacttccattattattattattattattaagccttttggtacttagtgttttatgtataaatttatagaaagaaagaaagaaagaaagaaaaaacttatgtaaatagatgacaacgcaagtggctatgaagtttattgggaagtcactttcaacttttgcaagtatagtattattctaattattatagaccacatatggaagattttaaggatgacataattttttaaggataaaacttatctgggagaaaacaaacaacacatattgtttttgtatttttttcttcttaaaagtatgtatatatatatttgttagatatgatccactcttttttatgtttttggtatccgatcgattgaatatttataattctaaatattatatgataatatatatatatatattatagagattctaaatttttttaaaaaattcaaaataatttcatttcgaaaaaaaggttcaacaatatattgcacacatgtacattttatttttataatattttaaatagacttcttaaactttaaattattcttaagttttaaaaaaattgtattatgaattattttgaagttttaaaaaatatacataatttcttaaataatttcgtttagtactatttaccaaagtaactaacagtttgttatattaacagttagcttcgttgtaaatagttaagttaaatttttgtaacaactttctgtttagtaaattgtaatctttggtttgagctatataaataaaggactgaataagcttctttgccatttcaattcttcttttcttcttcttcttcttcttcttcttcttctctctgttttgttttctctagtttgtacactacaagaaatgtcacctttacgtacagttcgctactacactggtaaaagtaacttttatcagcgcatttcgcaaactgcgctggcaaagagatcaaagttttaccagcgtatatttgcagtggctaaaatctaacttttaccagtacatttacgccctgaaaaaaaatcttttttgccagcgcttttcattttatgttggcaaaagttctaataccaacattgatttgccaacccccttttgccaacacaccataggtaaattctattttaacagcgtaataccaacttttgccggcacaaaaatgtgctggcaaaagtgacatttcttgtagtggtaccttttccattgtctaagcttttacatgatatcgaaagtcttcgacaaatatctttgatggcttcttctagcgacacttctggtgttcatacctataacaccctattagaatagacacgttatcgtgattttaatttgttgtgcacttcattactaatcaacaggtttagtaaaaagcgtgaattattgatattttcatagttaaactttaatcttatatataataatttacataatacgggatcctgtttttaccgatgtaccattatcgtgacataggacccgagatcgtcaagttttattccacttaggtcgacctgcacacctgaacttgggcttgaggtgagaaaaagtcaattgtaccactttgcatggctaattgagatacgattaccgttaatatggtagggttataactctcatgtagaactgttgttgggtttcttacttattggttgcctcattaggtaacgatagtgacattagtgactcattgataacgagggttaatgatactttataaactatcaagattggcttgtcttattagacaaatagttgattactagtgtttgattatactgcatgtaaataattgtttaaatcatatgtttaaatgtatgcttattgtcgcttagagttttgtgctattcatgatatttgtatttttcttgcttttcttactgagtctttatgattcacgtgtgctttgtggtgcaggtaagagtaaagggaagatggatcaaccatgagtcagagttctcctaatgaatgtacttatcaaccccaccgtcttttgtgctgagttgaagagatccaacttttatcatagtactttgaatatgtatgtattaatattttgtaataaaaataatacggtgatattttaataaaagtttataatagaacggatcttcaactcagtaatatttaaaaaagatttaagttatgttttaagaaatagttatttaaattttaaataatttaattttttcttaaatcatagtttattattataaattaatttataaaagcacgtacgtaacgctgggctttacattataatattgttattgattttcatgttatattaacatccgatacaactactaaaccacattatgtaataattggaattagattgatgcaacttaaattcttataaattttcagtaaaagtttttttttttttctcatagtaaggaccatataacatccatatcctttcttttctttttacaaccgaatcaactaaacagtaaaaaatattaaaactcagaaaaacacccaaagatcaaaggctaattagcaattttttccctcgaactttgatatataccaaatcatgccctctgaacttttttgaccgttaa

SEQ ID NO: 36741 - DNA, 5604 bp, Cannabis sativa
atagaagcctccatgcacgtaaaagctttgcctttaagagcttcattaagagtattaactatgtccatacctacccgacaacaaccgacaaagagaatgagaaataaaagcttctcaaaccaaaacaaaaggaatataccccacctttacaggacacacacgcacaaacttaaacaaaccccacactgaaactaacccgcagacactaacgaagcaaacagcacgaaaagaaagcaggaaaacaaactaactccaaacacacacgaaagaaaatgacacagcaaagaaaagaccagtcacgagacagctgaagaaggagataactagacaaagcaaacagggaacaaagcagggaagcaaaaaaactaagtttaaggcagggatcaacaaagtacacacgcgaataggaaaggtagaagacccgtcctcagaagagagaaaagttaaaaagactcactgagtcagatttaacccctccctatgagatttgattataattaatataagtattatatttaaatgttgtgaaagaaaatatagagaggttgactaataataaaagtaaaatttggaaagtattttgaaggatagaatagtaaaacacagctctaaaaatctgaaattaaactgtctaaccctttctctctctactctctccactaacccaccaactccaggagcagacctccctttgtaccgctcacgacagaagcatgccaccgcatatggcagaccaaccctaagcgaacacttaagatcgagcacacaatcttaatcttcatcttctaaaggtatttaaaatttaatatttatatatatatgcatatttttgggggagagagaataattgcaataagcaagaaaatgaaactacacctacaccattgttcatgataatccttcgcaaaattgtcccctcaatttaacccttctttcagaattgtatttgttagcaacccgcataatattagagctaaacaagaaaaatattcaaaacttagttcatttctccgaattttttgttttctgtataatattctgtttctttgattgtttgcatttctcaccttaggaggcgattgatttggtaaatatgagttaaaatggataaaatgtattaaaaatatatttggctgcgattgaatgaattgttggtgagctttgatttttcacatcttgaagatcttgtctttgttccttgatgacttcattgtaaatctttttgttagtttgggtgaataatttgattgatagtaatactaggctcgtggttaagttatttatcatatatctaatgatcttcattctgctgttgttttctgttgttgcttggtaatataaaattataactggtgttaattttatatagtcgtttgctaatttatattagatttactaatatgtttttcactctgaatgtaggtttgaagaatcataggggcttctagtattttaattatcttctctgctaaatgatagaggctgcaaaatacttttacttcaaacccatattttaactggagaattatcttgatagaggttattcaatatgcacctagaggaggcaattttgcattggttagaaaacttccctgcatgtttgtagcttgttgggtttcaggaagtcaacgggttttgctatacttttaagcccttttctttgtctgagctggttgagaaattttttggtttgcagtttgtggggaaggagaaatcttggataagtatttgttggtaataagccactctgaatgaatatgaggaaatatgtgaattcccattcgggaagggcgtttggtgatagggtatggatcactccattctttgctagcttgctcatattcattacattgtttttgacagccatatttgggctgtttgcctcttccaatggcagagagcaaatccctgttgatgttattttatcctcaaaattagagtcagatgactcaagtgggtactttgttaattctgaattgaaaagatcaccagaaataaatggaaattccaaaccaaggttgcctagattcgcgtatctcatttcaggtacaaaaggtgatagtcatagaatgatgagaaccttgcaggcagtatatcatccaagaaatcaatatgtaatgcatttggatcttgaagcactgccccgtgaaaggttggaattggcagcttcagtgaaggctgatcccacattccatgaagtggataatgtgcgagtcatggctcagtccaatttggtaacttacaaaggtcctacaatgattgcttgtacattgcaagcgatttcaattttattgaaggagagctcagagtgggactggtttataaacctcagtgcatcagattatcctctggtgacgcaagatggttagtgtcagtttcttagcttcaatatatttaagaacgttggtgtacctaagtttactatcttgatttaaagatttagcattcatttccttttgcctttaagcaatcatataatttgttctgatcacaattctgaaatgtggataggcgttttgtcttctaatttgtattttatttttcaaagagtccaacttagaatcgagagttgtaaaaacttatggtaggtgggtaagctaggtcagaactacctttttcttccatgttggtcttgtcattcagagattggagaataataactaggtcatttgaatggatctaaggagagtatgagtaaggggacatctaatggtagtgtcacttccttcattctttaacttgcattcttttaactcttaaacaatgttgttcatcaaaaaaaaaaaaaaaaacaaaaaaacaaaaacaaaaactcctagacaatgtttagatgatccttttatacttgtacaatcatattggatttgactttgtgtcctttggtaatatcttgtacttggaataaaatgtgttgatagtaagaactggtcaactaaactttagttataaaatcaaatgcaaatgggtgaagatgaaaagttttagaggaactcagtacattaatgaagaaaaatagttttgtattgaatctctaaactcctttacaaatgattatttccaactccttcaatggaacagagagatatttatagggagttctaatggctccaaaatacaagtggttccaaagatggggacaagattacttttgtaccatgaagatcagcatgtcagacgggtagaggtgcagcagttgtcgggtgtcagttggtactccgaatgagacaaatagtgtctccattacttgtacttgttgtacaaccactatttcttgagaggtatgcgtgctttagcaacttcatcctttgttgtacgttcccttgacatccctctctttatgctcatgatgcgagtataacacttaggagaaatagttaagtgatgggtctatgagaagcgagtcttgttgtttaatcttagtagcaactctttccccatcctttttggtagtcactctattgtaacatatacacactgaatgtgattgctccttgtgtggagcaggtagtgttaggtgatgattattggagtaagggaacaagggagagtgagtgagtgagcggggagagagagctagggagcgaggagagtaagtgagggagcggggagagagagctagggagcagggagagggagtgtcacgtgggagagagcggagcgaggagctcctcacgcgtggagctcaacccgtgccttggtccttcctcatgtttgctctccccctcgggggtgtcccgtcttggtagttggtgtcttcttttcttgtaaatacttttgtaaagtgtattttgggatttttcctctcactaatctataaatctccaaaaattacacatgaacaattttttggaggtcaacaaaaaagagcccttattatctgatagtttgatgtcttcttgcgaacttaaataacactttttgtttcttggtatatcattctttaagcaaatttggttgctttttgttgtttaatcggaaaccgctgatacataaattattgtattctctgaatttctttgatgcaagcaatcctattagcttatttttgccttgttttttattatttattgtaaattatgcaaagaatttgaacgaggtggtttccaggcataatcttaatactgctctatctcctaattttgcagattttcttcatgtcttttctaacttatcaagaaatctcaacttcattgaacacatgcagattgttgggtggaaactgtgagcaaattgcataaacccttttttaagtctctaacagcttcttatcatggctcttattatttgttatcattttccacatatctgtttttcaggaatcaaagagccaaaccaatcattgttgatcctggtctgtacttatcaaaaaagtctgacattgcatggactactcaacgtcggtcacttcccacatcattcaagttatttacaggtaattgtggcgcttgcatatgcatattttgaggacacatttgtaatccagaattggctcatttttattgtttgttttgttcaggttcagcttgggtaatgctaacccgacagtttctagaatactgcatatggggatgggataacctgccacggactatcctcatgtactatgcaaacttcatatcttcaccggaaggctattttcacactgtcatctgcaacactgatggatttcagaacactgcaataagccatgatcttcactacattgcttgggacagtcctccaaagcagcatcccagatacttgtcaatgaaggactttgacaaaatggtcaaaagcaatgccccttttgctagaaaatttgcaaaagatgatcccgtgttagacaaaattgacaaggagcttcttggtcgaacaaaccggttcgcaccaggggcatggtgcattggaagctctgaaaatggagctgacccttgttctttgcgtggcaatgactcagtcttcaatccaggtcctggagcccagaggctacaagaacttttcgggactctcttgtccgaagattttcggaagaagcaatgtgcgtgaatgaggataatgcctttgtttcgtaattaaaggccatagtttactactcataagtgtacattaattgtcttataggttatatttaatcacattgtttcatatgtaaagtggcagagttttgtttccagtatggtaaaactgtacatgaaatttaaatcgcaattccactttacagtttacatcctttttttttttttagatgaaaatgccaattatattaaattaatcatccataatacaataagcatttaacgggggagggatttccttcaaccaaaaacaaacagagtccaccgaaagaacatactttgctaacaaatgagcagtcgtattcgcagatttataaacatgagaaatctgcactcctaggaaattggacactagatgtgtaatgtctgataacagacaatggaaatcaaaaacagtagtagtagatgtgtgtaaacctttaaccactaagagagagtctatttctaagatgtgagcagtcaattgattatctatcagccattttaaagcatttagtagagccaaaacttccattatttcaggcccaaaaacacccggaattgactttga

SEQ ID NO: 36742 - DNA, 3065 bp, Cannabis sativa
  modified_base (29)..(43): a, c, t, g, unknown or other
atttagtgtaattaagtttttatgccatnnnnnnnnnnnnnnntctttattttcccatatttttgtaaatagcccaatttaaaatgtagaagtccagtagaatagttgtatccaattggactcaaactgcgacaaaacttgtgatatgtttgggctgacaatgggccgagctcttcttcttcttcttcttctcgctgctcacaaactttctctgtagtcttcaagcagttggcgaagatggcacctgaacccaagaggaggaaactccaaccaccgccatttcgcaggcaatttctaatgattctcatccgttatccttttttcttgatgttcattactattgtgttgagactcagaattggcttcttttctttatttcttctttaaatcattatagattttgtttgtttgtttgtttgttgtggcttctggaatctggattattgtacagaaaacgttttccattaattggtggtgttaactatcaatgtttcatttgattaaacttgatagttttgtagtttactgtatggatttgtcttttccatcaatttagttgcttatagtgataggctgatagcttaatgttctgaatttgttatttttgttattatttattaagattctattacaaatcgtatttccattggtttttttattagatactagtgtgaaaccatattgctttttatgccggttgggtttttgaaatttacattttgggagtatatgattgtattagaagatgtcatatgttgtggaaaactaaacttgtagtacacaatgagccaattggatgaattagggatatgtttttgtaggcattaggtgtttgagagaatcaaataaatggaaaagatatcatctgttgcttgtttccattatcaaattttatttcatttggctaaatcatgcaaatcagtaggcttttatagtgtgcttgatattatatcattacagccaactctcaactctgttttctagatttattgatattgaatcaattgaacgaatttctaggacttgttccacttttggaagctggctaggatacattgaaactctattcacgtgtcataaatctttactgaatgtgatattggatctatcattgtttataaaagaatttttcgatctagtaatttaatttagttgagatgaaattataactcctattatgacttctggaatctttaattcattagcttatgttgtatctgctatcatattatcttagctcttcgatgaattaagtgtgcttctttttatcatcatcatcatccagcttgtatattccttgtataatagtttccttttgtacaaacaaaaaattggaagatgagaatcctttatttcgtattgaataaggtttcctctgatgtaatctatttgggtatcttccaacttgttctaatttactttgtaacacatgggtaatagttttaactaaccttataaactattgttgttcaaaatcatactaagaagtcaaaaaacccttttttcatgccaaattttttgttcaaaattgttttcatatgatagcagtgtagtagtttacaaacgaaattacttgttttctagactagccctcactggaatgttaaagggtttcacatattacactataatgattgaatgtatttcattccctgagttttattctcttatttatgatttgatttatttcaaacctctccgctcaatgggaaaagaacaaaataagtatgaaactttctgaaattcatctgttgtatttttcatttgttgcaaaatctatctgtgagttttgtaacaaatacaaattgtccttgtttatgaaacattaagtaccatattttttatttaaaagacagtatttctcctatggcaggatcgttgctggcagcgaagaaagactagacaaatcggtaagaacttgtgtctcacaaatctttcatatgctgttatatgtatgctgaattatcaaacaaacataccatgtgatagaaccaggttccagtagcccaaattggtaatgccaacttgaggattcaacaggctaaaaattttgctatatcgcaagcacagcaagatggttccactggaaattttaaagttttcgattcaccatttggaaattactttgttcctgtagttcctactcgaaaggacctagccgcatagttccatgtatctacagcactcaactttaatgctggataagtatatatctgagcttccatgttgcagagattttgcttctaaaaaatcatactacaatgcttaaatatataggaaaaattaaccaatgtatttcctagtaagaattgcgtccatcattatttagctcctaatcagtgcattaattgagatgaaacttattttctagtacttttattgataagtggtttagtgcaaagctggaatactggattaactgataccttctgtaatgtataaaatgtggctgttacagaaatgtgaatctatctcctttttcttttctttttgagtcaaggaattgaacttaaaagctgtacccctccttgccccaactcaattactatagctacaatctaaacatagcctatgttgagagcatccaaatcattagcaaagtgaaaatctaaagaaatgttgttaaaaaaagtgctccaagtgaactaaattagctcaaaaatttagagtacgaataatgtttcacagcatatagtaaataactattcattctttaaatattattttcatgatttctttctttctttaattctttttcatttaatgtttttaattttttttgtttatatagtaaaatatatttaaaaaaataaaatatttaaatgatataaaaaaaaaaaaagcatatgattcaatgtaaaagtgcgaggtaagaaaaaattactctatagtatagcatactataattaaatcaataatgtaaacaaaactctattttataactgtttctacaattttttttatcttttgtcttaggctaattagtaatttttcctcttgaactttaacatgtattaaattatgccctctgaacttttttggccgttaaaaattctttctgaact

SEQ ID NO: 36743 - DNA, 3335 bp, Cannabis sativa
tgggtgactaattaatgagttttaatgaccaaaaaactagtcggggaaaatgggtttttttgtagtgttatgattacaagttttctcttctgggaagctattgttgatcagaaagaagttttagaaagcttggtgttcatctagaagctttgtgagaaaagttgcggccagtccggatggctctttcgtgaaccatgttttccataagcagtgtcattcggatagcttgttaatagtccaaagatgaacttttggatatcataggatgtaaatttggaaggaacgtggattattgttgcctgtcatgagttggaacatttaagacactgtaaatgtgccacgatagttttgcagctaattatgacaacaatgtaaatatataaatagcgatcaatctttgtaatctgaagatgaactagaacataattacttgagtaaaaattgtgatagtgtaaggttgggaaagagagtttaaactatagagagaaacgttttctcctaatctttgagagattgtgaggattcttgtaaccttgataacactcaaatcaataaagatatgattgttgttgttcgaaatttttaagcctggttttatttttcttgtttaactattttaaatctttacttggttcttgtgatttcttgataaattatttttaattatgttgcatgtttgttggtctggtatactgaatcgtaagttattaattattttcattttgcacaacaaatattttatagtacaaaaatgtgttatataattaactataaatatcatagtaaatcaattatctatttattaaaatagcatcaaatttgtgttatcattgctgtacaataatacatcaaaaagtattatagtatattttgataatatttgtttggacttattaaaaccagttttgcttgttgtgtttattaattaactaaaataccagcatagagaacaaagagttcaagcccctaaactagtcaatcaagagtacatatcattcacagaggagggaagtcatctgttttggatgagcaattcctttaggctttaacatccctcccaccacacactctgtgtttggctctcaatcactatatctccctctaattacaattcagaaggcatagtttaatactgaggattagcaggttttatttataagctggcttccgttgagtaactaactaattcggttagttggttgctgaggtgtaaaagtctcagtgtcttaattataacaataagtttcccaaaatttcttttactttgacgggcatgtcacaaacaatcttttttagtcaacatgtgagaagacgcatttgaattagagactctataagttaaagtaggctacatacataagttaatatataacaacactttataaattataattaggacaacataatttccttttattttatttgatttcttttctaaatttaattttactcaacaagtggtcacaactcacatgtcattatttatgaactttttaattgaaacaaatagcactggagctgtactcggttccgtaatctcgaccccatgaggatttccttgaataaaatgtgaaataacattaaccccatctttcttgagcatctccacaaacatcatttggcgatcaaacacaggatcacgatcaccccctgcaaccagcaaacgccaccccaaatttttaattcgagcacaattgacagaccactgatcatccgccattggattggagtacttgtgatcgcggtcagcgccgattggtaatccaagttcccaacacagatcagtggagacttgaggaataacaggatcattgacacctcttatctcggattcagtcctcgtgaccccaccaaaaaacggatgatgaaatatgagccctcggatcttcaacggtgcaagttcttcgacagctgctgatgcacgcactccaacatggtggagtatgttgccccctgcactggtccctataagaaaacagttagagatgtcggcatattcacgtaaccaaatttcgtccgtggatttaatccaatccaacgcctccatggcgtcatcgtatgcagctgggagccgattctccggggccatgcggtactcaacggagaccaccacggcgtcaagttgtgtcgacattgtgtcgcaaaaattgtggttaagtgttgtcgcaacggtagtgaagtagaagccaccgccatggtagtacacaataagaggaagcttattggttgtactggaggagttattaactagtgcttttttgggcaagtatattcggacccaagtgttgttggttgggttaaacgtgacatctttggttaaaacctcagaaagtgatgatggatctgctgaggctggggtggtcggcattgataccagtcgggtgtaggtaccgtctggattttgacgaattaaatctcccatgattgattttgagattctgagataatctgataatgatataaggtaggtttgtgtggaatataattttagaactgtttatatataggctttgatttgagttaaacttttctttttactatgtgatcgcggccttgctgcacgtttcagaaagctagctcagttcattggttaattggaggccaagtacttgttgcccaagcggtcataataaagttatagtctaagtcttcacgttgaccatgtgttttgctgtccacggtttactttgacaagagtccgtgattaattaattatcttttgagactccatacagcgtatttaattaactaattagaaatcctttttgataattataaaaaaaaaaaaaaaaactgttgaaaacgataccctaactcgggagataataaggcaaatacacgtggccttattacctgggaatatatattttaacacgttgctccctcgttttacaaccaagaaaatcaaattaaatttgcttgaaaatttgtttttccgtcaaggggaataaaaatgtattaactctttgtgcttaaattaatatttatgtccaggttcaaatcgaagaggtttcagctgtaatattatagtcgcagtgtgaaccttcgttaagaatattgtatatgttttctccaaaaatatcattataaataaattgcagtgatatgtatgttaatgtatgtaatcgacttatatatatatatataattgcttttgtttcattaagctatctctaacagactctaaaacactaaatatagtttactttcacaaaatatttattctaatgggacactattatactcataaatgactttgtttttagagtcccactacactattttgtttaaaaaatagtttttaataattaaataatacttttaacactactaca

SEQ ID NO: 36744 - DNA, 6023 bp, Cannabis sativa
  modified_base (5076)..(5076): a, c, t, g, unknown or other
aatttgagtttgggatgaagactatttctcaaatgaaacttataagagaaacaataagaagagcataattgagatctaagtaattttcattaaaactccattgatctaggatttggaaagtgtagcagaacacatttaattcttaatgtgctaaagtttagcagcatttccttaagatgaagtctacaaaacgagtcaaatgaccaaaagatagaaggtataaaccaattgagataagaaagtgggaaacacttgtttcataccctagtgtggattagttgcaccaagtagatagacaatgtgtgctttgttttctccatatggggataataccaacattggcaccatggtggcaccttataattagttagcggttctttataatctttattaaaataaaataagtaggactcaatattgaattacactaatagcgatattacatcttacaaggttgctaggcaccgtgagtgccctttagcatctctcatttgaaatttgtagtctattggttcattgagtttagtctaagaaatttcggagttcttgctgtcaacaatttcaagagtatgatattcagatctacacctaaatggttttatcttttaaatgatatcagccgttaattatatttatatattgtttgatcccttaaattaaatcaatatttcataattggtttctcaatcctcaacctctaaaccatgacttttaggtctggcttgaaattgaatctttgtggagaattggaatctacatgctgtgcaaagtccacagttaaaaatattttattcatggatttcagaataaaaatgaattcccccctccaaagaaggaaaaaaaaaacataacagttatccaatgaatatcccatggagaacttaacacgtcataaatttcttcaagctatggacttttgtgcatttatggagtctttggagttgtatttggattacgagttcttttcatgatggttggtaaatgtaaccgtgtacacaatagttgaatgggacaagtattttctttcttttcaacaaaaaactaataaactactagcacgtgcacaacgcacaattacttaaacacttactggatcctttagtaatttattgtttgtgttgctttaaaactttaaatttaaatgtttttcagcattagttgaaatatgctagcttgacttctatgttgctagttttagtttgcagattgtcttctacccgggataggccctgctattgccatcatagtttatatgaaccttttaggtatctgatgttaagcaagtgttggaaattgtttgttttcttttgtattacttatttgttcaactcggttcgttaagaacttgataaacttacctgtaaaatcaggatttccacatcaagaaataccaaggaatttcaaaccattcaacttggatttctcagcaagtattgttttttttttgaacaatgaacatctgtcaaaaataatcacagtttaatacatcaagtattgttctcagcaagtattgttgtaggtactattcatagccccaaaagagtgtgggttgcatagtagcatgagttatgtttcacttaaaaccaagcctagttgtagggtgtgatcatatcagcactaccaaattctatcaaaactccacagttaagcatgtttgggtgagagtaatactaggatgggtgatcctcgtgttgcacccctaaattttttgtttgtgataataacttttctacccaatagaggtagctcaaatggtcggacatgtgatttgctcccgcaaagtctgtgattcaagtcttttctaggccaccaaatattacaaggttaggtgaaatactagtttttgaaaaactaagcttacttgttaccattcagaaaccataactttgacatatcaaaccgttgaaggttgaccatttctgaataatattgacgattcacttactgatataagctaaaaatacataccccttctaatttttatttatttacatgaatgcagacatactactatatatattcaattagattcctaatacgtactcttatacacgaagagtatgtgtcttgctaatctactctcttattttatttaaatcagagacgtactggtgatcctcttcgtgtatacatggaacttgaggctggcaggaaacggtccggtgctgaggatttatttattagttatcatgccaaagatgatgtgcagtcgacttatgctggtggactctttcacaatggtcgaaattatcatgtctcttctcacaaggataatgtaagcacttggctcttcttcctgcatgtttgttgtttgttgcattgtcatatactgttttcccttgatatttgattctgcaaagcttggcaagagataatgtagcacttgtaactcaaatcaatgatgttattactgaaggatacacttgtttactggtcgtcatcacgttgtcttcctcaaagaaacaagctggccaagaaacttctcagcttactgcctcaccattcatttggtaagtgcttgaacaatgttggtggtctagacaaggccctgtcattttaccccgagtgcaccaatgatgctaatgtcaccccgaagtggtgggatcacttacattgcgccatgtcccattacaaatttgttcttgcaatcgagaatactgtgacagaaagttatgttacggagaaactattctatgctttagactcaggttcagttcccatctattttggggcctcaaatgtcttggactttgtccctccaaattctatcatcgatgggagtacattcagctccttggaggaattggctgcttatgtgagaaacgttgccaatgatcctatagcctatgcagaataccatgcctggagaagatgtggggttttgggtaactatggaaagactcgtgctgtgagccttgacaccttaccgtgccggttatgcaatgctgtaagcagaaaaggtgggagaaatgcaggagccatttagtatttttgtttgtttttgtatggggttattgatttgtgatgatatttacagtggtcgtagagtataggttaggaaacggtaattacgataggaatacaaaattatagagtccacttaaccctctttcccttggtctgtctactaacattgtatattaccaagtgttatgggtttaagacacttgtatttttcaactgaatgtactcccttcacaatgggaggaagtgtttttttttttttgagtaatgattagaattactcatgaatttatgatacagaaatttgcaattatcgcaggactcttctcgaactaggataacttatcgtctaactgaaaaatatgttttgtcaaatcatgggctgttaaaatcttaacgcaaaccacatgagataaaattaagcctgaaaatttaaacaataaagctatgtcttcaaacagcactctcaattcctaacacattgaaaaacaccttttcattattaataactctcgctaaagctagcgaaattaaaactaaaagcattgcaacactaaagcaaaaaacaaaggtatattaaaatgacaatcttcaatataaaaattaatatacaaacttagaatttaaagcacaatccattttacaattttttttttttgaacaattcattttactagttaaacattactaaaaattaaaaaaaatctaagtataactagctaaaagtattatcctttggttagtaataacttactagcaccccactaatttaaaactactgaaaattaatatctaacaaattatgtataaaaaattaaatttattggcaaattttctataatcataattggggggaagtaatttttgtcgaagggtaaattggtatcacgcttttcatcgaagtacataatgtgtaaatgtaatatgagctatatgtggaataaaaaaaatttcaagttcggcgaccctgaagactcgataagtggataaataaacgtaatttgttaattacagagatttatttgaaatatgtggatataatatgaataatttatgaaataaaaatatttttaagttcggcgattctggagatccgattggaggcaaagaatgtcacaatgatcttagttagaaatattgattggattattgggatatgataattttagaaataccgagatattttagagtactcaaagttgatcaaataccctaaaaatatagattctttagtgtctaagaaataataagataactatcaataataaaatttttataatattattattatattattataatatcatattattattattataaaacgatacatttatatataagttatatgttttaaaaacataaacagaaagaacgaacgaaatccacctctctcagttcaacgaaaccctctcttttatcttttttattattttcaacccgaaacctagcgatctaagctttggtagtagtgggatagtaaatctttaaagagggaaagcttaaggtatgatttaatttcgttttaagcttggaacgattagttttatatagggctttcgtgaattagaataattatggagattctgactttatagaattgttctttggtagctatggtactagtttcgatatttagttgttgaatttgaggtgattttgagttagaaatgctcaagaaccgacccctgggactggacggccggagggagcttgcttatagaaataagataggtcggtcaaactaaaacaacgcgcaacgggctctccgctcctagaatttggaactttttaaagcttagtccgaacgttaatggagttttttatttaagggctcgattttaatttttgttacataaggatggtaatatttatggtatatatgtgccctgtgaagtttggagtgatttggataagttttagtagtgtttcggtgagtgcgaaatttagaattttcgagtttcaccgtttttagaaattcctaaaagatcagaaatcgtatttttgtcataacttttcattcgggtgttcattttggactaactatatatcgtttcgaagcttgcgacgagatctacaatatggtatatattttagagccaaaatataagntttattttagtgtatttatactgcgaggtttggtagaaaatcctagattgtcttatgtgaatattaagtactgttttgggataaacacctattaatttaccgttgttgtgacatagggctaagatcatcagggatagttctctacttgagttgtctgaaatgtatgaacctggattaaaggtaagaaaaatatattgtactgcatagtacgttgttttgtaatgcaattagtattgttgtgaattgattaatattgagatatggttattattgttatataatgaaaagattgattgattaagaaataataatgtgatgataccatgaatgcgatatgttgggcatcgtaccttattaggtacgggcggtagtgatatatgagtaccgagcataggtacatgctcacctgattagatgatgcgatatgccaggcatcgtaccttatcaggtatgagcgacagtgatatatgagtactgagcgtaggtacaggttcacttgtttaggtgttgtcatatgtcgggcgtcgtaccttattaggtacgggcaacagtgatatatgagtagcggacgtaggtacgggctcgtctgattagacgatgcgatatattggtgccagattgtggcacaggctcacctaattaggtgatgtaattatgtaccgggtgtaggtacgggcttgcctaattaggcgatgcgatatattggtgccaggttatggcacgggctcacctgattaggtgatgcaattatgtgatatatgggtgcaggtttttggcacgggctcacctgattaagttttgcaattatgcaatatatgggtgccaggctatggcacgggcttgtctgattaggcaaatgtaatataggattatcagattaaagcatcgacttgtctgattaggcaacgtgatgtaatgaagatgattactttatgaggtaacatata

SEQ ID NO: 36745 - DNA, 4622 bp, Cannabis sativa
caatatgttaacgaaaattaagtatgataaaaaaaaaagtgttgtaaatgtgttaaagaaaattaagtaggatcttttatataaattgaaatgagtaataatagattttatgaaattttttatgaacaatataaatttattatgccaccatgaatgaattatactgtgtgtgactattatggttgtaaaaggatcataaatttatattgtacaaaataaattaagtgatattattttataatttttttttttttgacgtggtgaagagagttatacatagttgaagctactcaaagcaaaatagctcatcgtttaacccaattgcatgttttataaattttagtatttcaccattgaaagatataactcatgttctttgtttcaagctgcggaagatttctcactgcgacatttccacaagcacctactatgcatacatagatgagaccaagggccaccatttttggacctctcttcaatccgacaccccaacttctctcttcatctctctcactccacaaaccccagctcggttcgctttcctatatcttcttaaattttcttagtaagcttcggttctcgacaaccccatcatcgcttttggagtcttcatcacaatcaagcccaacccacatagattacccgtcactttcttctttcactggcattgctcaatctgtcatatctagatgttcccattttgtagagaatgacaataccaaaagctttaagagcgattctcctaaagaacttcttcgggagatttcggatatcgttcctgaatatacgcgtagatttcgtcgagtttctgagctcaaacctgaagatgtgcttcaattattactgggatttcaatttgagtgtgggaaagttggaattggagctagaaaggttggagctttatgggaattgttcaagtgggctaatgaacaaagtaaggattttgagcatcttcctcagtcatgggaggtcatggctcgattgcttgtccaagtggggttgcttaaagaagttaaagtcttgctcttatcagtggagagacaaggaatttctatggattgtcatgaaattttcagtaatatgattgaagggtatgcttgtagaggtgaattagagaatgctatttctgtatatgatagaatgaagcaacttggttttgctccttcattgttgtgttattgtattcttcttgatcatttggttagaataaagaaaacccacattgctttgggagtttgtttagatatggttgagatgggtattgattggaatgagatgatgaaaacaactcttgataatgtcattagattactttgtgtagatggaaatattcaagaggcaagaaatcttgtcaagaaggtaatggcttgtggatacaaggttagtgactcttctattaatgatattgtttttgggtattgtgagaagagggactttgatgatgtgctaagtttcttttttgagataaaatgttcacctgatattctagctgggaatagagctatacattctttgtgtagttattatgatacagaaatggctgaacaatttatgcatgagttgaagagttttggttttgttcctgatgagataacccttggtatcttaattggttggagttgccatgaagggaatctaaagaattcctttgtttatcttgcagagatatttgctagaggtttacaaccccatttatgtacctataatgctctcattggagggttgtttttgaaaggtatgtggaaacatgctcgagacgtttttgatgaaatggtagagaggggaacaactcctgatctatcaacatttagaattcttttagcggggtattgtaaagctaggaaatttgatgacgtgaaaaggacaatttgtgggatggagaaatgtggtatagtggataatatatcattggaagggaaactgtctaaagctttttcggttttgggttttgatcctttagctgtgagtctaaagagggatagtggtgtgggactctctaaaaccgagttctttgacaatcttggcaatggactttacttagatactgacattgatgagtatgataggagagttacagggattctagaagatggtctagttcttgatttgaactcacttgtagaaaaggattgtaatcatggaaacctgaaaggtgcactagctttagcagatgaaatggctcattggggacaagaattgtctttgtctgtgttatctgtcttattgaaaaggctgtgcttgtcacggtatcatattaaggtctatacaaatattttagagaaaaatcttaagatggttaatttgcttgaccaagaaactcgaaatttacttgtacaagtttactactgcaagagaggatggagattcaacgggaagatagtttgggacagcatgctgcacgggcatttaaaactccataacgagacatacactgctataataacaggtgtttgtaaaacgggaaatgttagggatcttcatggttggtgggatattgctcgagaagagaggtgggtgccaaggcttgaggaatgtaaatcccttttggaatgcctatgtagtaagggaatgctgaatgaagcgctggagctgttcgagaacatgatggtgtcttttcctcacatgaggttagacgtttgtcatctgtttattgaaaagctcagttttgcaaggttgactagagtggtacatatattgatagaagagcttaataaaaggggttgtgcaatggatcatctagcttacagtcatcttataagaggagtgtgtaagaagggaaaagtttccgaagctttagaaatattggagtgtatgctggctaaaaatttggccccgagtttggatgttgctgttatattaattcccgagctgtgcaaggctagtagacacatgaaagctattgcgttaaaagaggttatgtcgagcaaggattcatcatctttgctgtttttgaataatgcattaatacaagggttttgcatgacatgtaaggttgaagaagcagccagtgtattccgagagatgggattgaaagggataccttcagatgctgaaacttacaatattttggttcaaggccattgcaaagtcaaaaactttaggaaagttaaggagcttcttggtgtcattattagaaaaagatttgatctttcaacctcaacttaccgaagtttggtgcgcttaatgtgtatggagggcgaggtctcttgtgcactaaagctaaaggaacttatgcttggacaaagcaagatacctaaccttgttatttacaacattctgattttttctctgttcttttcgggaaacagtttgtttgtaaatgaagctgtaaatgatttgcagaagaagacactgcagctcgatgaagtctcttacaattttcttgtgtatggattttatcagtgtaaagacttggcaaatgcttctcagtatttatctactatgttgtccaaggaaatcaaaccgaacaatcgcagcttgagggcagctataacggccctatgtaatggcggagagcttgcgaaagcattagagttgagtcgggagatggaactaaggggctggcttcatgattccatcattcaaaatgcaattgtggagggtcttctttctcatggtatggttgaagaagcagaaacttttctcgacagacttatggagaaatgtctgattcccgatggcatcaattacgacaaccttatcaaatgtttttgctcatatggaagactaagcaaggcaattaaccttctaaacataatgttaaagaaaagcagcaatcttccaagttccaccagttatgattctgtaattagctcttgttgctcgagtaacttccttaataaagctctggattttcacgctgagatgctcgataagggtcttaacccgagtatcaacactcagaacataattgtccatcacctttgcgaagatggacgaacttcggaagcagaagggattttgatttctatggctcatgccaatgaaactccaactagagagatgttctcttctgtaatcaataggtatcgcttcgaaaacaatcacaggaaggtgtctgagctcgttcgggtgatgcaacgcagcggttatgaaccagatttcaagacacattggtctctcataaccaatctaagaaattcatttgacaaaaacacaaacaaaagcagccaaggcttcctttcaagactcctttctgaaagtggattcactaggaaaaactgatacaagggctacacacaggtttgatttgattaacaaatgtttaagtatttttcatgtgttttcttttttgttctcataaaaattacttttggcaacttcagctaaatgtaacaaatggactggtttggcttagattttttaacatgttttgatcttttgtgagaagttagaataattttgtaattagtaagttatttgtatacatgtattcttttataacgtataaaataaaagaatttagcgtgcaaagaattatttgactctgtgtacagtgtgttaagtttttttaaatttcgtaggatgtattaaataactataacgtagataatcacgaaaaaaaattcactgaaatgctcttttagggattcattttcattagcacacatccattacactat

SEQ ID NO: 36746 - DNA, 4001 bp, Cannabis sativa
  modified_base (45)..(49): a, c, t, g, unknown or other
  modified_base (3082)..(3086): a, c, t, g, unknown or other
ttagaaaccaaaactgtaaatttgaagaaaaaaagttaaaaaaannnnntatatgggataattcccctttaaaatataatgtgtgtttgaatatgagatactatttacttataaatttctaatgttttatttgataaaataattagtaattacatataaaaaatactaatttttactactttatatttaaaataaaaaggttttaatattacacaagataattagactcaattctcattaaaggtatgaaaattgaaaagtgtaattaaaatctcccaattacttataattacataattacagtgtaattacgtaatcagacaaatacataaaattttgaattacctctaattctcacttaactttctaaaggcacccatatttgtttatcaacaaaagcattcaaaaattataaaataaatatatttgattctaaaaccaagacaagtagatttgaataaataaatatatataacaaagagagtagtaggtatactatattacttatttttctcgcattatgtttggcagatatgaagaagaagaaaataaatatatgaatccgtaattgaagggttgtgacttgtgaaggtgatagttcaaacaaaaatatttcaagaaaataataataataataataataaaaatagttaacacactatgctttcaataataaatagaataaatatgtttttttacaagcttatatataaaaatttaaaatatattttcagttgtaagtaagataaatagtataaatatatatatatatatatatatatttctaatattaattctctcggtatattcttcctaataatttccaacatattttcttacttatatatgttctctctcttttgcttcttagatttgaatccatatagtttagtcactggcaattaacatggtgtgaagaatatctttcaatggcttgctaataagttttttttaaaaaaaaatacatttaatttttcttttcttgatttaagatttgtgtatttaaagtatatttttttaatgagttaatataaatgatataaagaacaaatatatcggatcatgcttttggtttcacctaattaaatagaatcatgcctacttttggttttgtgtgtcacgataagaatagtgttgtaaatacgagtcgaatttttgacacgacacgaaatcggtacaagttcaggaggtagaagcacgatcaggggcacgaaataatatgagcatgatacaacatgatgttataaataagtacagcacgatacgaaaaatatgtgcttaaacataacagaacatgacatgtccaaaaggtacaatatataaacacaaataaactagccaaaaaggcataacacgacacaatacggatgactcgcaatttaaaaagcacgaaaaatatataagaggagccacagaacatgcacaaatttatgatactctgataagccaatttataaagtgtatattatacatcactttcatttatatatatatactattaaaaaaaaaaactaattatttttataatgctaattagtgtttttttgttaattttctaaatcctaacaaagttaaatttatttttgagccaataatttataacttatatatgaactttttcaaaattcgagagattttttttttgtcttaagaagggttatgatattagttacttttctcttatatttagggtgttggtatggtatattgtaagaaaaaattgcacgagttaaatttaaatatttatttattttaaaaaatatattataatgattaatatatttaaaataaaattcatgtggaaaataatagatttaggtataaaacaaagtgaaaatataattttattacaactagtccattaatttagtttaataaaaaaattcatatttatttatacttaatcatatttatttaagtctcccaaacactaacacttttcaataatatccttgttataatttgttattatttattttttcattattaaacttaatcatatgtatttttattccctaaactataacacttatttgattttgtttcctaaaattattttgtttttatcaaaaatttctcttgaattatagaaataatgtaaactttcccttttgattgtatttcaatcattttttgactcaattttttatttggccacgagatatgcatataattatagtagatgactcatttaatttaattaatttaagctaattggaactaagtataataatcttaaacatttaaatatatattaactctataaaattatggatatagtctttaattttatcaccaaagtactatctaattatttacacaattattttttatttagactctcagatatattatcatgatcaatcttacatcatcaaattatttacaaagtgcaatcaaagaggtaattaaatatgcaattatttccataattcaaatgaattaatttcttacacaaaaaattaaaaaaataaataaatcagataacaaaatctaacaactagtacttccaacttgaaggataaaaatcttatttatccaatttataatatcaatatttttgttcaatttattattaataatttctttgcagcctctgttcccttacgtggttggataatattttaagtattaataccaatagttatagaaactaaattgttgattttttttttcttcttcaaattggtataaataaataaatagagtaaataaaaacaaatcaataaatgataaacaccttattataaaataattatgagaacatcattaatatataacaaaattgctgaagacatcccaactaactatgtactttttttctctatctttatacaatatcatatgtataggtgtgtatgtatatatacatgtttgtgtattaattattatttgaaaagaaatatatgtatatataaataataaataaaaataaaatagagcacaaagaattgttcagatcttgccttcgtcgtttatttcttatcaattagcttgacaaagcatgcaacttaacattttcacatgtcactaactatgctagctatacttttacttattagataataataataataataannnnnataataataataataataaagctaattaggatttttactcccaaactttgacatgtaccaaatcatatcccgtgaacttttaaggttgttaaaaatgccccatgaactattgagattgttagatttaagaatttttgtctaattttagtaaaaaaaaaatctagcatggataaaagttcaaggagcatgatttagtatatgtcaaagttcgagagacataaattgatatatatcaaaatttggggagcaagtttagtacataaacaatcattgaaatagtaaaattgaatgaaattaaacaaaagtccttaaatctaacaatctcaatacttcatggggaatttttaacaaccagaaaaattcaaaaatatgatttggtacatgttaaagtttaaggagtaaagatcttaatttgcctaataataattattacctaattaactactagtgagttcattcttattggtcatttttgttgaagttgtttattttccaactaacaataatataataccatattttatgataagtatcattaatattggatatatgattaataaattgaagtgatttctacctgtctaaatattttttttaaatttttttatgatggtgttggttatagtttcaacatcatttttataaattaaaaaaaaaaaatcaaataatttatattgcgaaaaataaatttaaagtttttaaacacgagtggtaaaataaaatatcagtaattttgttttcaatattgtaaactatttaaattttttcaaaaagttatagagataatattattaggcggccgattttgtgcccatatatgcaaaacacggattggaatccgttgtacggcaggggggccccaccgtacttttaaatgttttttaatttttaaaatgtaagtggtaaccggttgtt

SEQ ID NO: 36747 - DNA, 9541 bp, Cannabis sativa
  modified_base (50)..(53): a, c, t, g, unknown or other
ttgaaaaatattttcacttttccatttttaaaaacagaaaactgattaannnngtgttaccaaacgtcacctaaatttgtgcacaacttttcagtttcagaactaacacttaaaggaaactaacaatcaatctgttagaaaagttagcattccataattttagatcatgttcccaaccatttatattattacattcccaaaacaaaagttgtaagaatcatcttctttgagaaattttaacgattgaattaaagaaactaataacatgaacaggagttcataattactcacaatttaagtcaatctactattgatcatcattatgattgaattaggtctttatagtggacatcatgtttgataaagacggctttattcatattgatccttgtcatatataatctttattattatagcacattcacttagatggcaggctagatcagtaatttgaatcgagatacttacactgaatgacgggcatcagtgaaccgcactagtagctattgattaagaattcctaaactttaatatgttgctggctgttttattcatggctaagtgatcttaatttcctgtacaactataagtcacaggctcatgtatgaataagaaaatttttttatttttatgaataaactattcaataataaatattaataatttaacattctcatatatataaaaatgttcaactcttattaataaatcaaaaatatctttacatgccttccaaggcataaaccctaacaattaagggtgtttaacaaaatttacaaaccgcctaacctgaataaaccgcccaaaccaaaccgaataaactgacaaaaagtacagcccaaaataatataataaaaattcaaactgcccaatgaatatattggatggtttacaaattattctaaattgtccaattaacctgaataaatagaattaaaccgattaatatatttttttttaataaaagtgtatgtaatatattacataaattatatttattagtcaaactattttgtatttaaagtttggatattttagtgtttaacttaaaatttagactttatagttaataatctttattgtatttggacattgaagttgaactttaaaatctatacaatattatgacttttttttgttattttattcaattatttcatgtttacttaattatatttatcttatattaaagtttttaaaattaatttaggctgtagcattttttaacttaaaatataaataatgtatttttatttttttaaatataattttttgaattagaaactaagaataataattataaaaaaggtgaagaacggtttggacgggttaaactgacgaaatcattaggcgtgttaaactttttttaatttttaattgggcaagttacaattaaatatttgcaacccgataattatattgagttggtaaaaatatactataacccgactaataaattaggcatctcccttagtcccatattagttatatgacccataaaatattttgatggtagcgtctttgtgaatggatttgtaagttatgttttgacacaatcttcaagaccatcacaccacctctctctactatatctcttactagatggtacttcctctcaatatgatttccgctcttgtggcttcttagttccttagaattggccactactccactgttgtcatagtagagcaccagtcatttttctacttctggaactactttgagatcagtgtagaatttcttcaaccaaaccacttccttagctgcttcacaagttgttgtatattcgacttccatggttgaatctgcaatactggtttgcttaatgcttctccagaatacagctccaccaccaagagtgaatactgacctagatgtcaatttttgactatctttgtccgattaaaaatcagaatgagtatatccaataggattcaactctccaccagaatatacaagcatgagatttctcattctaagaagatatttgagaatgtgttttacaactatccagtgttccagacttggattaaattggtaatgactaacaatccctacatcatagaatatgtcaggcctttgtacacaatattgcatacattacgcttccaatgataatgtataagggtacatatttatgtcattcatatcatgagaagtctttggatattgatccttgcatagagtaattccatatctaaatggtaacttttcttttttggaattcagcattgagaatctttcgagcaccttatcgatataagttgcttgagaaagtgctaatgttctctgctttctatctctatagatcttaatgacgagaacatattggaagtctgataaccacttggaaatttccagttaaccacttctttatgtctgataacctttctacattggaatttttcaatctcttcttgataggattaagaaaagactctcgaaatggaagtctcgtgctttctgttcagggtgtagggaagttcttataaaatttgttatctagtctattcccacgtactctatgaatatttttaagcttcttatttctttaatctaggagattcataaattgtgtgcacgattttggtggggtggtaatgagaaaaaaagacttcattggtgtacttggtagaaacttgttggcacaagtatgatagtggtatgggtttttaagatttatctctatttaatcaggctcttttggctaagcaagcagtgtgattgtactcagctcctgactctctggtggcttgagttatgaaggttatttactattctaagtcctcttttcttatggctaaagaatccaagaaaacctcttttatttaaagatctatcatgttgggtaaggggatatttgaagttgggggtcattggctcattagtgatggaaccaaggtgtatgtttatcatgatcatttgattcctagcttaattggtaataagtcttcctttcctcattctcttcctattgattcctttatgtatgatctgttactacctgatggtcattgaaatgtctccttagttactagctccttctcggcataggaggctaatgttattcttgttatacctcgagaccatattcctcaacatgataagatggtgtggcattttgagagttctagtctttaatgtttggagtaagtactagaatattattcatattcttggcattgggcaaggctcttgttctagtggttagtctgatctttggaataaaatttggaaattacatcttcctattaaggtcaaatattttctttgaaagacctgtcataattggttgcctacttatgctaatcttagccagcagggtgaccctgttgcctccacctgccctctttgtttaaagggtcctgagacctccttgcatgctctttggggttgtgataagctttcttccatttgtgagaatatttttctccatcttcaagtacctaattttctttattgggacatctatgagttcctttatacttgtcttggcggtgtgtctattgccttgtttgaaaaattcattatttgtctttggagaatttggtatcgacaaaataaatgggagaatgaaaagagttgtgttaatgatgatcttttgtttgattggtgtatggaataccttcgtcggtactcctctgccaataaacatactcctcgtcttgctaatcttcttgagagtcaaccagttgtcagatggtccaaaccttcctttgagttcatgaaaatcaattatgatgctgcgttgaattttgagttgggtaaatctggggtcggagttgtgtttcgtgatgatactggttttttcttaactacgggtagttggacttagattggtggttattctccaggtattgttgaggttttgggtatatataatgggatcatacttgcttgtcgccttggttttcagagggtggtggtggagtctgattggatcaatgttacaatggcattcttcatcgtaatgttgattaattgtatataagttgtattattagagatatcatttcttattttaagaattttattggtttttcttttatttattgtcctaggactactaatagtgtggctcacgttttagctaagttaactctgcctttgaatgatcattatggctaatggcctgaccaccctgattgtgttaatgctgctttgcagatagattcttataattaatgttattgtctagcactttttttctttttgagatttttccactaggtttactcttgaagttttattgaggccattttttaaaagagaaaaaaaaagtgatctcatctaacaaaaactgcaatgtttataaattaaaggacctcaacattacagagaaaattatgtcatatccgcttagacatgtagtcatcatatcaaagtatgttgttttgttcgagacatcaggatataatatgcttgaatatattatttacagctttattaactatagatattgaaaggatttatttaaacaagtcgaataccgtaactatttgaatcgtattattttattatttgaatgtaagatcttgtgatcatataatcattccctacttatttaggaatcatttactgtaacaattcctctgtaagaaggaattgtactgaaagggaaggagggatcgaatatttctctattaaaactttgttgaattgaggtccttattattataggttaattaggatttttgtctgattacattcaatttactaaagcctaaattatttttgtactaaattatgcctccaaaatttgatatgtaccaaatcatgtctattaaacttttatctacgccaaatttttgttagtaagattagacaaaattctatgaatcaaacaatctcaattgttcgtggagaatgtttaaagttctgtaaagttagaggacataatttgatacatgtgaaaatttagggagaaaaaattcaaattaacttttattataaataatattgatttatgaactaaagtatattttgtgctctcttttattatttttatgttattagttttatttattcttctaaatccaacaattatatttttttaaaaaaaaaagacctttttcaatttgggattttgagcacatgaggtgtgatccaggtaccgtgattcgcttgcatctaaggttggccgtgataggctgcatcacttattgacaatatgacaaacccccctatatttttaattttgttatatactttctgtttattatttcgacctttcttgactcataactatatatttcatttttaaatatcttaaggcaaagcttagagcttgaattttaatggagaaaagataaagaaaaattgtgagtacatatatatagcagaaatacatattttgcatagtattaagaggtaagagttgcgcacagcacaataagattgaacaagccatctaacaagcatagcacaataagattttgacaacaatttggccttccacccttcacgcttgattttcaagtcatcaatcaattagtactgtaggttaggtaagaagcgatgtttttggacctatacagaggaagaccaaggcatttcatcatcttatcaattaattaactttctcacatttcatcaactagtcctagagataattaatctttattctttagtataatggtatgttttagttgctagatagatgtctaacgcaacactctagtttgggcatttggtaaaaataagcctctgttattcgtacacatacatgctttatctttcttcacatagatttagaatttaaattatcattgacacgcaaaatgcgtttctaagagtctgggaaataagagaaacaaatatattacatatttataaacaaagacaactaaaggaaaaagtttaaatagtgtatgtatgataatagttccatcaccaacactagcctgtaccacgtcataaagctagagctactgagccaatgtctaaagaagccataggagcagcctcgagatagtactaaaatgactgtcattcattttgacatatagagcaaatatacaaaaatgaccagattggaactggtcttattctcacaaccatatcatctcctaattgaaaactagtttcatataacctaaagctaagcttgcattccccagcaaagctacaaaactgtttcataatacttactactgtatatatacaatgaacaagaagaagcaaccacttcaccgaagtttattctgagcaacagcttgacataactcgtcctcgtagaatagaaccctattcgaagccaaagatttacacaggggcttccctaacactgatggcaccatgcaccttgcaggcagactcgactcctggaaaaggactgctgcaacttgacgaacctcagaggctttgaggcgagaaggggggcggggtccgtgccttggagctttgggtgtgtgtggactaggtaacagcataccctttccatctcccctactgcaaatgatcatcaaaatattagtaaacacattgtaagagaatattaaaaaagagaacaaatggcaaagtcctaccccaagaatggccaatgctcagtaggaaggggagtcatagtactcaacatctcctggcgagagcgatctggggttgtataattaaaatggaactgccttgcaagcaaaacctgtatacagtattggcattaacaggttaacgatcctcatctaataaagataaagacttacatggaaccaagaaaccaaatggaattgggttaggacaaggaagtgagaaaaacttacagcttttctaactcgctgagacacatgaaaaacagctctcaattggtcatgatgcaggtgacaaagtaccttgacctacatttaaagtcagaaagaactacttagcaatactgcatcaaaaggagttataagcaggcagcatataacataatacacaaacatatgagaaatttcaaactgaaccaatgtaacttgaagctttttcatgatgctaatacatccgaaatacaacatgttgacataaatgacaattgaatttatgtccatcatattatacatagctgtgaacggttgtcatctaactgatttgtcattattgtcatctaatattacggccacaatcagtaactaatttgttccactattatggctactttccaatgattttagtcatattaattaattcattttctagaaacgtcggcacctttaattttgacaaacaaaaaaattagaaatacgatcagagcaattcagaaatgaataatcaataactccagcttaacacagccaatgatcaaatgatcaaatgaatcaattttcaaacactatcaactaactaaattggatagcacaaataaatcaaacgacgattatttattttgaacaagcctacttcttatggacttaaatttcaattcattaaaaaaggatcgaatgaaccagttttcaaatatattcagtaacaaaatttcggcaacaaagaagtcaaaacaatgaatatgtgtagttgaacatgataataagcagaaaacaagctatcaggattgcaaaattgaaaatcaattaataatccaccagaaaaaaaaataacaaaacaaaacgaatagtacaactgtataagagaaagaaaaaataccagtaattccatgggaagagactcaagccgcgattccgagtcacagtcctcaactcgaggagtcttcggcgtaccaataaaactattctgtttaaccaaattcaccggtgataacattagagggcttctatcaacaaatctctcttccaccaacatagcaccctcagccttctctgtctcaaacacagcgactctttttcttccaagatcagtacaagacttagaaaccgacgccttgttgtgccggagccgagcaagagctccgggtttcaaatacttgctcgaacccctaaatcgttttttctgcttccgactcctctctttaggagacaccttccccatactcgttcccctttcaataaaccctaacctaatcgtcaatttcgagccagataattaacctgaaccgtacgactccgggtaagacaccagaagcaaattggaatggatatataagagaacagagagagaaatcaaagaaaatacaaccacataccttcaattggagcaaaatcgataaacaacataagcaaaaagcatagagagaatggccgtgaaacgaagctggcaacgaaaatccaagagagagagagagagagagagaaaatgggggatggggtctggtctgaagactagggttttgaactttatttgaaatttatgaaatttcccgccaagttttcgcatcaacagttcactaaaaaacaaaaccgtagaaaattaatgacacgattatccagctggcacttacgtggcgttaagtgattggttggatattagagtaggaacatcgttttgcataagatgccttggtcactgggccacattggtagattaggttttccttatttagatttttaattttatttaataatttcaaaaaacaaaaacataaaaagaatttgggaattgggagggaaatcaaaaagtaaaatattgattttgtgagagggaaagcacaatacgggtgaaatggcgcttgtgccattaaatcgtactgttgttgtacggatgttagggtgtagagcgtgagggtattttggtaattgaagttagggcgttggtaagtgtgtgtgggaggtgaggcagagagtggagtggagtggagccgtagtcaggtagttttcatgatggaatgaatatcattattcatattcatatgtattgtgaaagtacaggttagagagagaccccttttgtgctatcaattaattacgcgcgtgaatgacgcttctttgtgttgaattgaatgtattgtgtcgactgttactcaattgaggtaaaagggtatttatttcccaatatttaattattttttaaatataaatatagacaattattttatatattattttttttatttttttaatttaggtttaaattgtttaaataggctacataaattttaattaaaatttaaattgttctgttaaattattacgtaaaattttgtaaaaatataaaaataaaaaaaaaacttctataatatattgggcataaaatagattaaatgaagtaattactaattagtggcaaaactcatttttagtaaagactcttacattttattttatttttaagaaaatctctcaaattattatgattctgctaacaaatactgtctaatcctcttttgttagttatacatcattgtcatctaaaattattattgttatattttatttttttaaataactggatatgctattttgttaaaaataacattccctcatattttataaaatggaacataataataaatttaattttagtcaaactactgcataataatgcattggtgttttgatcactaggttagttacattgtttgcacctttttgttgttaaaaattagttttacattggttatataatcatgttaaaaaaaaacatttagctaaaattaatcttggagtattattaagag

SEQ ID NO: 36748 - DNA, 1404 bp, Cannabis sativa
taattagtcacttacagtagccaatccaacagaaagatctgcaatgaaagtatcctcggtttcaccactggaattgaaaaggaaaagattagtacaaatcagcaaaaaacttagtttggttggagaaaaagaatgagtcattttaccttcggtgacttgccataacaccccacccagcacatttagacattttcacagcctcaatgctttcagtaactgaaccaatttgattcacctaagtatttatgaagcaatgagtatacgatccttatttaaggttggaacatggatattggagtgttaggattatgttagttataacatggagagtgctacctttagtaaaagggcattgcaagtcttctcctttatggctttctccacacgctgtcaatgtcaagattgcagattattctcatgaatgagttaatttatctattaattaacttaattttatgtaaaatcaaccttaatgtcataagacttgcctttggattagtgacaaggaggtcatcaccaacaatctgcacttggtcaccaacttcagaagtcatctttgcataatgctcccaatcatcttgatcaaagggatcttcaatggacacaataggataatcagttacaaaggacttgtagacattcttcaaactgtctcctgatattttctgggatccatcattattctgcatcaaaaacattaattaatttagcttgtacttttaattgtacacaagaaaaagaaaattggatttgcatcaattgaattacctcttccttaaaattcaagtcatatgtcttatccttgctatcatagaattctgaagcagcaacgtccatcccaattacaacctattaggaaaaaaaagcaattaactaatgaagcttacagttgtagattgtatgtagaagcatagattccagagatgctaaaactagcctttccagtgtatccagctttagctatggctgttttcaacagttcaagcccctctttgttttcctgtaagtgaaatgtcacaacataagattctatttcaatacacatttcacataagaaaattgtttactctttaggaacaatgctaaaatttatttatttctaggcaagtggacacatacctgaatatttggagcaaagccaccttcatcgccaacatttgtggcatcttgtccgtacttcttcttaatcacactctagaataagccaaaatcatagtcacaacatgttatcccatatcacaagtatattgtaggatttgtgtgtttgtgcaatttgttattattctggttattgggacttgctatcagttgttaaatcctgttattggttattgcatatgaaaaacatattgttgggatataatgtcatgataagctgtttatagtaagccaagggaagatgtc

SEQ ID NO: 36749 - DNA, 2988 bp, Cannabis sativa
  modified_base (2524)..(2524): a, c, t, g, unknown or other
cagtatactgccgatatactgccgaattaaactgccgaattaaaaaaaaaacagtaaaaaagttaatatctgcatgtcacaatataattgtaagaaaatgagaaaagttagtaatctaagtagtaaaaatcatatcacttttgtgacagcccacatcccatcagccttttaatcaaaagataatataataattattaaatattaaaaataataaataataatttttaaatccattaaaataaaaaaaataaagaacttgtcacttttgtgacaagccacgaatcaaaaaaaaaaaaacaaaaaaagtgtgtacacaaaaggcacaacccccaagaagacacctgtaagccacaaatccatcatacacaatttgaaccaaggcagtatactgtcgaattaaaaaaaaaaagtaaaaaaagttaatatccgcatgtcacagtataattataagaaaatggaaaaagttaataatttatgtaaattttccaaaaataaaatagcagtgtaaataaataggaaaagtataaaataataaaactacaggcctaatccaaagcaagcccaaactaaagatatgggcctacattgctgagtgcaagtattctttaggccctttgttctataaatactcctcttactacttactctcttaaaccctaaattacaatccctaaaaaccctagcgcttctcaagttctacctcgacaccgaaaatggtaaaacatctgtctccctcttccttgttcttatggaaaatcatgattactgattcaattttctgatatgtggttttggttttggttttgattttgattttgattttgcagccaggagaagaagtgaacccaaaggcctatcctttagccgattcccaactcagcattaccatattggaccttgttcaacaagctgctaactacaagcagctcaagaagggcgccaatgagggttcgttattgcccatgtgcatattttttactttatttttcttgatttgctgttctttcttgtttttgtttttgataggattcgtcatattgggtactagcctgtttcaatttcgttttggatttcgtgactatcttgttgtttattaatttatagcataactgaacaaaaatttgtatattaaatcttagttatagtgatactatgattttatataattcattaatcaaatggaacattattgtgatgtttcagcgactaagactctgaataggggtatatccgagtttgtggtaatggcggcggacactgagcctctggagattctgttgcatcttcctctcttggctgaagataaggtaatcctttaatattctagaatataattgttttgtattgagtataattacaatttctttccttgttatatgtattccatttgtcttggttgtttaaattgttatgaaaatgattttagttctcacctgttttatggtttgtataaacattctgatctgcttcatttctccaaataaatagatgttatgatctgttattctaaattttagatatgccgtttaaagtaatatgtttgtttgaaatgccattgcaattcatgttatccaagacataagattctcgtgtgttgtctttggttgacaaaatttaaacttgtaactcagtttaagtttgagcttaatgagaatgttcttctaactagtccattggatttttcagaatgtcccgtatgtcttcgttccatcaaaacaagcacttggccgagcttgtggtgtcacgagaccggtcattgcatgctctgtgacaaccaacgaaggaagccaattgaaatcccaaatacaacaactcaaggtaatttcctttctgatttctagttgtctgattctgtggtcctatctcttcagctgtttttgttttcaagtgctcaatttgttttacttgatggattcttacttgttgtgtgtataaatgcaggatgctattgagaagctcctgatctaaatgatgatggatgctatatttcggtgtgatgggcctcttcggtcataatagtcgcaactctagaggctttgactgatgaacttgtgctattattagaaaggatatttttctttgttgaattatgagaatttttatttgtgtgcattactagaaagaatgctcaacaacaaaatatatttgcgtgagttatgattaatgatgttataaagcccctaaaagttaatgtttcttgattaatgtgatctgttttatcagttgttttttttaaccattttaagattgtgatttaaattcttattaatttgcttgaatgtgaaccaacgtttattattacgaactttcccttttgcttaatatttttagccttaaaattcattcgggttttttttttattaatctaaagtgagtggggttgtgatatttactaatgaaagacttatttgcactcgtgttactagagcatggctattaaggttcctaagaccaatgtcacttggtggacaccttatcctttagcatttcttgttttactaaagtttttttttctttttttttnttttttttttttttgtaagataaacgttttagtaacgattggttgtatcattaatgaatgagtttctctatattaaaaatctatatatctatcttctatataaagtgtggctatataatagaatttttgatttatgaaaaatttatgagtatttttttatttatattaaaaataaaatagtttattattaaaatgtggtacaaatatcttgatttaaaataaaatttaaaaatatactaattaaaaatatcttgatttaaaataaaatttaaaaataaactaattactaaacccacatcgattactaaaagatcaaattataaaggagaggaagtatttcgaaggaaaaactcacctatgaaagcataacagagactagcaggtatcaaccaattaatacaatttctgcacaataaatttgcagacggtatgttatatatactgtaattagtacttttattatc

SEQ ID NO: 36750 - DNA, 5096 bp, Cannabis sativa
tcatttaacaaaatagaaggtctaattgataatttttacaaaacacaggatccaaaatggtatttagccaaaaaaaaaattagtcaaaataatactataaaataacgttttggaactcatttaatttctatcaacaattgaaaaatgtcatttaagagcactttttgaccgttggatcatctgatcatgcttaaactatttcattttttttctttcaaatgtagtaataaatttcaacagactacacgtattcatattcacgctctacatttatcatttatggctacctctcacttcaaattttacccaacggaacattttttctttggtaattgattaagagagaaatggtaattataattttttaatcaattcacatttggaattatatgtgaaaatatttttttaattattttataaaattgttcgttacacagtatcgaaaataaaattttgatattttaatttattatgtgtgtttaaaaaatttcaaatttattttcgacactataaattattcaaaattttttaaaaataaaaataatattgaaactataataaattttaaaaaaaattatttcttttcacacacaaaaattaattaaatataaattattatgacagaaaactgtaaattacgtcataattatgcgatttaatttagaaagaaaaaattgtaaaaagaaaattaaaaaatcactttcaatacgtaacggctctactcacgaggagaagttcagtaataataacaaaataaatacacacttttatttttcttttataataaaataaaataatttattttaattaattagattatttattttatttatttatgagcagaatcagtagtttgcaacatagcttcctttagcttcaactttctctttatataaataccattgaagaaagaaagaagaagaagaagtaatcactttctgaccaaccaaacaaacctcttcagccgccattacagttgacaatccaacctcaaaacctctcactctcactcacactcactggtattttactttttctatttcttttttcaagttctgaatcttttcttgtatattaattttcatgctcttgcttgcttcttatgatattaagattcggttctttggtatatatctgtgttgaattgaattaatttgtattattattatgattaatgcaggttatattatttatttattaatcgatcgtttcattttccattttggagctttctacttggatcattttgcagatctataatcaaatacttcattgatttgatttgtacttttccttttgttataatttcattgtttgttaaagcactttttgtcactctcctgctaattttctcgggaaaatccaaaccacgaaccctcaaaaaaattctttcattatttaaaatgcttcgatttgcgggttcgtttttgctctgtctctgtgctgtggctccgttgttgagctctctctcggcggcggaactggtaacgtgctctggcatagtaccaatgaggtaccgaaacgataagatttcgattacggactttgggggtgtcggtgatggacgaacgctgaatacaaaagcgtttcgtgaggcaatttatcgaattgagcatctgagaagaagaggtggtacgcttctttacataccacctggggtttacttaacagggagctttaatctcactagccggatgactctgtatttggccagaggagctgttatcaaagccactcaggtacataactactctctctctctctcttgtctagtattatttcatttaagcttacatttattttgattcattaatctattcatttatctacactcacttttaagctgaatggtatttgcttgatacaattttagtaagtttgaacacttatttggggttcattaatctgtacaacgagtttgatttcccagttggagtatcacttgtttgatgttgctaatagatggtaaaaattgtgacaaattagagtcatgggatttggtcataagacataactagggttatggggtaggctaagctggcataattaaaaattgtaactctttttgctagtttgtactttatagtaaaaaatctacatgggcttgttatgtctgactaaactagattgtgtgtctaaattggattaacaactaagatgatcttaatgaggcaagatgtgggtccaagcttgaaagggaattgaaatagtgggttatggagtaacatgggtgcatttagctattcatatataaagatagttagacagctagtttgtggcccctgttgtcttttctttaaattattaaattagaaatcattattttaaaaattagaatatctttggttcctttttatttattttttaattttctttctacacggcttactctgtgttttcattttatattattaagctacattattttccaattatataaaatattatgtactagtacggttagttaagatatcattctttatctttactacgacatgggtcaacaacacatcggtcattaagcccatttgacatggtcacatggcctggatattatatcattatcattcatgcctatgttgtctaatgtattgatgcttaaataactccttgtgctgtaacaaaaactttaaataagctcatatactgctgtgagttgggtaagcctataatgcacaggtcttctgtcttaaaaaaatgtttaccaaccaaagagatgaaaatttattttgatctcgagaatgttatgccaggcatgaattaaagatttagaatctggaaaatgtaggtggcacaatgttggtggtttaaacttttgctatgaacttaaggttgacaaaatacattgcatgtaaataggcttttcaatttgattcaacaagaagtttttaattctaatatttgacattaattaaatcaaggttccattttctctccaccacaaacatacacccacttaatcacttgagcaagcttcacgccctgtataatgatttcttcaaaagtttccttattggactttgtttagatttgaattgtgggctcttacatgttatagcgttctatagataccaagttctttaatacatgcaaagatttctataatataaaagtgaactgttctgtttttacaaattttctcttgtggatgtttcaggatacctcaagttggcctctagttgccccattgccctcttatggaagagggagggagctccctggtggaaggtatatgagctttattcatggagatggactccatgatgtgattattactggtaggtaacttactctatagggacttccttagctatatgtgataacttaaaacggtgaataacgcttctagttaaatatatatgagaattattatgcaaatgtgagcttatattgagatgtgctttacagttttactgttttatcttcccaggtgaaaatggtaccattgatggccaaggagacgtttggtggaacatgtggagacaaagaactttgcaatatacaagaccaaatattattgaactcttgaattctaaaaacattattatatcaaacgtcatcttgcgaaactctcccttctggaacattcaccctgtttattccaggtaatattcagctaagttttgcataagattaagataaatatatactatcaagaaccggtatacatttctacattggtcatttattttcatttttttattcaaactgatttgaatagcttttggtaatcaagcatcttttactgtcatgataattttaacattgtagataagaactttacacgactgaatcaacttatagtttcaagtcaatttttctaactcaatggctagtattcgaaacttcttttaaaacaattttctgtaatatataacccatatcttcaatttgaattttgaggattttcttttcccttgcagcaatattgtcgtgcgctatgttacaatattagctccacgtgactctcccaacactgatggaattgatccaggcaagtatctatggctcatttttgttgtctttacatatagtatgaccccatgttgattggagttaataagctagttagtacgtgcatgaattttgtgtggcttctgattctaaaaatcctatttgatagaaaacaacaccttcctcatcatttctatgctatttgaatttaagagctaaaaacagagcctgcggccataagaaaaagaccttattcatctttagttcttgtgaaaatgatttgataacgaccacttaagttatgaaaagaacatgaaatttctaacactatatgcatgttgggacaattcatttacacagattctagctctaacgtctgcatagaggactcatatatttccaccggagacgatctcgtggctataaagagtggatgggatcaatacggaatagcatacggccgccgcagctcagacatcacaatccggagagtaacaggctcatccccatttgcaggaattgcggttggaagtgaaacctccggcggagtagagaatgtctatgcagaacacataaaccttttcaacatgggagttggaatccacgtaaagacaaacataggcagaggagggatcataaggaacttaacattctctaatgtctatatggaaaatgcccgaaaaggtataaagatctccggtgacgttggagatcatccggacgatagattcaacccgaatgcacttccaattgtgaaaggcattacctttaatgatgtttggggagttggggttatgcaggcaggtctaataagaggactgaagaactctccgttcaccggagtttgtctttcgaatgttaacctccacggcatagccggaccaagaacgccgtcttggcaatgctccgacgtggtcggagcttcacgtctggtgagcccttctccgtgttctcagctcatcagtagccaacaaagaggttcttgttctaattactaaacatatctctttgatgtaataataattaattagtgcttattaattatatatacatattaaatttgtgtatttatttgtattttgaagaaaattcacttctaaaaactccaatttattcatcttcatctagcaaaaattagtaaa

SEQ ID NO: 36751 - DNA, 10140 bp, Cannabis sativa
aaaaattagactaaaatttttttagatgccgaaacaagtagatggtgcatcagtacatcccttttaatagggtgcattgtagaatcacccattactaaaattagacatattaaaataaaaacattaaaattttagaaaaagaaagttacatataaaaattactttttttaccaaataaaagaaaaaaaaaaaagattaaggtaaaaaatgacgtggaaaaaggggaccacaaaaaaaacctaaccacgtggacttactgagagagatgaattgctgacgtggattaacgaggaccaccgaagtcttcccacattgtctgacaaagaaaaggttaaaacaatcaggaccggacgattcccacgtgttcacgtgggacccaaattcaacgcctattttcgtaatttcactctaaattcaggctcaccaaaaaccttcaattattattattattattattattagagtatttttttttacctaaaaccttataaatgtaaattattttaataatttttattttatataaaatatatataaattaaattatatcattttttttaaagaattacattttaaatagatttttaatttttgtttatacttttataattaacttttttattcatttataaaaataaatatagcataatctcgaaataaaaacagtataatattaaaataaaaataatttttataaaataaaaacaacataatttaaaataaaaataatataatctcaaaatagaaactgtttttataaaaataaaaaaaaatcttaaaaaaataaaaaatacaatacatttcaattccccttttattataacaaaaaacattatctgaaattttattaaaaaaatataaaaaattatgaaaataaaattaaaattaacacaaaataatataagatcaagattttatgaaaaatattaagaataattattaaaattattttaaatttaaattttttaaatgttagtgtgtatttatcattttgtgaggtgtaaatacaagtcttattattattattattattattatatttaacctcaaaaatattaaaataataatttattaaataaaataaaaaataattcccaaaattctgccgggttaactccatccaaccctgttgcctgcttcgaagcagacaacgaaagggacggcaactaacggtaacgattcttcaactaacggcaccgttaaactctctttccggcacacatttctatgcgccgttatagaatctcccaacatattcattccgtcactgtacaaaccaaacggcaccgtttagcttcagttcttattattaatattaaacccttctctcttctaactcgggttaaaatattaaccgtggttaggtaaggttcgtacaaattagaacagcaaagaccagaagacacagcagagagcgtcagaagaagaagaagttgaagcaacgaagacgcgtgtgtgaatataataaccacgcgcccaaactggttttgagctctgaacaaatctctctctactgtaaaggcgattcttttagtgagagaaagtggttttgtagacgaagaagacgaagaagaagaggaagaaagattgagagttttgtaacggtttttttttggatttgagcggttttcgatctttggtttttgggtgatcgttcgttactagggtttttgagaactgggaatcgaaaagtttggtttttggggagttttgagtcattaatggtggttagaagttgtacgtgtatatattgagaaaagtaaggtttttgagcttgtattgactgttgagttgactttggtttgggtatagagctatatacaatgatgtcgaatcgaggagtagcagggtcgttttcgcagcctaatgttgcggctgaaggtaacaaaagaacagagataatatcaagtttgtatttttaatattaataatagtaataattttctgtcttcttttttctttcagtgtttgtttgatttttcctggaaaattttgagaaatgaaacaaaaaaaaattaatggtttttttttttttggggtaggtgatgatttgtatccggagctatggaaggcttgtgctggtccacttgtggatgttcctcaaaatggagagagagttttttattttcctcaagggcatatggaacaagtaagtttctttcatctttttatttccagatcggttttggaattttatactgttcaagggtattgatttgtttatggtaattgttgtgtttttgtttgtagttagaagcatctacaaatcaggagttgaatcaaaggattccactgtttaatcttcctccgaagattctttgtcgtgtgcttaatgttcagctaatggtattatctctaaccgatcttgttaggaagaaatgatgaaatttgtgaagattgtggatctttaaagggtttatcttgaatttttgtatttacataggcagaacaagaatcagatgaggtttatgctcaaattaccttagtaccggaatcaaatgtaagtgttcatacaacattgtgttatgattttaatgactttgtgttttcttgttctcaaactcaattttttattgaataatctctagcaaatggaacctactagtcctgatccttgcattcctgagcctcaaagaccaacagctcatacattctgcaaggtcttaactgcatctgataccagtactcatggtggcttttcggttttaaggaaacatgctactgagtgtcttcctcaactggatatgacacagtcaaccccaacacaggagttggtagccaaggatcttcatggttatgagtggcggtttaagcatattttcagaggtgaaaaactctatctttttggctctatagttaataattcattcatagtatgggaaaccattgatagatcggtcatgtttgttcatttttgtttgagcaggtcagccaaggaggcacttgcttacaacagggtggagtacctttgtcacttctaagagattagttgctggagattcctttgtatttctaaggtgtgttcttttctttctttgtaatcatcatatagtgttggaatataaaagtttcatatggcacttggatcttgaatctgctgttaaccattgtaattgtttgaaatttagaggggagagtggtgagttacgcgttggtgtgagacgtcatgctcggcaaccaagtagcatgccttcatctgttatttcaagtcagagtatgcatttaggagtgcttgctactgcatctcatgctgtttcaacccaaactctctttgttgtttattacaaaccaaggtataatataatcatatcgtatttcatcttcgaccttttgtattggtgctaaatcttttcgggttaattttttaggacaagccagttcattatcagcttaaataagtatttggaggctgtaaacaataagtatgctgtcggtatgagattcaagatgaggtttgagggagaagattcccctgaaagaaggtagcaaaaccatttccatggatttaacataacttcaaactcttttttttgtctttagtgctctaatatgcttatcttacctgctttctttgacaggttttcgggaacaatagttggcgttgatgatatatgtcctcagtgggtcgattctaattggcgttcactaaaggtagttagctctcatcgaatctttattttggactcttttatcgtatttgttctttattctcaaatgacatgaatccttttgttacctcaggttcagtgggatgaagctgcatcgatacatagacctgatagagtgtcgccttgggaaatagagccttctgcacccgggagtttagctcaaccagcacccgtggttaagaacaagaggcctcgaccaattaacgataacatgtctcttgatacttcaaattctaccacatcagcagtctggaattatggaatgactcaatcccacgatacaacgcaactaagtgtagctcctgaagccaacaaaagaaatgaaaatcactccttttggcgtcatcggcagcaagatggctggatctcctctccccatcaaactggttctcatatttttcaggacacaaccgaagacagtaaaagtatatcgataagccctttattttcaaaacaaaacaatgaccagacctctgatcaatgtgataaagggaggaaaaccgaaacgaatagtagttttagattgttcggtgttgaggtgactgatcattcaaccaattcctcaaccatcaccgacgggctagttagtaccgttttggttactgactcagagcaaaaatccgaactttcaaaggcttctaaagaaatgataactgagcaattgcaatcatcatcgaaagagtcccaaaccaaacagagctcctctacttcatccaggagtcgtaccaaggtactgaaatcaaatgcctatagagattttatgttctatcaaagcctgttttctaaatgtagacttgtttttcgataaaaaaggttcaaatgcaaggcgttgctgttggtcgagcagtggatttgtccacgctcgaaggatatagccagctgatagatgaactcgaagagatgtttgacatcaaggggcaattacgccctcgtaacaagtgggaaattgtctttactgatgatgaaggggatatgatgcttcttggagatgatctatggcagtaagtttctctattctatataagaatcgttacgaactgtttactatgtttgatcttatatcatcgatttcggtgtcaatgcagggaattctgtgctattgtaagaagaatctttatatgttcaagccaagacgtgaagaagatgaaatcggggagcaaacttccaatgttgtcttcactagaaggagaaacgacagtgataagctcggaatcagcagaaaattgacctttttctttgtttggtaagagattatgtttcgtgtaattgtttttcgtttgtggagaagaagaagaagaagaataagagggcgtttcggtaatttgatttgctggatttttagagctaacttagaagattgacttggttttaagagtgagttgggagaagaagaagtagatgatgatgatgatggtaggattagaaaactgtgtatatttaagaaaatatggcttttggtaaaagggctgaaatttgaggtttgtttggttggttggttggtggggaggtgtctttttttttttttaattttatttaaattttaatgtaaatattttggtgtttccatattttagtgaatgggttttgtgcaatcttttgttgcttttatctaaaatggtttttgcaaataattgttgggatttcttgtcttctcatctcctaacaccaaaatcaatgagattccattttttgtttttcttctgcatcatcattgagtggggagaataattttagagagctttggattccactctctctctatatatataatatatacaattgtatgacattgacatgtactatgaatctgaaacaatgcaatactattagagttagtcctacattaacatcacattgttaatgtgtgaaaataataggttacttttctcatagctaattggttttgaaatggaatctcattatcttatcccaaattctaacaaactctctcattatttggtttaggaaaaaaagaagaagctagatacactaaaaattaatgaggataaaaaattgttcattttgatataaaatttcattaccatttcttttttggtaaaattgatttgaaaaggtatcaccaaacttgattattaaacaagcatagctctaaagccatggcaagccaaatcatgaacctcaataatattgttgatatcaccaaatcatgaacatgacacaaaagtgtcatcagaaatttagacaaaaactataattactataatatcaaaatattaaaatacaccagatcatataatttaatataataattttttgtgtaagattatacgtgtatagaaggtgttaaatattattagtattcaataataatgctttaaaaataaatagtacactcatgttagcatacacatttctcatgtacatgcaaatcaaaaaacctttattgtgaagggatctttttaacccattttattaccaaatcttttgttttgaatgttcatagcaaaattctagaagtcatggaatattctcattagcccatttcacacttattttctttcttttttccatgtagctagtcaacttctcatttattggtttttgataacaaattccaccctaaaagaaggagcttttcaaaggttgcaactcattgactataattttttttttttttttggtttcatcataaaatacaccaatatatgtatattaaataggattagaaccatgaagtaatgaatgacttaccttcacgtaacaacaatcctatgattgtcccatataaagagactacaaattcaatgtgttcctctcaaccctaattatattcaatcaactcttaattaattattaagtggttgagcaataagcaaccaattgggtcattttcattaattaaaaaaaaatgccaaatagaataaaagagataatctcttattataatattctcattgcatattctattggtcatcatttgcaataataccatcttaattttaaagttgttccatctaaaccaagctttattatatatatttagaaaatttacaaaaaatagtatttttggcaaaattttaatatttttacagttaaataattttttttatattatcacaaaatctttttttttttaaattttacggttttatttaattataattttatggttttatttaattataattttatggtattctataaaaacaacatgaaaatatcaagcaaataatataaaaacaacatatttattaataacaataataaaaaaaacaacacaaaacatgaaaacatcaatagtccatattttttgtaaataaaaacttataaactgtaaaatagtttaaaattctttacgactatatttttgtatttttttctttgacttttttcagtatttatcaaaatattcctatttttttggtttattaattagtggtgtcttcacactccaatccaatccaatactatttttttttctttttttttttgaaatgaatccaatactatttcaagaatatggtcataatattattcaactattacttatgatatttatattagtacaaaattatcttggtttctatggaattggtagttcaaatcatgtggtaccaaatgagtggtggaaggctttcaaacattgctactcgtgaacattagagaggcttatgaaaaaaatatgatatttttataaaatattatataaaacagcattgttcaaaatttagagccaaaatttaaaacattacctagatctttttttagtttggtgcaacttctctctctctctacttggtgcagatcccttctccaccccttcgatctttcaaacaattccaaggactacgcataagctgtaggggctttatacctcaacctgtcttaattgagtcatcaatagtcacctcaagggttcccgtaaaacagatgacaagatgacaccgcctctagtaaggaacaagcttttttttttttttttaattcctatcaagaggagctgtggtgggctttgaacccttgacccaagaaaggaagggtgcctgtaaaagcaatccctatcactataccacacaacacgtggtagtttggtgccacttttggttgataaatatgaatagatttatgggctcatgttatttggatcttgtattttgtaaaagttactgattagacattctcttttgtaaaatgataaatagatcttgtatttttcaaaatggtacaaaatagtatcttgaactcaatttttgttatttttttttaatataagcaatttgaagacaatttctaacacgaacagaagcagaaaatatattcaattttgtcataacaactctagatcgagttattattaacttttaatgtaacaaaaatacatggtacaacttatcatttaacaaaacaaatgatctaataaattttacaaaatataagattcaaaatagtatttattctaaatttatcttatgtacgcaatgctatatctaaaaaaagagataggaggtgacggccagtcttgaaagaccactcttcgtctaaggatgcctaacgaccacattaataattcagggcacattgtgaggtgggtagtttatctggggatgatgcctcctaaagaataacaaagatgtgtgaaggtaagattttacggataattacacaaaacactaatttttgtaaaatttttatatttttacgtttcaagattatttttgtttttatatttttacggttttctatagaaataacacgaaaacaacaaaaaaattacataaaagtaatagaaaaaataacatcgaaacgaaatggtatctatgtcacatgattcttttcttactgtccaatttcattaaacaaatgaacaaaattgcattacttattatgatatgatatggctccataagaaaaagaatgataatattacaatgacaatgactcataaaaatcaatcgttcactataagaaaaatattacaatatacatacttttcttgtcatcatgacaaccctcactaaccctagaaagaattttatgagatgaaaactatagtgaaattattccacaaaatagaattatgatattccaaaccaaagcataacaattcaaaatgttacatttgcaattttgtcattttatacaaagatcaactccataaacatagtaattgaataatattatatacttagagcatatttacttgagaatcataaatgtggtgtattgttatttttagaatattttattaaagtttaatttcaatactaatataaaatatgtgacaaatttaacacaagctaaaaattatactaaattgataaaaaaataacataagttaaactttagtccacaataaataacatattttttaattacctctttgttacttattaaaataatataagatatttataagatattaaaataatataaataaaattaattttcaatgaacaatattaatttttataactaatttgcacattgtgcattaaaatatataacaaaaattagatcaaatacaactttatagtatattttagatcaaatttaattaagaatatacattatttgttggagatggtattaaattataatttaatctattctaaatctactttgaacttgattttttaataattaatatttaatcttacaacagctctattagtcactgattttttttttttatatattttcttacagtttttctgactcagcttccattaaaatattgtataaataatatctaatttgtttttttttttttggttttttttttggcctttccatttttaaatattccttcattaatttggccatgttaggctaccatatattattatgactaataatattttttaatattttcttttattatttatttttatttttgggaatttaacagttagtgaagcttggacttattggtatttccaaaataaaagatatccatgattgattaattattaattaattaattaattactttaattaactataattgtatttgtaaccttttactatcttcatctaaacttttcaactaaatataattattattatttaaatataggctatatatcaaaaaatgtagcataaatttactccatttattttttctcgagtatttctaaaattagaaaaaggatagaaatgttattaatattattataaaactcgaagtacaagacttagaattatgatgtttttgatttatgtgagatttgtttggtcttgtctttttcatgtgatgaattcagtggtcctaacaatagtataagtctattcttaatttgaaatgtttctttttttctctttttttttttcctatattaattttttgtgtgtaataatttgatggctttctattttattagatgagacaagaagattaagacagactaggttagtatctaagacttactcattctaggagtctaatttaaaaaaaatatcatttaataatatacattattttttaagaatttttaaaaattctattttgtaa

SEQ ID NO: 36752 - DNA, 6060 bp, Cannabis sativa
gtgtcgggtttcatcacaactgctggtgtggttcgtatcagttatcctccttgtccattttaatgaagaaaaaatactaagtgttggcaggttattcgcctcgttatgtctctttattttagttaagattgtgaagtgactgtctcgctatatgtaatccaaggttgtcgtatgtgattatatttattcttactcaaacgaatgaatatcttctttttgactatgtactttgatgcagacatatgtctcatcaatagtggttcaatagtttttatccttttctcgcttaagactatatggtcagcgaattttgaatattttctattaaacctttatttaataataatgagttatttaattctgcatttaacgatataaactttattatatcaggtgattcatattctatttgtaggacacgtgtcaacttctgaagtgtagctaagttttgggtataacaattgccccttaaaaaattctttttcaattaaaaagagcgttttaaatgattataagggtatttttgtcttaacccaaatttgaaaatttgcatgctttgggttttggtggtttaggatttcgaggcacatcactagcattaaatgctatctttttcaattttgtcgtgttcccatatgttagatcttatttcttttgatctaacggtgatcgcttccagagtatgaaattttaaagtaagcactcattttaccatttttacctttcaaacattcaagcctttctgcataaatcatctctgacttctcatcaccttgcatgccctcactctcactaacttactttttgtgtgtttcttcggatttcatcttcagtctcaagatttttcagaatacggtgattcaatcatctcaatcccattcatagagttcttccttaagcaaaaattctcatcagaacagtaagtggtctatacctttctttttcatatttacattttgattttcgcaattgtttgtcttctttatttatttttgtttggttaatttttaggtgatttttgtttgttggataattttagggttaaggaaaaaatataggtttatttgatttgtaggtttctggtttaagttgaatttacgttttccaaaaatatggattatgttctttttgcaagtatgtcccaatctggttctgaaatcccaattccagatttcctagaaacagaatgtcctaaaaaattagctcatccatttgaaccaaaatccaaaaacctaaatccaaacttgagataaatgatgccaaaattagggatcatttaatagaaaccaaccaagctgaaattacctatcgttataggcagtttttgcaagaaattagtgagggtaaacgccattttctaaaatatgtaacttggccaaaatcctagattttagcttctatccctttagcgagacccttgtttttacctcgagtcactgttacttttttaccaggtgacctagatttcgaaatcatgaccacctaagctcgtaaatcaaagaccccccaagattctaccatcaactttgaggctgagcttattgaatccaaagtaagggctattggagactatgtcaacaatatactaaagtcctgtggcatcaagcaaaagcgacgatgtcgcattagatctgttgctccaggggaatttagtttcattccaccagaaagggtgattcgagaggaatgtggcgaagccagcactagtgcctcgtcaggaattggctcttgcagcctcgagcacatcaaggctggggtagtatttcccttgagggaatactttaaggagttctgtaattatctctgaatagctcctttccagttaatttcgagttcttacagaatcctggcctgcttaaaggtcctatataaaattttaggttgcgagtgtcctactcccctcaaaattgtgtacttttactctgtaaaatctattcatgcaaagaaatggtgtttaggaggtttttattacctcattactcacacaagtgattaaaggatcactgtgacattacaaaacaaggccgagttcaaggatgatttcttctagactattggtctctcgcccatcaacacaatgacatttcatattatacgtaagtgtcatttctttctcaaaagcttggttttgacttattggatttattaaattgaagtcgtttacttatttcacttattgtgttgacagcgatcactcgaaggccaattccatcccccgagatggccgagcagcataaaatcttgttaggccttctttttggactgcggtaagtagattttcttttgaacgagaccaatctgaggaccgtcaatcttcttggtgatgaccaatttacctgcgactgtaaggttccaaaatattctaagtggcaaagggtcccagttccaaccgacgaggaagataaaggttatgtggctcgtacccattatctcaacaaagtagtccctcgggaagctaaagaagaagcatctcgaggtaatcaatgtggatggtcactaactatagccaatacaacttttatacttaaggaaatttttgtatagcttgcataacacataggtttaatagttggtaccctgaatttcatgtccaacttggttgcactagttcctactttgatattcctgagcagtatggtactaacttggatagggtgagtcatctggattcaaatttggatttatctccaataaacccttatgatatatacatgatcaccgggtctagggagtttagtgattaccatagttcttcctcttcatcatctgataattatggtaactttcttttcgtgggagtttattacctacctttttattatttattttttaatgagtgttgatgtatttccttgcctcgtagatatggatttggaaaaccttctcaatacctctagcaaaaatggaaagaagaggattgttgcctcggaaacttcattgggagcgaatccagagcccatgaagaggtcaaggaagaccactgctaatagaaaacacgtgcctcgcagcaaataatcatcgagccagttcatgataaggttcactctcaaactccagttattgtggatactggcgagcaagccaatggttcaactcaccaggttaaatctttgggaaaagaacctgaaatggttttgttggaacctttctgcccctttcctcatgaagaaggaattattggcttgcagttctgcttgcagtatgccacctcaagttggcaccatttcaaatcctttcaatctggcgattaggatttggtcaacaatggcaacttcaaggagttgtttgagaggaccctaaactttagtctctcagttagttcctttcttcattctttattttattatatgttctcccttattcttcttctaaacttatatattctttttccaggcatcttttctatctcacatggcacaataccagagccttaaaaaaatccaacaattggaatcttatattcgcaaatccattgaacaacaagagggtcttgcgaagcagtggacaaatgcccagaagaagaatactcacctgactaacgatgcaagggaactaaagaggaaccacaagctaagctcgagagtgctcaaaaggaagccaaggatcaacgcgagggccgtaaaaaacttcaagaagagcttaaagtagcgaatcaaaacctctatccatattgtaaagaagtcaactgctactaccgcgtattttgctcaccctatgggtaatgccccaatcaggtcaatctcccatattgcgaacgcgtatggtgtagtcatcaatctcaactttgttggtggtacgccaaatatatgtgaaagcctttggcatttgtcacatcttttaacaatttcatttgtgtctttgtttattgttggccaataatatccttgacagatgattttcttggacaaactttgccaactcgcatgatctctacgaaagccttcgtgaatttctttgattatttcattggcttatgttggtaacacacatcataagaaaggcatagaataacctcttctgtacaattttccttcgactattgtgtagcgaggtattgaatataagagttagcatgcctcgatttaatctgtaggaagttcctcattgagtaggtacttgactatgggtatcatccatgttggagaagcatttattatctcaacttcttccttttcacatatacttgggtcgtttaagaatttaactgctaccacattcaactttttgagttctgattatgatgccaactttgctagtgcatcaacgttagagttttgttcccttggaatttgttcaatcttaaaataattaaacttttccacgttcttccgaaccttttctaaatattttgaaatttttaagcctttttcctagtattctcccatgactagatttataattagttgggagtcgcaaaaaaatatgagattttcaaccttcaatgtttcagctattctcaatccaaccaataatgcctcatactctgcctcattgttcgaggtatcgaattgaaatctcaatgcgtagtagaatttgaagttgtcaggcgacatcattatgactcctgcccccaagccattctcgttcgaaggcccatctacatataatttccaagtttctccatcacgctcaatgaatgggtcttcttttgagattattcattcaattaaaaagtcagccaaagattggcttttgattgatgttctcgggtggtaggttacatcgaattgtcccagctcgattgaccattttatcaatcttcttgaagcatcatgttttgataatccttgtcttagtggttgatccgtcaaaactttgattggatgcgcctagaaatatggtcgtaacttgcgagatgcatgaattaggcataatgcatgttttttaagaggtggatatcttgattctttccccagtaaccttgtaataacatagtaaacaggttgttggtgctttccctattctcgcaccaaggctacactaattgcatgttccaagacagctaaatgaaggtataaagtttctacagttatttgtttggccaaaactggaaggtgttgatagatgcttctttattccctttaaaagcttcctcacattcttctgtccattcaaacttcttatttcctcgcaaaacattaaagaatagaagacatttgtctgttgattttgaaatgaatatgtttaatgctaccattcttcctgtcaaggcttgaacttcttttggcttcattggtgaaggcatctcgattagggccttgatttttttttttggattggcttcaattcctattacatttactatgaaaccatgaaattttaccgagaaaactccaaaagttttgggttaaacttcatattatattttctaagtatccaaaaacactctgtgagacccttcgtgtgatcttcacattttatcaacttcaccaacatatatcgacgtagacttccatattttatctaatctattttttgaatgtcctattcactagtcactgatacgttgctccaacttttttttaaaccaaatggcatgactttataacagtaaagtctcatattagttacaaaacttgtatgttcttgatcaaggacatgcattttgatttggttatatccaaaatatgcatctataaacatcatcagctcgtgtcacgtagttgcatccactaactgatcaatccgtggtagtgggaaacaactttggacatgccttattcaagtttgaaaaatcgatacaagttctctaggtaccatttggttttgggacaagaactggatttaaaatccacaatgggtaaaaggcctcgcgtatgaagtcattggtcaataatttatcaacctcttctttaagttccccttgtctctcaaaatctaggggtcgccatttttgtctttttgctgggtaattggggtcaatattaaaatgatgatagatcactttagggttaatctctatcatttctgaatggctccaagagaattgatcctggttcgtcttcagaaagtcaattaactgctattttactttttcatacaaattcttcctaataaaaa

SEQ ID NO: 36753 - DNA, 10263 bp, Cannabis sativa
ttttttttttttatttttctctttcatcatcagcaatccacactccacctcaccacccctaatgacacttttgtgaaatccaactcaaccaatcagaactcagcaaactccatcacaatgacccaagaagatagataagtcccctacacacactctctcaaacctcaatcccaaaacaacaaaataattattattatttataattttttttgtttttttgggtacaacatgaaaactcaacctcaaaattaactccattcatacccttttcgccacgtgtccatagttcccaccatggaaaccatattatgaatcaaccgttgcctcttcccaagtggccttccttcttcactccacacaaaatataaaactataaacctgaaaaagaaaatagaagaagaagaagaaaactcaaagcttaaatttaagctttagttacagagaaaaatcataattgggagagaacccatttcttctttcgtaccatctttatcaaagtttccatctttttctatctttatctatctccataatcataatcctcaattttgttaaacagaggagttagccattaatggcttctttactatcttcatcattcaccttgacaagttctaaagttgatcacctttcttcactttctaaaaaacaatactttcttcactcttttcttcccaagaaagcaaaccaacccaactcaaaatctttccttaaagtgaagtgtgcagcagttgggaatggtttgtttactcagaccacacaagaagttcgtcgaattgtcccagagaacaaaaatggacttcccactgtgaaaattgtttatgttgttttggaagctcagtaccagtcttcactcactgctgcagttcagtcattgaatgaatcaaaaaggtatgcttcttatgaactagttggttacttggttgaagagcttagagatgagtcaaattacaaatctttctgtaaagatcttgaggatgccaatatcttcattgggtctttgatttttgttgaggaacttgctttgaaagtcaaagctgctgttgagaaagaaagggatagacttgatgcagtccttgtgttcccttcaatgcctgaggtgatgagactcaacaagttgggttctttcagtatgtctcaattgggtcaatcaaagagtccattttttcaactctttaagaagaagaagcagtctgctggctttgctgatagcatgttgaaacttgtgaggactcttcctaaggttttgaagtacttgcctagtgataaagctcaggatgctaggctttacattctcagtcttcagttttggcttggtggttcccctgataacttggggaatttcttgaagatgatttctgggtcttatattccagctctcaaggggcttaagattgagtacaaagacccagttttgtatttggatactggagtttggcatcctttggctccttgtatgtatgatgatgtgaaggagtatttgaactggtatggaactagaaaggatgttagtgagaaggttaagggcccgaatgcgcctataattgggttggttttgcagagaagtcatatagttactggtgatgacagtcactatgctgctgtgatcatggaattggaggcgaaaggcgctaaggtgataccgatttttgctggtggacttgacttttcaggtccagtggagaagtattttgttgatcctgttaccaagaaaacatttgtgaattcagtgatttcactcactggttttgcacttgttggagggccagcaaggcaggatcatcctaaagctattgaggctttgatgaagcttgatgttccttacattgtggcagtgcctttggtgtttcagacaactgaagaatggcttaacagtactttgggtcttcacccaattcaggttgcattgcaggtggctcttcctgagcttgatggaggcatggagcctattgttttcgccggtcgggatcctagaacaggcaagtgatttcctttcttttttttctgtacatgtatagtttgttttttgattaaatgtctttaccaagtagtttatcatgagctgaaactttggtgtttctttattgctatacaattatggttccattagttctcacactcaaaattcttagtattaacaaataatgttataatggtttcagggaaggcacatgcccttcacaagagggttgaacaactgtgcaccagggcaatcaaatgggctgaactgacaaagaagacaaaggtatttgttatctttaatctgcaaaagttctagattcatagagcttagattgctaatgatgaatagtgagctcatactgtgcaatttgtgaaaaccttgctgctttatttagatattatttacaaagaaaagagactctatagatattatttattattactatttacaattgtatgttgctgagaagacattatagatgttgcttgaaacaaattctagttgtggagttatctttattccactgtctcaatcaatttccttaacatttggttatttgctgagtattgttattcaatgtacttatgcaggaagagaagaggatagcaatcactgtcttcagtttccctcctgacaaaggaaatgttggaactgcggcttacctgaatgtctttgcctccatcttctcagttctcaaagaccttaaagaagatggttacaatgttgagggcctaccagagacttcagaggctttaattgaagaagtcattcatgacaaagaggctcaattcagcagtccaaacctgaacgttgcctacaaaatgggggtccgggaatatcataaattaactccatatgccactatgttggaagaaaactggggcaaggctcctggaaatttgaactcagatggagagaatctcttggtatatggaaaacagtatggtaatgtcttcattggagttcaaccaacttttggttatgagggtgatcctatgagattactgttctctaagtctgctagtcctcaccatggctttgcagcttactactcatttgttgaaaagatctttaaagctgatgctgttcttcacttcggtactcatggctcgcttgaattcatgcctggaaaacaagtggggatgagtgatgcctgttatcctgacagtttgattgggaacattcccaatgtttattattatgctgctaacaacccatctgaagctaccatagccaaacgtcgtagctatgcaaacaccatcagctacctcactccaccagccgaaaatgcagggctctacaagggtcttaagcagttaagtgaactcatctcctcgtaccaatcgctgaaagactctggtcgtggcccacagattgtcagttcaatcatcagcacagccaaacaatgtaatcttgacaaggatgtagacctgcctgatgaaggcactgaactctcagttaaagaccgagatagtgtggttggaaaagtgtactccaaaatcatggagatcgaatcccgtcttctcccttgtggccttcatatcattggtgagcctccaacagccatggaagcagtagcaaccctggtcaacattgcagcgctggatcgtcctgaagatgaaattacatcgttcccatccatattagctcagacagtggggagagaaatagaggatatctacagaggaagtgacaaaggagttctcaaggatgttgagcttcttaagcaaataactgaagcaacacgaggagcgatttccaaattcgtggagcgtacaacaaataacaagggccaagttgttgatgtagctgataaactcagctcaattcttggttttggcatcaatgaaccttggattgactacttatctagcaccaaattttaccgcgcagacagggagaaactgagaaaactatttgagttcttgggagagtgcttgaagctaattgtggctgacaatgagttgggaagtctaaagcaagcactggagggaaagtttgtcgagccagggccaggcggagacccaattagaaacccaaaagttttgccaacggggaagaatattcatgctcttgatccacaagccattcctaccacagctgctatgcagagtgcaaggattgttgtggagaggctagttgagaggcaaaagattgacaatggtggaaagtaccccgaaacagttgcactggtattgtggggcactgacaatataaaaacttatggtgagtccttgggtcaagttttgtggatgattggtgttagaccaattgctgatactttaggccgagtcaaccgagttgaaccggtcagtcttgaagagcttggaaggcctaggattgatgttgttgttaactgttcaggagtgttcagggatctctttatcaatcaggtaccattctttaatttgtccacctatatatctcagattctgctatacaatcagacatttcaatccaaaataaattgttttgcagatgaatctccttgatcgggcggtaaagatggttgctgaactagatgagcctgtagaaatgaactttgttcgaaaacacgcattagaacaggcagaatcccttggagttggagtaagagaagctgcaactcgaatcttctcgaatgcctcaggatcctactcttctaacattaaccttgctgtggagaactctacatggaatgatgagaaacaactgcaggacatgtatttgagcaggaaatctttcgcttttgattgtgatgcccctggtgctggcatgactgagaaaagacaagttttcgagatggctttgagtacagctgaagcaaccttccaaaaccttgactcttcagaaatctcactcactgatgtgagtcactactttgactcagaccccaccaatctggttcagaacttgagaaaggatgggaagaaaccgagtgcttacatagctgataccacaacagccaatgctcaggtgaatttctataccaatattgctaaatactaagtatttggattgcgaagcaaagatctctagacccttttcgccaaaatctgattatcttcttacaatgcaggttcgtactctttctgagaccgtgaggcttgatgctcgcactaagctgctgaaccccaagtggtatgaaggaatgatgtcaactggttatgaaggtgttcgtgaaatcgagaagagacttaccaacactgttggatggagtgccacttctggtcaagttgacaactgggtttatgaagaggccaataccaccttcatccaagatgaggagatgatgaacaggctcatgaacaagaacccaaactcattccgaaagatggtgcagacattcttggaggctaatggacgtggctactgggagacatcagctgacaacattgagaagttgaggcagttgtactcagaagttgaggacaaaattgagggagtcgaccggtagagacaattcttgaaaccgaaatttctgtgaaaatttgtaaagtgagattaaagaaaagttttcagtacattgatgaagtttagttttttgtgctttgaaatgtctacttaatgtgaatttgcttacaagtttttatgatgtaacttgagacattttcaggcactagagtagtgactgttgctttgattatcatgttcattaaaataaaatatataaatatatttctctatcattgttttacaataaatatagagatagctttcatttattaaatagcagaagatttttgaagctgaggctgaaaagattatggttagtaacttagtgagcttggagttttgaacaaagtgaccaaaagcaccaagagtagctgaaattttcactttcttttcttttgaagtgtttatattgttatcaaagagaggaaaatctggtagatatttcaagacctacctaaaacaatcaccctttatttaaagaattgaaactaatgcatggagattttgacatgtaacactatgctcttattacttctcttcttttgggaagatcaatcttgcttataaaccagtgttgggtattctggagaccacatactgttcttcacatactctacaatttcgtcctgactaagttttctaagttggcgcgcatccatttcgcggtaaccttcagctagatcctcttctatagcttcctttataacagctgcagctacttgttttgttatatctcgaatgcttgatatagatgggtaaataaccccatttagaacatcctcttccgacatatacgcagctaggcattcagccgctgcttgcagcatgccatcagagatgatccttgatccagatagaagagtaccaagcccaattcccgggaaaaggtacatgttgtttccctggttgcagtgaccaatacgaccatttccaagatggacatccttgaatggacttccacttgcaaatacaacattgtctcccacaatggagaatgcctcatgaggagtacattctgcgtttttggtaggatttgacatggcgaagattgcaggccttgttgaagttgaacctttaagtgcctctagtacttcttttgagaacaagcccccaactgctgacaatccaagaagcacatcaggcttaatttgtttcaccacttgtacaagacttgcaccttcctttaacccctgtcgatgaatttcttcgatttttcttgcaaaaggaagcgcatcaggatcaacattttcgcgctcatctgtgataagaccatttgcatcaaccacccaaaactgtctcaaagcactctctaaagcagattcattgtttcccaacatccttgccattgtttttcttgcagcatttagaacacctattcctgcactcccagcaccagcaacaacaatcttctgtttcgggaaatcaatcattgctcttccttgtgctcttacagctcccaaaagtccagcaatggcaactcctgctgttccctgaacatcatcattaaacattctgtatctagctctataacgctgcaacaacttaaatgcccatttgctttgaaaatcttcaaactggacaataacatggggccatctagtaaaaactgcctccataaattcatcaataacaccaagatactcttcaccatctaaacgatgtctctgtaatcccagatacaaagggtctttgagcaatttctcattgttggttccaacatcaatcatcacaggaagtacctgaaattccatattctatgattaccaacttttatttaaatcccaaaataaatcatataatacacttcaaaaaagggtatattgatgcatttttacttttatcatgtatgttgtagttatttaagacattcaaggcgtgcaacaagctatataaacgttgttttcggcatgttaaatgttctctaatttctcctacaaatatgtcttaaataactccaacgtacacgatcataatgtcaaaataatcatagaattttctcatatttatgaaataaaacttgtaaaataaggatttgaacaataccctttgaggattaatcccagcagcagctacatacaagtcaagtttcccaatagcaataccaatcccctgaacaccaagatcaccaagccccaatattctacttccatctgtaacaacaatcatatcaacctcatcagctggccaattataaaccatagacatcatttcaccacgatcttcaccactgaaatacattccccttggtcttctaaacaaaccaccatagttttgacaaacaagaccaacagtaggagtataaatcacaggagcatattcttcaatattagcaatcaaaaccttataatacattgtctcatttctatcatgtaatcgattaagtatcctccatttcgccactgcatacggatcagaaggtccatctctcgcttccacttcgtacctcttcaaatcagccatgaatcgttcgatttgctgctctgttgacataacatttggtggaagaagccctctcagatccaaacggtctcgttctgtcattgtgaaagctgttcctttgttgaaccatggatcgtggagaatgtcgagactgcgtttgtggatcatcgtgggacggtgaccctcggtggtggtaaatgatctggattgagacagccatggagatggattcacgacagctctcagtttctgattaaggcgattcaccagagatgatgaagctctcatctggccgtacaagttccccattgttaagctaagaccaccatgcattggtcttgtgttaaatttgggtgagtatgaaagagtatgtcatctccatgcaaataggtgatctgtaatatagctgtaaaaaagtttggtgtgtcatattatgatataatttttaatattttattattaaaattaattatttcattaaattataaacattttacatttacttcaaccaattggttttattaaaaataatttttgtccttgaactttaacatgtaccaaatcatattccctgaacttttaagatcattaaaaatacccctgaactatttaaattgttagatttaaggactttgatatctatcaaattatacctctcgaactttgacatgtattaaattatgccttctgaacttttatctatgttcggcttttttactaaaattggaaaaaaaaaattcttaaatccaacaatctcaataattcagagggcatttttaacgaccttaaaagttcaaaaagtataattttgtatatgtcaaagttcaggaggcaaaaatcctaattagtttatttaaaatagatcctccttattaaatatcatatttgtgtgcgatttaggctaattggtcccaaaactttgtattttaaaaggaaaatttaatttttcatgcatatattagagaaaaattattctcctaaattcatattatgcaatattaagagactaagccaactttaataataatcccctacccacccaaaaaaacaacattttcctcttcctcttctcatctccggctcttctctcatcttgcaatcttactcactcacaaatctcattctcttcattcatttcattatcaaataacacaaaattttgatacaaaatgcgtgctttggtggtggttatttttttttggacgaaacattatacatgaactcaatcagtaatgatttttctttgtttaatcttgttgttggttgttatatttagtttataatgttattttgatggtcgatctgttagttgttgttgttttatgctgctttttgtgtggaaactaggactgaacatcaggcgggttcatcgggttttgaatttgcaagttcacaagtttcgggtctaaaaaaatgaacccaagtcggacccgaataagggtcgggttgacgggttggcggatcatgggttggcaggtttcgattggtcgggttaacccggtcaactcgatcaactctttcaggatataaaaatatattatatatactatataaatttttaataaaaaagtatatatacaaaagatatattaatttttattatttaacagaaaattaaattatataaaaaaaaactgagtcgtgcgagtgcgactctgtgttcgtgacttgagtgagagtcggtcgatcacttgagcttagccatggtgactgcatgactggtgagtcgtggtcgacgtcatggatatggagtggaggtcctggaggagctgagcggaccgagtctggagtcgtggggtgtggaggtccgagcggaccgaggttggtcgtcatcaatccctgggtcatcgtcggccgtgggtgaggtctggtgaggtcggtcgtgggtgggggtgggggttggttctatgtcgtgtgtgtgtgtgactagtggttggtggccgctgaaatgtaaaaggtgaaaagttttaaggttttttaaattttactttttatttttaattctttttattttttaattaaaatataatatgtataatatattaaatattcgggttggcgggcgggttcgggttcaacccgaaactcggtggtcctaaaaacctaacccgcgaacccacccgatggggtaccgggttgaacccgacctgcccgatttttttttttttaaatttgtgggttgacctagtcagttccaggtcaaacccgcttaaaatgttcagtcctagtggaaacggttgttggttaagttttttgcatttttttggtttctagttttttttcgtctggcccaatggtgtccgatagaggtctgatggtggtccgattattagatcagtcccaaggttagggattgttagagtattagctgtatattagatgtaaaagaattagggtaacttgtatttagtagtttcctattttgt

SEQ ID NO: 36754 - DNA, 8531 bp, Cannabis sativa
ctaacaaaactaccataataaatttgttgtttttgctttttttttttaaaaaaaaacccttatcaactaaactctgtcagccgcctcttacctcgcgttcagtgctcgctctcattctctatctggttcgtcgtgctccacagtcccctcgcctcccacgctgcttctccgctccgccattcccacacttcactctctcaatcaggtaaccgcccactgtagcctctcagccacgctcactcttttcgaagaggagtttatctacaacaacataaaacataacaagcttttatatgttaaatcaaatttagtaaggtttcagccatgggtgcgcttgcttccatctctccttggattcctgaggatgaccttttactcaagaacgccgttgaggtaattccataatccctactgactcactgttgtcaactatgtctttcacttctccattgttactagcttggttcatactcttgtagctttctgctgcttctattctataatttcttcgcccattttaattgtctacgtctataattttccttcttgcccttaagttatttatttattattatttaaaatagataaagtacttctacaagttgatgatgtattcgggtttgtttgtttgtttgtttgtttgaataaatgtatttggggtttgaatgtggttcttcttaagatgtttttcaactatgctttgtaataatccaaaattgaggcttttgaatcaaaggatttgacctatgaacgtgtatgtatcctcttacctgttaaatatattgattggagtagaatggaacgatgctcttgcaaaaatcttaggcttagaatctctgtagtggatgtttccaattaggtatgtcttccattgaatgagggtaatgttctagaaacttgaaattctgcttttacattttgatgctgtaaagtgaaaaccggtgccccacttaaccattcttacgagtgcaagtcattctatgcattgactccccacattgttcccaatggcattttttatgtgtttggttgagtttaacgttttttaattgtccgactaagtcatgccatagatgttttctgtatcttcttcagttccttgtaaacattttctttgttttggattggtattagggtaagattgttggatctcctgctaagatgttaatgtgacacggccaagaattatggaattcttaagttcttctgtatggaactttgattttacaagagaaagtaaacgaatttttctcgtgtaaatttaaacaggaaaaaatgagatttctttttatagaaaatgtttataagaagagagtgatttaaatttacttaagtacgcagcattcaaactttagtaaataattaaacaaaattaacatgtaaattgagaaggagaaagttccagaagaagattttatggatatttaggataacaacttcctttgtttttaatcgtctttcctttcacatttttttttttactttagccatctagggaaatacacaactcaaactttcagtattaaagctattaagtatgaaatttgttctccttgaaaaataaataagcacttgagtggctgagtgggcgagtgtgtgtatgtgtgtgagtgtgagtagttccaggttcaagtccccatgattgtgcatgaatacgaagatcggtaatgaacataatcagtggattaatatgttactttttcatggttatatatcatggagttagtcattcaatttcaaaataagaaaatgataataactatgggttgaaattgggaaaattgttgctagaggtgggtgaaccaacttcattaggggtttgaaagttgatgtaaggtttgtactggttaattatgagatgatgatggaaaaactttagcattatgggtgcacaagatggcactgtaaaagactatttcacgagaaccaggaaaagaaacttgaaagcatgatatggtaattttggataattttgtgcagccattttgatctttctggaagaagactaaaaacagatagggaaggcggctgggagattagtttggaaagatctaacatgtttattcgtaaaatttatagcttacacaatttatacttgcgtatatatgttacagataatatttcatattatattgtattttattgtgcatatatccataacaaaagttcagatggcttggatggttcagtctaatataaatatatatttttctcctgagctgtttttttttttgaatcacgttgctttgagtattgctatcatttgttacatgaaacatcttagtttgctctaggaatttcatctcgatttatttatttatattctttattattttcctaggctggtgcgtctttggagtcacttgctaagggtgcagtgcaattctctcgaaaatttactgttcgagaactgcaagatcgatggcttactcttctttatgatccaattatttctgctcaagcatctgctcaaatgattgagtttgagcgttctatttcaatgcttccatcgaagttcaatagatttggaaatttaaaagagaacaagtgtgttgctgggaagagaaaagcagaaagtattcgtagttgctactatgctttgcgtaaaagattctgtaatgaaccgtttgattccatggatctcactcttcttgtttgccctactaataacacttacgttggaaatggagatgagcctttatcctcaaattgcatgcttggagaagcagtctcaaacccttttgggcttgaggtttcagaaatggataatatgacttgtgcttttccaaatgatctgatggatgatggtactatccatgctttccatgcaggtcttgaaaacccatctgaagaaaatttttgtattgagcaaaataacatgcttgaagaaattcctcatgttcccgaagaaaatatgccttctaccagaaatgtctctggggtcgaggagatgggagaaccagcagatttggtagacagcctctttgaaggggttgaaatagaagtgaaaacctctccccctttcaatcaagttgatgatggtcagttgaacatttgttctgaatttgaaggaaataaggcctttaattcctctggcgcaggatctgttacaccgtttaacagcatggagtatttatctccacttacaatgatgccagtggataattgtcttggagacagagatctatgcgctggagattcttttcaccttcctgatgattatgatgctaggagtagaagaacttctggctttgatgttcactcagaagtcaaggtgaaaatggaatcggcctatgataattttcaagttcatggtggcactgacaattatttagctgaactatccaattctcttttacacttcaatgatgaagagctcctgtgtactgacggaagagatatgattgataagtcttactatgatggtctaagctcacttttgttgagttcaccaaatgatgttggtcaagatcagatgaccgatgtaatggaactagaaacatcaacagatccagatatgtgtacgatgaattcatctggcccttgtcatggagagccacatgatgatatggagtgtcacaagggtgatgaacaaatatcattcaattctccaaaccagatgcaatcttctatatcaacttcaaaaattcaatttcctgaattagaagatggcattatttgctgtgtgttaaataccgaggaccctgaaattccatgtaatgatgatgttttaatatcaaatcagccatctgtgatgttgtctgccgcagaagcgaagcttcaagaagcaaataggccactttcttcaactgttaaggatttaagtagcaatcaacgaactagtgatagaggacctcacttgatgcataaagaaagaaaaacccctggagattctcatgtattttctcaacatctttcacaagagatgggtccgagtccctcagttggtagttttggggtcaagtttgcagcatctaagtctgactcaaataatatggcatctaaggttgcaggtattgctagtagtggtctaaattctgcaaattcaagcacaaggatactccaagagactctgaaggaagagaccagagaaatttcaatggccaagcatctcatctcaactgatatctctgtagagaaaccagctttaggctctgcgagctttaaaagctgtccacaaacaaatgccactagtatcaaagaggaacaagatgggcctagatatcaggagtcagtacatgcggaactgacgcccacgattgatactgctgtttctgaaccacttctagacaatcccacagcagagcaggatggggttcttcatgagagtgacgaagatgacataccttattattcagatattgaagcaatggtaaatccgcaaattcttaatgcagaaaagtagaatgaaaaaaacaatagacttagttgcttgtgatttgttttcgtttttatttcgattttataataactttctctttcaccctgcaggtacttgacatggacttggatccagatgaacaagacttgcattctagtgaagaaggtaatgactgagctaagtgatttggtactattattgaagcaactaggaacactattttctttggctttctctgttatttgattttatcaaagcatttaggagatgtgatatgttctgtctatagataattaaaatatttataatacctggcataacaaatcaatttgaatatggtattttttcaagtattgcattcgtatatagaattaggacaatgattcctataattattagagtggaacttattttatcgggtggatctcagtttctttaacaggagatgatatgcaaatatttgcttgttcaggtatctatgtatctccatatctgtacataaatgtgtatatattttggtcatttgttttcacgtgatcatgcatgccatatacttactaaattccagattattaataaaacctgttgttgcttctgaaaaatgtgcaccttttcatctttcaacccaaagcctctttcttttgttcccctttgttgtgttgtgcctcttcaacgctcttctctttcttcttattactcttttccttatgtgttttctaatattatcccacatattttagttcaatttacaatatgtgggatctaatattaaattacatcaatcatgtcaaagtggtgctgggcaccatctaccccttatcattacttttttcttttttcgttgtgttttacaattataattttgcatacatacagtctcaagatatcagcacgaggagactaagagggcaatcatacgactggagcagagtgctcattcttgtatgcaacgagctattgcatctcatggagcacttgccattttatatggacgacactcaaagcattatattaagaaacctgaggtaggccagttttgtcactctgcctgacccctgtactttttctcatttgggatctttctggtctttgctatattatcaacagctgtaagtggaactttttggcaaaatttgtattttaacagatggattcggaaatcagattttaagtgccgcaataaatttgatctaaactcaaattaatgaagataagcctatataagacatgaaagaaattggagagtcagaattttattttgttttggcttttctgtttattggtcatgttcctttcttttcttttctaagggttggccagaatccaaaagtttccacaactgtaaaatctgaagtgtttttgcttttctgtgtattagttatgttcctttcttttcttttcgtgttaagggttggctcgaatccaaaagtttccacaactgtaaagtctgaagtgtttaacttgaaatactttcatgcatagaatttaaaatgtgttctggatagcacctttgaaaagtttttgttgtcatctattcgctcaatggttgattcttttattaatcttacataaaattctgcaggtgttattaggtagagcaacatttgaaagccctgttgacatagatttgggaagagagggtcgctccaataagatatcccggaggcaggtaagaggttcttctgatcacactggactcactcatttcagacatttaatatgctttcccctcctgaagtttggataaaattttatatactctctcacacaccttcctggttaagttaaaaggacatctaaatatattggtcaaagacgctagatgtcacataacaccaaatgaaactactactactacatcggcattcaatgctcaaatttacatttatccatcaaccagaattggagatttcataagtgggagtagatctactctttatattttatcctgtggctggtgggggagagggcttttgtggttatgcttgtgttatttcatgtgtatcttttctttgttttgtcttgctaggcatttttaactgtaaccattgatctttatgacatttgatcttcttgtcttgaatttagtttgatctttttatttcttcacattttctaggccattataaagatggacaagggtggatctttctgtctgaaaaaccttagcagcaggttttcaatatctatgaacagcaaagaaataggccctaagcagagtcttaaccttaattcgagttgcttgatcgaggtacgttcctttggttccttgtcacgctgctgccttggtaaatagtattgctaaggcccttttgaagtaaataaaatctgatgtacttgacctcatttaaatgctttgtggaatgagcttgagaggttagaaaaatgctttcatcattttacaatacaagagtaggtaaagatttgtaactaaacaattaaatctaaacctgcttattggtatctcactatttgtaacagctttttaaccatagtaggtaggaccagaagtcatcagtttaggtaaaaatataagacccttggacaatcataacagtaatttgagagttgttgctcaagtaatagtttctagaatataaatgccaaacttattttctggcattgtattggaggaggatctttgttgaaatttctctggtcagaagttgttttttttttcttttttaatttaatcaccattcatcatgtagccttaattgtttatattaaaacaaattaaacacacatatctgtcatcaattacatgttaatcttatatgatatgtcacaaatggtggattttcagataagaggaatgccattcatatttgagacgaacccaactcgtgtgaaaatgtatgtggatagcatgaagactagccaaatgcaggaggaccaaatacaaacatagaggaggtgcaataaaaggtattcctcattagaaggtgctctttttactcatgacaaatggtgaatttttctcttttaatattctaattgctcttccgggtcatctaagtttttttcttttttctcttttacaatctaacagcatgagagcttgaaatttgcaaaataatctcatgtagggtcgcttagtgtacatataggtggcgtttggttggaggtaatgaaatgaaatggaatggaaagaaaacaatttttatttcattcttttgatcggttacattttaaagtattggaatgtcattttcaccattttggtggaataattcttccattttgaaatagagaaaaaaaaaataattccaatgaaatatgagaaaaaatttaataatttttttatctatttttttatgcatttaaattttattgcattcctatttctattattattcttatattttcattttttctaaccaaacgccaccttagggtttgtttgagcgactctcaaggtcgtttagtgtaatttttggatcgcagtaatgacttgaggttattttgcatatacatatatttagaagttattatgctagtacttatttctatcaaagtcaacattcctgaagatggtcggctgtttcttacccagaagttgagtgtggtgatagtttggcaacatccaattccaatttactcatttttcacttgggctatatttttaagttacgattttgatggaaaaaaatgtgaaaaattaaaaataacatccaatctaattataattggatatttaatgtttagtagttagttgtaattgaattggattgatttatgcacactttatattttccttacctactaaaatttaatttccaaacatagcctaaagagaaggtagtatatttggtttggtggaataacattggaatggaaaagtcattagtaataatgacacgtttattatacagtatttagaattggaataaattaatagaaaaatttaacggaataaataaaaaataatcataatcaatatttgtaatatgttgtttactaattttttttagaaatagaataatagtgatttatcttgtttactttatcgaatgtttaaattgattaaattgtctttttgagttaaattataacatatggtagttattttttaaaatatattttaaaggataaaattgttattatatatctaatattaaaaaataaaataaaaataaataaaattcat

SEQ ID NO: 36755 - DNA, 5936 bp, Cannabis sativa
ttgatgggtttcatgaccttactggcttaccttggtgaggtttaactgagtttcgttactgagaaagttttgatttttttcatcattattatcattatgaaacaagactcttttgctttacttacgtatttctttgaatattgaatatgctattgtaattacaggtggatagttattgctttctctacattgagtctcagagttgttctgttccctattctggtcttgcaacttcgcaagttgaatcaaattagtgagttatcaatcaatgtgagattttgatttttctcttcaatttgtgggttaatcactcaattgggtcaccgtgagttcaattgtctaatcctcttgtactgattgtagctacacttaaatttttcagtattcaccatcatcatcttcttcttatgttgtaggtgtctgcatatcatataattaacttacttttcttcttatcaccttcataggaccccctgaacagagtcattctgatcccaattcgctctctcgggagaaaaggcaagcttataagaagccctcacttttgtggctgcttccatacgcttgtttccaggtaattatattcttaaaactatgaaagtggcgttagtttttgataagttttactggtaattcctcttttcttgttgttgaatttgtatgcagatcccatgcttcttattgtggatgactagtatacgaaaaatgtctctgaatcatcaccctgggtttgattgtgtaagtctcataaatttactataagttcatgtaaacttttacaaacgatatgataatttggatttcaagtttttacggccaaagcaccaatgaagttcactcttttggtttttccttgaatgtgaaaaacatagacctattgtagccagaacatagagcaattaaaaaagtttattgctattacattttttttaagagttggggaggtttcttattgttataacattgctagcataaataagtttattgtatttgattatctcgaggatgttgtgttatcttcttctcattcgccattcatgggtatccttgatgtttcctaatactgctgtgaattatttagttcatttgaaagcttgtatgcattgccatgcatggatattgtctaattctacaaagattttttaatcacgtcattcatgattttgtttgattaacatgaaatttttgtgactttcatttcagggtggtgctctttggttccataatttaactgaattctcgcatggagttttaggctccatatttccattagttattgctggtttgcactatgccaatgttcaggtaattaattgggttattaaatatataagtatgaaacatcctttttagtaaagtggttgaatccctcaatggtttcctacccagtagagatgatgataggattgtctctgaatggttggtttcagaatcaattgttcatgaatgacacaaaactagaaaagcagataagcaaaaatagaaacatctttatgtttcttgtaaggtaattgctggtaaatacagattctttacaaacatagatgatgttgccgctcaaaaaaacatagctcaattctgattagtttatttaattttcagaactcttttagaagatcttctgttaaagaaacaactggtctactcgacgtagcagtaaaagtaagtagtcacaactatacaagtcatattttttatttttatttttttggtgagaatgctgtatcgtgttacttgtttttctcccaagttgcatttatctaatcagttataatcaagttaaggtgcagaatgttctcctgatcagggaatgtattatgttaatttgtatatctttgaagtagttgaatttcagtgttatcttattacttgcttttctcttgagtggcatgtttcttattagttttatattttaatcagttggagggcactggtcttttagccattttaaaaagtatttttattcctagaagtgatttgacctgtaaaccttgtgcagtattacaagctcggcttggatttcatgactctacctatcctttgtatctgttactgtgtcccccaggtaacttattatattcttatgcatatgtgtgtttaggatttactatattggatcatattactcacattccgaggcattttgttagcagactagcagttgccaatgaactaaattggcagaatttaattgagattgagtaccaaacaatttatgccacagtttaaaatttttctacgtcttctcttcagattgttgtcgcttgtgatataattcagttatttatttgatgaagatgtagatctgtaggataaattgttgtgtgcaaaagtttgttttaaaaactaatgtcattatatgaaatacattaatagaatcttaaaggggtaatacaatgtattgtttattactgaaatgctcaaatatctggcattgaaaatctatttcctcttctctattaccatattctggtagagaatatataatttacttctccacattctttcgcagggaagtcaagtctattgggctacaaatctttcactaacttttactcaggtgatccgtcaccccgcatctattcttttattaataaacatattaatttgacacttagagacttgatttcatgtttcccacatgtatgtgcatatctatatttaaacttagttccttgtgattgttttcccaaataagattctgctatatgcatcaatagtattttccttctccgctcttaaagctgagctctggttttctcaatatccaatgtgtatggttcaattgttccgttatttatttatctttggtttggtcattggtgagatacattcctttgtatttgtcctcagattcaattatctttcatacctgaaaatccatggaataccacatatattacttgtctgagaggagagtagtagccaatgctaaatcattgcagttacctacttatcaggcttttgttatgtgattatcactctgttactactcatattgttaaattatcgattttaattcaaagttgctccttttttgataacacccaggagtactttttctagttcccaattccaaaatgaaactaaatcactttctacccgtaaaggggaaaaaaagagaaaaggttgtggagttttgatgaaacaactttttgaaattgtaacatgttgaaattgattatttggaatttggaaattggattttgattagaaaatgaactttttaatactgaaactccaataatattctaggtctagctgcagactgcagtgtaagcatctcaataaatgtcctgatgtgaaagttctttgatgaccttgcagcattttctcctcaaacatcctgttgtgcgtgcaaagctagggctaccagtcgagaaatatcttaattctgcagattcaagtgttactgctcctgctataactgcaagtgaacctaaaaaaccgcaccaaacatctttggaagccctctctccactagaactgcttaacgttagtgaacctatgcttttaccttgtaagctatgttaacatcggatactaattgaagttttgtcgaatctttatgtctgggactgtgggcagctttccacccaactattatcgaaacaacatatagaaagagcaattcctatactacagtaaatgctgatcttctaatctgcatttttatttttgtctcaacttctttatgttagcttagtagatttgtccatagctgccaaattaaattataatgtctttttaattgcagactggcactctccaaagatcctgagaatactaggggtttaattcttatgggtcagactctaatgcagaagggactgctttcagaggctattgaatacatggagcgtgccgtttcaaaggtctgggactctgcattcattttcgcattacgcaattttcgcttgttaagcttgcacgatgttatgtatgagtcaattaattatctgagtgaaaattgctttgcttgcaatatttgtctgagagttcaggatattctatcttgtctgtttgggcgcatcatgtaaaccaacacctgtcattttaatttacatattttaagattcggttcataccatgttttaggttctttgtccattaataattcattaatcagaaagtgctttcttgcatcagctcttacttgctggccatcttacagaagttgcagatatttctgatttaatccgtgcctctaattgggctggttctctccatattcggcaggtgcagactatttacaaaacttgctatggaataacatttaaaatggataccacactatcaacacattttttttaatagtagtatggtagagatcaaaccttttttttccactgacgacttacttgtgtatgatatagggaaacgtcaaggaagggctaacacatttggaaaggattggaagaatgaaagaaccagagcatccagtgtgcaaaactcactactttgatggattattaatgctttcgaggtagtgaaaatagttacaagctatgtgaacatttgtattgcactatagattattttcccatattaagttcattttcatatttattaaggcccttctttttcagtgctttatacaacgagggtcgcaggaaagaagctgctgattatcttcgattagctgctgcttataaccctgctttcaacgagttcttagagcaatgcgaaaatgatgactcttcacccagcgatcttaccaacaaacaacaatagacaagatcatttacataggctgaacaatacaaattttgttttccttcttaccattatattgcattaccaataaagcgattagagaataaaattttggaagtcattgttgtgattatttatcataataacctttttcctagatacccaggtatgtatttttatttgggggacatactttgagaagaaaagatagtaagcgcagattttagacttaaagcttgaagtactgttatgaaggacatctatatatgtatgtatattaacttaataaacagacgcataattagtaatttaaactgattcatttgataattgacaggtacaaatagagttgtacgtgcagtggtttggtctccaaattgcagaagctgataaaattgatgacggtaagcaacttagtttgaaaattttgagaaaaagcgacttaatttgtatttgataaaacaaagaattgaaaaacaagcaaaataaattgtggtttttatggccacttttgctagagaaaacacggttgttctattttctcttattttgccttgtccaatggtacctttcaccttgatgtgtaggttgatatatccaattgatcaactttaaccagatctatttatagtgttgagaaatttcaacgacgtatttacgtgtcaacaatacttattttatactatatattgttcatctatatattaagatttatttatatatttatatatatttatatttatactaggttgatattaagtgcaatggacgtataattagttttctttataattaagtttaattaggtaatgttaagtataatattttaattttttttaattaaataatgtatttttttttttttatttttgaaatgtagtttgagattttgatctttaaattttttttttagctattgctacattagtgtgatatttaaatgtgattatatatatacttatttttaaattttttttaatcagtaacgtatgtaataatgtatatattgtaatttactatattcttaattaaccaaaactcacataaccaataagtgtgtctatatgtagattggattcttaaatttgatataaatatttttatttccaaattttacaaaaataataataaagtataaaatataattaaaaatatttataatattttaaatttaaatttctttatataaaatattcacataattttttttttattttaat

SEQ ID NO: 36756 - DNA, 3935 bp, Cannabis sativa
tttacacaacctattcatacaagttaatatcaaacataatattgtattaaataatattactacaatacaatataatacaatccaacatatagtcagttgtgaataattttgtgcttctctcaagaaaaataattaacgtttacctttttcttttaattatataggttttgaaagattaattgaaatattgaggctagcctaaaactaataaattggttaggaataatgacaccaaattcaaataataatcataatcagttcaaaaaaaaatcaaataataatcgatgtttcattcatatttgtatcaataagagacaaagaaggagacgaaagtagaccctgcttcaccctattcattttataccatattattagcttaaaatattataactaatcaaacaaccaccaccacaaccaaaaacactacgtgagtattgattaatttcttttttaattttttttaaagactacctataaattgattttatatatatatatatatatgtgcaacagtgcaagtaatagtttaattagttgtttaaaatttatctttgaaattaattaaaataacttcatactaattaatattctaattcaagtagtctcccttcctccttgcatgtattactgtactctccatgatataagtcaaacccaatttatcaaatctttttcttttccacaatttctataataatacccttttgatgttttcttgtccttgaagatttcaagatcctgattaatcttggggggcatgttctaatatgttcttttgagttaaacaaggtgccttttattttcattcttatatatataaaagtatttcatgtgtctttctaggaaaatatcagaatttggttaaggcagagttgtcctagcaaaaatagagaagaaaatgagaatgaaaagactttggttttgagcttggttatgaggaccaaatggagaagttaagaagatgatggaaaagttggtcaacaattgggtttcaagcttggtatttcattgttttctcatctgcttattcttccttctacctcaatcaacttctgcccaagaaggtaagccatgattataaagagaatttttattttttttactagattatcaaggatcaagatatatacataaacattgatataattgttgatgaattaggttaaaattgtatcaatttcagattgattaaatttgtgtgtttcagattctacatatatcatcagttcaaaactggtacctatacaaacttagtaatattcataattaaacaaaagaaaataaaggattgcctcatgaattagcaagatcctctttttacaagtcactataataaatgcatatttgtatagaattacatttttcagctgtctaaaatagagactagtttaatttagccataaatgtgttactttcaatgcagggtttatcagcctagcatgctgtaaagacaattatactgatacccaaaccaacataaggtgggaatcagattacagttggttccctgataagactggttgccaaaaaataaccaaggcaactggctatgatgaaactcgaatattcaacatagacttttcagggaaaagatgttacagccttgaaacaataaagggtcaagattatctcataaggggtacatttttatacaatggtgatacagttttaaaacaatccttttccatattagttggtgttactaatattagtcaagtaaattttccaaaagagttggaggttgttgagggggtttttagagctactaagaggtacatagacttttgcttagtgaaaaaagtgggatccccttatatttctcagcttgaattgagggaattgaaaggtttggaatatttacaagggttatcatttaaagttctaaaagtggtcaagagagttgacttggggagtcaagaaggagacatcataaggtatgtttttctatttttattcaaacctattaaccattaatgtcagttgataaagtttactttaacataactctgtactaaacaagttatgattaattacagatacccaactgatccaagtgatagaatttggaaatcagagccaggttctgacccaacaagcaagccaaaccaagtggctgatgccaaagttgtgaactacaaaggtaatgtagaagtacctttacaagtgttgcaaacaaccttagctaatcccaatcgattggagttcaccgaaaatgacctcgacgcagacgattccatgtaccgtgtgattctctactttcttgaactcaatcagacagttcagcctggtacaaggctgtttgatatattcataaacagtgaggaaaaggaaactagatttgatatactgggtaatggctccaactacaaggagcttagttttgatgtcaacgcaaatgggtttcttaatgtgaccttggtaaaggcctctggatcaagtttaggacccatttgtaatgcttatgagatctttcaggtgttccattgggaacaagaaaccaatccaaatgatggtgagctcaaattttgataagttgttccattcttaaacctctcaatttgacattcactcactgaatttaactctctttcttttagtgaatgtgattttggatgtcaaacgtgagttgttggtttctaatcagcacaacaaagttttggatagttggactggagacccatgtcgtccaagtccctgggaaggcctgacttgtggaaccatgaatggttccacactcataaccaaactgtaagtctttcttagtttgtatcaatattgaatgtggtcatgtttatcattttttttttgtggtatttaagagacttggttcatttaggttattgcttctgaagtttttgtttttcttcatctatgctacatttttcaggaacctctcgtcaatgaatcttaatggaccaattcctccaaatattactatgttggccaacttaaacaccctgtacggtaacaaagaagtaatttcattttgtggtgttaagtattgatgtggtaatttgactaaatctatctctaccctctaactcaaagttgtactacattttttgtgtgatgtgtaggaatctaagccacaatggtttcactggtgaaattccagtctttccttcttcctccatgttgacattagtgtaatttctcttttcaattctacaactttattgcactttaacaaatagctttaagaacattcaccgtatgcacagagttctgaataaaagttatgtaactattaattcaatagctagtgatagatctcctctcaggggaatattattcaaacaagcttttgtaaaaaccttttactttaaattgctctttatattgatttgcaattacatgtttcaaacaagtattgactgtttcatttctcatctcatgattgatttacattttcctattagagatttacggagcaatgatcttagtgggccatttcccaaatctcttttaatgctgccacatttggaaatgctgtaagttagtgaagtccctattaatttatatcaacttatggcgtatgcaaatgaaaataatcaagtgtatagcaactaaaaacctgtttgattctagatatattggctgtaaccaaaatattgtccaaggagatacatctggcttcaacagctcaaaacttgacacatggtatgaaacattgtcacaagcacttatcaaataatcacatacatacatatatatatatatatatacatatatataacataatccaaaatttaaaatatcaggtctggaatttgcatctctaccagtgaagaagaagcagcagcaaaccgaagtatcatcataggctctgttgcaggtggaactattctattgactgttgcagctggtatcatcttcttttgctattacaagaaaaaattgatgcctcagggagtattcaatggcaaacgatttaa

SEQ ID NO: 36757 - DNA, 2470 bp, Cannabis sativa
ttcttatgataaggtagtttatttgggtcctatgttctaccaaataccatttatcttttgtttcagtgtattaactttggttttgactttagacttctttcggtatttactttgaatttttgcatcttaataatctaataacctactatattacaagaggatatatatacttataataacttaagctttagaaaattatattgttgtgtagctaacgtatgaaatgtccctacattaatttatggttattgttaatatttttctatcatttatttgtaagttcttactatctttaactctttctttggttcttttgcagctaataaattttaataaatctactatgtactctcaccaaatagactaaatgatatgcaatctttatgtactgcaatttttcatatgcaaatcactaaagctattgagaagtattaaagattgctgatgttaagtgaacaaaataaacaaagattatttgatgatgttaatgagaaagtttggtcttgactaaatttctagaataataagctttttctcttatgttggtaaagagatacctttaaaagttattattcaatctattcccacctacgtgatgtcttgttttacctttgaaaacttgtgaggagttggaagggttaatagcaagatattggtggacttctttgtaaataaataaaaagtttattggttggcttgttatacattgtgttttccaaaggtggcttaggtttttgtttgtttgtttttcacaataaaaccatgttagtagctcaagaggattcttacttgtctaaatactttactaacttaaatttataaagctaaataatatcaccatactacctttttggaagcttcaggtttgtattttaaatctatatgcgtttttagtatgaactacatttgtggtgaatttatttactcatattgtcctattttgaataggattatcgttcctttttgaataactaaattaggattcttactatctaatttttctgtttctttcttctaattttatgttttaattgattaaccaagtgggttaactaactctattagtcttggttgattttttttattattgttaagttttacttggtactctactactactttatttgagttatagtaacattggatttccttgaagttaggaaatcccctacctataaccggcgtagtattatctagggtcgctttctcttaaaaaaaggcacctgaaaagagtaggaactggaaattctaatttggtatttaaagatccttaattgctttgctcgtattcttttttacctgcatccattagtactacacatcctattttactagtgaaagatttaatagatgattcagggagttgctggaatttacctattctccaacagttgtttaacattgtatatctcaatgtattagttctataccccttagtaagtttccaaaagtggttatattgtggcctctgcttttgatttgtctgaaccgtctccttctaagaatgtgttttcagtttggtggaagaggttttggaggatgcatttacctaagaaaattttaattttatctagtgaggtttccatgggatacttcctactaatattgggttgcagaaaagaaatattattacccattcaaactgcccggtatgtggttacaattatgataccaatagccatgctttttttttttttttgtcatagttttaagaaggtgtgaaaattattaaatttcaatgtcttaaaaaatatctttgtaacagttcttttcaactaataatcattaaagctttagaagttttatcccagttagactttgaattaatccttttggcatcttggtatatttgaggagaacgaaaccaagtagttcgttgccattaatttagttctcctcaaattatagtttcacgtattcaagtcctatttgatgaattcagtaatatgtagcgaactgctagtttaaaagagaaatatttgtgcatcaacgtctaaatggatcactccaccacttggtacttttaaattaaatgtaggggaattttcataaatatgggaattgagagtatagtttaattttatatggcataaataaataatattatagggttatgggtttatttattattttttttttttttttacatttatatagttttttatgccatatttttgtaaaaaaatggaatctcatatttgtaaaacaacaataagtttttctggaaaagtcgccgacaccgaaaaagtcgctgtcaccggaaaaatcaatgttgtcagaaaagtcactgtccccggaaaagtcactgtcaccggaaaagtcatcgtcgccggcaaagtcactggaaaagtcacccgaagtacttgtctcagatataactagaaatataaccgattttatgaataaaaattaataactcaaaccagttataattaaaatagaaccaattctataatagtgttataatgaa

SEQ ID NO: 36758 - DNA, 5826 bp, Cannabis sativa
tttacatttttgattgagtgattaaaaataatccctaaaataataaaaaattacatatactgtacatttctgtcaaaaattactatatctagacaattcttgattgtgagatggagggtccccaatggctttttgggctcagtggctaatttgcctctctatgaatgacatgatttttccttcaaaataaaaaatgtaatggtatcctacaaatttatttatataaatgaatgaaaatatttttaaaaaataattaattaaagatgaaaacttagaccactagtattttgaagatttggatgaatatatagtaatttacgaattttcagctgctctaaataactgggaagtgggaaccaaccaaccattctaacaaaagaaaaacatcgaaaattattctaaaccaagcaaaaaagttcatattttatatttacaaaacaaatacaaagaaaaagcacatatatatttcgaaagctgttatttttctgtttctttcttttatttgacgtcagtttgatgaaaaaggaaaaaaaggaatgttcatatcaggagacaattaatagtcatcttatttagtattggcttacaatatcacaacagcatcacaaagattaaccattctaagtgatcttaaacccacaacaagtacccagcaaagattttcaatatcctatcacatggtcacatagcgggtgattttactagttgtgtggccaaattacccacacacaagaggtaactgggtcaccaaattattcatctggaaccaatcaaaggttgggatgggtcctacaatattttaaaccgattagaataaaagtatttgaccaatacgagtcaaatatatggtagttaaatatagacctgagacttatattaactaactaacctctccaaaaagacttaaccgccaaaaagcgttgcattttgacggcccaacgttaatttcgctttggctcttttcctctttcaaatatttttctttgatggtttcggtttactttgagtaatttcgtcgaagagctggtgggcgacggcggcggataacaatggccacccctgtcggaaacacgattatcgggatcaggggagcccctattacgtgtgtgaaggaagatatgaatcgcaattatcgaggtatttggtacggagatagcccttttaacttcgtattccctacggttctggccaaagtcatcgtcattactcttatttcccgcggactgttcgtgcttctcaggcctctcaagcaaccgaaatttgtctgctatgttctggtatgcctttgcacattcctcaccaatgtcagtttcgctttgttattttgttagtttaataacatttttgtgaaattattatcctgatagaagttttagtaaggcaaaagtttgtatattgatatttggcaccatgataaccagtgtaatatttaagttctgttttcacaaatttaaatttagaatcaaataaatagaaatgatattataatttcaaagttaaaatcactgaaaactagaatatagaaaagtcatatactttcaaatattgaattttttgtttggttgttgttggttttgaaattcagggaggcattatcttaggaccatcatttataggaggcatcccaatagtaaaagctacattataccaaccaagagagactgaattgtttcgcacactggccattatcggtggactatatgcagttttccttgtgggagtaaagatggactcatctcttatagcaaggtctgcaaagaacagttggaggattgggatatgcggtttcttattggctttaacagtcacttcaactctcatcttcacacaacttgatcatcttccaggaatcattatgagaggaccctttgttttctacgtgcccttgtctctatcctacacttttttcccagtcgtagctgaggcattagaagaactcaacctaatgaatacggagttgggtcagctcgccatgtcttctgcaatgctcaatgatttcattttctggttcttcttaggactctctgttgcttttaagcaagatacaattagccattcgatccgggctatgttttctttcattgtactagcgattttcacgttcactgttgtacgcggacgtgtaaagttaattatcaggaaaacgccgattggtaaaccaataaatgatgtttatatcgtttgtatattagttggtgttttatttatggcacttgcctcggactttattggttcgacttctcttcttggtcctttactacttgggttagtcatacctgcaggacccccacttgggtcagcactagtacaaaaaacagagtgttttgtgtcagagtttctactgcctttattgtttgtgcaagtgggttacagcacagatttgaaaataattcggaactgggaaatgtttgcaaaatttcagatcatcattgttctggggtatttatccaaatttgttggaactttgctgttttctctctcctgcaagatcaagttcaaaagtgctatcttgctttctctcattatgaatatcaagggtctccttgagctcatcaatcttcatcgatggattttcagtacggtaataataaaaaaaattatggtttcatttttttcctctttagtatttctcttaatttaccatgttctcacattgaactaatttaaaattatcgcagtacatagatgaacaaacatacactcaactagttttgtccacacttggggtgaccatgatcgtgacacctttgatagatatcttgagcaggagccgaacacgacttgacttgtcttgccgcaacagaggcctaagaaccctttgctctatgcctaaaaacaccgagtttcgaatcctttgctgtgtccacgacgaagaaagtgtccacagcttgattaccctcctagaggcatccaatcctatagaatcaagctcgatatgcacctacttagtccaaacttcggagctgattggtctagccgcgcctcttctagtgccctacgacaaaaagaggaggaaactcaagctggcgttctcggccagcactgaccaaatcatccgtgcctttgaaaactatgctaaaaactcaagaggccctgttatgatcctgcctttcatcatggttgcttcgtacaagacaatgcacgagagtgtttgtcgtctagctcaagagaagttcatccctctaatcatcctccccttccaactcaacaaccgctacagcggaatcaatgcacatttacgccagttcaacgccaacgtccaagcctacgctccatgcacagtggggatcctcgtggacaagggattctcgtgcggtatgagcttgatccacttctcctaccacgtcattgtgatctttctcggtggacctgatgaccgcgaggccttggcctacgccactagaatgtcagacaatcgaatgacagtcacagtcacggtcctcagaatcattctgctaagaaatgtggaagaagaggaatcccaagaagcaacagagaaaagtagtgatgaggctgcattagacgagttggtggtggaagagttcaagatcaagaatattggtagtctgtcctcgctttggaaggagatcacagtggatgacgtggtggaggttatgaataccatcagatcagttgaagggcactacgacctggtgatggtggggagacggaggagctggtcggccatgatgatgggagatgatgaaatgatggattttgtggagaatgaggagcttgggttgataggtgacatgttagcatcgtctgatttttgtggaggaaaggtgtctgttttggttatgcaacattatagggaaggtgtaacaacaactcgttcaggctctaacaagtcgcttattgaaaaagtccaattgctcacacgtcatgcctcacgttaattatgacaagattttttgttgttgttgttgttgttactagcttagtttgtttggtttaagttacttagatagatcaatgtcacgaacctagatttatataaatggggttttttagtttgactttgttacacgatgtaaagtctattcttgcccatcaaaacacgaaatgttctgtatattatagagattctcagaattacttgtagttaccaatttgataatttagactaattgaatcaaatgttttagttagtggttaaacaatttatgtacttttacaacaatgctaaaaggcaaatttatgccatgtttaacactacacaataataaagattattattaaaatgtcaaacttattattatatgtaaatgttgttagagtgtagtgtggtacatgtttagggcttcattcagttccttacattcaaaaagtaaaacgaaaatttttgtatctcattttgtctcatccattcaacaatcaccccattgagctttatttcctcctgcccacataaagattattaaaagaaaatgtaaaacgacatagcttgtcctgtggatatgacgatatactgaaatggaatttgccatgaattggaaaaattacttttcttctcctctaattactgttagtactttgtttttatttgatcaaatggataccatattgttaatgggtggtttagaataatttatttgttacttttttcttttttatttgagtcaaagatgttaggaataaagatttttttgttaaaaaatagtatatcataatgtattaaattaatttaaataccacaaatcaatttatttgagagtatttcaaagaaaaagaaaattgtctacatagttaataatatgtaagaaaagtagttagttgagttggcacacttgtattagtttattacattatggaacaccaatttttcattagtaatcttaattccagatcctagtcctacagttttttttgctcaaaatagatcctaaatttgttaggttagaaattattctcctagagtacgataattgtgtgacttgttgtaatattgctctttatttttttgctagctgaatgaaatattgtacttattgatccagtccttttatgccacagttctcttattatagtacatttctcaatcacgggctaataatctatgcccgctttttttttttttttttgaaacaatctatgcccactttcacctatcgttgaaagaaaaaatcttcatttttttagatttatgcattatcgtgcaattatggttaattgatgggtagctagaataggcttgaagttaatttggcttgtcttttgtgatttcatgaaaaaagatgattgttccaaatatatttatccaatttcaatgaaaagaaaattgtatttaactcattaaaaaacataactcaccttaacgggcttaacccatggcaaagtttttttttttaatattaattttttttgacatgataaagtttttagtaatatgtaaataattaaataaataaatattgtatttcccttaatatagaaatgtgaatatttaaagatatagtactaaatctagctaagcactctctcagcattttaattttatctttcaaaatatattactaaaatattatgtgaaaaattatgactaaatatccataatcaaatcaactaaactttaaataattaaaataattaataattgacaaaattatcagaccaaaaataataatagataaaataataaggacaaacagagtaaaactagaaaacactaaatgcagaaaataaaaaaatcaacaccaagatgtatatttggtttaagtctgatagatcaatgtgatctattactctactccagttatagaacaccaccataatccttatttattaattgaacaagaataggtacaatacagtcgagacaagatt

SEQ ID NO: 36759 - DNA, 4006 bp, Cannabis sativa
  modified_base (3823)..(3825): a, c, t, g, unknown or other
  modified_base (3855)..(3857): a, c, t, g, unknown or other
tccaattacaacatggctctccaaacgcgccctaaattttgcatcaagttttacaattgtgcattgaaacacaatagtcaaaactgatacaaatatatcacaaagttatttcttgtgccaaatatagcactattttcacatctctaattggaaatggtccaattgagatagttgatgcaaatttcaatgcagttaattaatcatggggttccagaagaagtcattgagaatatgaagattgacacagaagaattcttcaaaatgccattagagaagaaaaaagcttatgcccaacagccaaatagtcttgaaggctatggccaggcctttgttaagtctgaagaccaaaagcttgattggggagatatgttctatgttcaagctcttcctgtctctgccagaaatatgaaattttggcctactcaacctatttccatgaggtaaatgcaaattcccaacatataaaaatacataatattgttgtgagaaacaaatcctttctgacatagatcttgtaaatttcagagaaagtgtggataaatactcaagggagctgcagaaagtagtgctttgcttattgaaatttatttctagaaaccttaggctaaattcagagacacttactagtaattttgaggatggaagacaaggtatgagaataaattactaccctccttgtgttcaagctaacaaagttatggggctcactccacattctgatgccactggattgactatgctgctacaagtaaatgatgtacaaggtctgcagattaagaaaaatggcaaatggatagttgtgaaacctgtcccaaattcattcatagtcaacattggtgatgtcattgaggtaaactaagcataatatatactatttttgtttagaagtcactgtgtaattactagataggtcgtgtaattgggagttgagactcctcaattacctctaattacaggggcaccgtgtaataagataatcacacaaacatgtcaaatttagtaattgcctcaaatcttactcaaatccaattatagagtggtcttctaaacacagtccaaatgatgggacaaatttgtaaccatattgccctgtactcaatttatcatacaaatgtacattctcatacatcttttataaaagaaatgcactctataatgggatcacactttcaatagtttgagaagaaaactctcacatgataatagattattcttaacaaaatcttaccatttatgcagataatgagcaatggtgagtacaagagcatagaacacagagctgttgtgaacccggagaaaaaacgtatttccatagctgcctttcatggtccacatgctaaaagcaatgttggccctttaccagagctagtgaaaaagaataagcctatgtataaaactattagcacagaggattatctcagacttttgttcagcaaaaaacttgatgggaaaagccatatagattgtctgaaggagtagttgctggctcatacaaccacaaactattacttgtacaataaacacagcaccatcttctctttcaaattccaatgttgttaagtcgttccatgatttaatttgcaattgaataaagtttcaaactttctgtacatgaaagggtccaaacccataattcatactaatatataatattattattaggaggaaaaaggaaattgtgtcaaactcagtttccatcctcctaaaaagtgtccacagtctatagtacaaacacataaaaaaaatatgtgatcaatctttaggtgaaataaatggtaaccatcaaatccatattataagtaaaacatttcatggaatcatgaacagaatctgacataataaaatggaatacgaccaagaaaaacacagaacatttcataatctcatgaaaggcaaacgggctctttgtaaaattggctagttaattttccttttatgaagaaattgagtttacaattgaaagcataataaaagatacaggtcatgaacaaagaaacctgaatcaatatcaagaaatgagcactacgactcggaaatgagaatgccattttgaatatctgagaatgtcttcacatcaactccccataaccagcaatcgaccccaacggcgttggcaccaaccttgtctgccttcgtatcatctccaacatgtacagctttgcaagccttcacattaatttgatcttcaaataaagaaaacaaatgttaaaggtagcctcgatggattctttcagaatgacttaaaattatagtttagagtttgaaatgctaaagatttattaaacaatgtttcccccacaaactacgtattttcacaataactgatgtaaacaaggagttatgtttacaattccataaaaaaaaaattaaaaataagatgaacatctagtataaatcaaactcctgacaagttgggatcctagaggaagatattgctctgattatggtttctttacctaaagctgtttcaaatatctttggatctggtttttcatacttaacctctgaagatataatgactgcatcaaacctgaaaagaaacaaaggcactgttcatcatatcctgcttaaaaggtgatggaatatcaattatttatttgtcttcttaagtttgtaaaagagaagtactaatgcttacaggtctataacattgaggtccttcaagagcttcctcaagcgagtgtcgaaattggatactacagcaactttaactgtatttttgcttgcacattcagtaacaaagaacaggaactttacaaaaacaaagggaaatactcgataaatccgacctccagcatctttaagtaggtttatcgtttcataagctccacaaggaagatgccaagcatgaccattagcatagtactgagaaaatcaacaagtgaatcctaatgataccaaaagatcaggtgaaagaaagtgctctaaaataaaagtaccaataagcaagacttaaaaagaatgataatgaacctcataaacttcttcaaaataatcaatatcagaacatccagtggcttgagaaacaacaagtttccaaaatggtctcccatctccctgtcagtagttgcacagttttgatgcataatcaaatacccaattctctccttaaagccacagtacagacaaaagaacaatcacagaaagaaagtatagaacaactcacctggtaacgaagcttttcaggccatggagctgaaaaaaccctcttaaacccttgctttatttcagcaggagtagtaatcagacctgaaaaaaaaaaactcaaactttaacattttggagaaaaatgaaaaaaccccaaaacgataaaacgattaaactcaccatatttggcaccaattgtagcataagtctcttcgacaggctttgccagctgcaaaagggtacccccagcatccaataacagtccatcatataccctcctaacagaagaacctaattcatcatcttcaccaaatttaattaaattgaaactaatttcagcggtctaacataattgaacataatgatgaaaaaaaagagagtaccagagtggagagagtgagaagagatggagcactgaggtgggtttgtaagtttgaattggagaggtttgagggctttgagtacaagaccattattactaatactattagagcagtatctcatcatagtagcttccattatgtgaatgatttctgaaacaacccaacccaggactgaagtctggactgccttctttcttccccctcttccggaaaaactccattatttacatataacgacttgtcgttttcttcaatgaaacggtattacgtacgaaaattaacttttttttttnnngtacgaaaattaacttttttttttaaaaannnaaataaataaataaataataatgagtgattctaccatgcaccccttaaaaggaatgtactcatgtacattttttagtctaattttttttttcatattcatatacgttatagctatttaagataacctacaaaattttgagaaattcaga

SEQ ID NO: 36760 - DNA, 3659 bp, Cannabis sativa
atgtttggtttgaacagagcccagatggagatgtaattgactgcgtccatgtctcacaccagccagcttttgaccaccctttaatgcaaaaccatacaattcaggtatcaaattgaacactcctattcttatttatttacttattatactttctccttttcttcttattattttattttttatattgaggaatgtggttttgtttaatttatagatgaggccaaatttttatcctgaaggagtatctgaagagagtatgaagattacttcttcttccaagtcttctaaaccaatcaatactcagctttggcacaccaaagggaggtgtcccaaaggaactattccagtcagaagaactaaaagaaaggatttgttaagagccagcactatcaaatcctacggaaaaaaagtacataaatcaattcctaagccaaggtctgctgatccaggcttcactagtcaaagtggtcatcaggtatatatactcagccatactacttctatactcttctatctctcaaattcaccaaactttaatttgccgtttcattttatttaaataagatttcttgttttaaaattagttgataaacttggttgtaattaattaagtcacccaagtgcttaaagttagtggactactttgttacaattccaacatatagaaaaagacaagatataaagggatatgaaccaagcattgtagtggaacaaaagccatttactttttaatattatacattcaattatttggtgtaagtttcttaatgttgttatgtgtttgaattttggagtttgcagcatgcaattgtgtatgtggaaggagataagtactatggagccaaagcaacattgaatgtatgggaacctaaaattcaacagcctaatgaatttagcttatcacaaatatggatcttagggggtacttttggtgaagatctcaatagtattgaagctggttggcaggtttattgcttttctaacttaaaatttattattatttcagtaattttttattcttatagtgtataatattttaattaaaacaggttagcccagatctgtatggagataacaatactagactcttcacttattggactgtaagtacttttatttgttaatttttgtcttgtttgttcatgtttctatatattttaaaaaaagcataaaataatctgaaattctattttggtttatttggaaattgacactagagtgatgcatatcaagccactgggtgctacaatcttctatgttcaggctttattcagattaacaatgaaatagcaatgggtgcaagcatataccctgtgtcttctgcctataaaggatcccaatttgatatcaacatacttgtttggaaggtaattttaaaattttgaatgtattttactttttcatacatcttgacacatagatagatctaaattagtactttataattgagacatcaggtactcaaataatatataatacaaacttaataatgatgcagagaatctctgacatattggtcatatacccatccaactttacaaaaataatatatttctactgtttataacaaattatagattcaccattcaaattaaaaaagaatacatttctgaaacaaaagtaagaatgtttttcatagacaaatttaaaaatgattaaaaaagcaacttctaattgacatatggtttacccaaatcagtaatagttgtggtggtaagtcttttttttttcttaatttttatgatatgattaccattaagctataattaagtattttgaaaaatcatatttgggtactaaccaatttgaaatctggcaataattgtgtttgtaggaccccaaggaaggtaactggtggatgcaatttgggaacaactatgtgttgggatattggccagctttcttgtttccctacctttctgacagtgcttcaatgattgaatggggtggagaagttgtgaactctgagtctgaagggcaacatacctctactcaaatgggcagtggtcattttcctgatgaagggtttgggaaagctggttatttcaggaacattcaaattgtggatggctctaacaatcttagagaccccaaagacattgggatttttactgagcagcccaattgttataatgttaaaactggcaagatgggagaatggggaaattacttttattatggaggacctggtagaaatcccaattgcccataattaaatgggttaattttagaccttttcgaaaatatatgtataaatagggggaaaaaaacagcctccttttatgggtatgtaacattaatattgtgtctatatagttatttttaggattgtaatatgtgaaatcttctctttctcagctttttcttcattcttgccaggggttaagaaatattgactccctttttgtaagcttcttgttggatttgtttgataaaagaaaaatgtttggttgaaatgtttctttattatgcacaaaagtaatagagcaccatccgaaaatttcctttcttgattggattttagtggaataagagagtacattaattaagatgaacctttttttttaatttattattcttgttcaattaattgatcattccatgattacctttcgttggtttgtcttttggaaaatgttttgctagctattggaggattacgtttttcttacttttttttggctagcttatggtcctactcaccaaaattagcatatttttatctattaaaaattggtaaagtagaagaggaatcttttaattatccttaggaaaaaaaaaacaccaaccatccaatgatatatatattgatgataaagatttaaatattgacatgacatgtcacatttgtacaaagataaagacacaatataagaattagagatatattatgaatctgaactattgaactcattaacgatgtgatgattagaaaatcaaagagataaagatgaaaatatgaactacttagagaaatttagagaaaatgttacagatgatacaatgatttttcggcatttttaataaaagagttgaggttctctttataggtgagttctattgattttcagtacatatggtttcagagggtaaaagctagtagtttgaggctttgcaagaggtactatcgggggtttaatgaatgtttaagagtatctttctgtaccaccactactcatctgagattacagatgtagtaatacctttttgatttctctttgtttgtacacagccttttatgccgaatttaagaggaacataatatttgggacttccaaggttaaatatatactctccatcacagcttgctagtaatttcagtttcgattaagtgcctcaataatcgcacctatctcaagagtcaaggagggccttttgtctcgaaatggtacttatatacaatgattttccgttttgttaatgagtgaggttctatatatataggtcagctctattggctaaaagtgtatgtgatccaaaaaggtgataagctagtactatgaggctttgaaagaggtagagtgaaacagaagatagtgacggtcgagtttgatgcatgttagtggcgtggagagggtggtgcaacctgttaaagctggttaaatactaatgaaagtcaaaatgacttcagtacaaagcagggccggccctgaaaattt

SEQ ID NO: 36761 - DNA, 5297 bp, Cannabis sativa
  modified_base (1132)..(1144): a, c, t, g, unknown or other
  modified_base (1527)..(1533): a, c, t, g, unknown or other
  modified_base (2449)..(2451): a, c, t, g, unknown or other
  modified_base (3686)..(3702): a, c, t, g, unknown or other
  modified_base (5256)..(5270): a, c, t, g, unknown or other
tagagggtaaaggttcaaatcccactaactacactttatattttctttttaaatttatttacgcccctcctcactttaaattctgggtccgccactgcctataatatctataaattaaatgacaaagtcaacaaatgaaatccagaagaaagtgtccaatgattttccaacacatgaactctttctattggtttgatctgattcctccaaggggtgagggtgaggtgccataattgaaaatcaaacttccaataaaaataaagtgataaatcaaaaaaaaaaaaaaaaaaaacttccaataaagtgggtcatctgtccaaattaattaggttgttgcccaattgatgtagcatttaatttaccaaacaaataataatagtaccaaattgattttaagttgataactaaattctcttgtcagctgtcactcctttcttcgatcacaatttttcattagttagtttcttaaatctcattctaataaattcgcataggaagggtgacaaataagtttaattatttacttcaatttggtaaattactaatgatcaacatactatcagttccagaataattgaagaactatagacttggatttgtcctctaacgagatggtacaaaattatatacataaaattacaactctaacatgtaaatacaataaattttgtaattgagttcatactttatttattatatatcaatagctttggtacgagatacatctattatatttaaacgaacttaatataatcctttgagtaatttgtaccataatcttcttcggtggtcaaatttttgcaattaaccttcaattctaaaattttaataataaaataccctaactcatgctctgttagtagtttaacatttctatctatttttagctgttaactgtcatggtggaatgtctacgtggacacaatgtacacatgacacaattttataggctcacataaataaatatttaaaaaaaaaatcttttaaaaatgaaaaaaaaaatctttttccttaaaaaataaaatttaaaaagaaccctaatgccctaattccatttttctcttcttctcgttctctctctctctcattgccctaccctagccgtcatctctttcttcttcttctttttctnnnnnnnnnnnnncttcttcttcttcttctctgctaagacaatggggacgagctggaactcgacatgtggaggtttaggttgccggagacgacgaccaaaactcgctggggaggtctttgttgacggcaagctcatagtgacggtactgaagggggagggcgttcagaactcgaagcacggaggagatgggggagggcgttgagaactcggagcacggtctttcttcttcttcttccaggtggttgttggatctgggaaggacgtactcagatctggttgggattgggtcgtgctaaatgcagagaaagaaaggtgggggctttgcagagagagaaagaaagaaagaaagaaatgcagagagagaaagaaagaaaaacgagagagagagagagagnnnnnnngagagagagagagagaaaggaatcgggttgggattgggtcgtggccaaaaacactacgagagagaaagagatctaattgcaaggtgggggctttaccggtgctggaaggctttgacggaaagaggcgggatagtggtggccttcattttgatcgttgcctcgttggtgatgggaggcagcagtgcgggtggctggggaagagaaaggtagatgagggattggagttttatttatttgatttgagtttttaggatagagatgaaaatagaattgttttctaattttattttagtgttgatttggataaaaggaataaattttgattgctggtcgatcatggatggtaatgtagatgggcaattttagtgatgatggtggtcaattgtggatgatgatgcagataatagttttggtgatgatggtggatgaaccagagatcgaaaaagaagaaaagaagaaaaagaaaaagaaaaaaaaattattttattttatttatttttaattttaaaacaatttttggaatattttattttatttttgtaaataattttgtaattttttattttttaaaatgtttatttacgtggaccaataaaattgtaccacgtgtacactgtgtctacgtagacattccaccatggcagttaacagctaaaaatagatggaaaagttaaactgctaacagaatacgagtttagggggttttaccaccaaaattttagaattgagggttagttgcaaaagcctggccacttaaagaggttatgcagcaaattactctaagccttttgggtatatacggagtttatcatccatcctaactcatctgaatagcgtgtattagagttagtcctatattgctaatatgtgtaaataagttgtgatatataagatgaatgggctactcctcctattnnnaattggttttgagatggaatctcattcatcttatccctaaattctaacatggtgtcacttgtgattcgttgtgagctcaaagtgtcaccggtctaaaaattcgtttctgatccgttgtgagcaaaagtgccaccggtccaaaaagatacttccgctgtctcccatttaacctctatttgggactttttggccaatgtgtgccaatttcaagtgttgggatctttgaccttttttaaatttcacaaatttcccgtgtacacccacaaatttctcgatatttggccttgtgcatgaggaaggtgtattagagttagtcccacattaataatgtgtgtaaataaattgtgatatataaaatgaatgggctactcctcccattgtcaattggttttgaaatagactcctattcattttatcccaaaattctaatgtgatttgagaatatttttcttgcttggtaacgattataaatcatttgatgcatattcaaatgaatttggaccaaaattaaaaaaatacaaattatgaattatagattatgttgtgttaactgttaagtggtattgagaaattttatagagtgatttatatcatacaattttagcaagtacattcttgctagggatacggctttatgagggctaatataacaagacattattggaagtaaattaaaatattttttaagtgccaaacttaaataaatgttcaaactaaattgaataaattgatgaaaaatataattcaaaataatttaataaaaattcaaactgctcaataaatatattaaaagaattaaaaattttctaaacggtctagttaacccaaacaaaataaataaacatatttatatatttttaaatatatataatatattagataaattatctttatttgttaaattattggaattattacataaaaaatataaattgacactttattacaaaaataccttcataaggtgtggacaatatttataccttttatgtgattttaactactaaaatacctcttacactattacttacacaatcagacgatggttgcagagttgttgctgcgtggttgcatcaaacgaatatttcaatcagacgatgcttgcaaagtggttgttgaatggttaactgaaggttgcatcagacgaaagttttaatcagacgaaagtttctaggtggttgctggtggttggccgaaggttgcatcagaaaaaggtttcaatcagacgaaataannnnnnnnnnnnnnnnnatgcaactgtaatgcaactgttatgaaacattaaaaatcagaacagtgtgtccatgtacgtaactctatctacatgtctgtttatgattaaatatgaacaaatttaccattagaaatttagaaaacaacgaaaaatataccaggataaatattttactatagtattgatgtaatttttttggttaacacttgagttggattgtttaggaactccagttcaactttttgagattgcatggatttgaaaattgaagtcatgacattagttttatgcaaattaaattagatttttcggttgaatttgagttttgtagaagtttttctacactttcttttaatgaattcaagatagctcctgttttgattgattctgatcgtcttctcaggtgaagtcaccggaattaatggtgattctctttctggttgaattttcgtttcagttgcattagattgttgcgtggttgcgcaatagtttcccaggaagcatgaatcctgagttaaaggtgtgtgtaagtgttatttgtgtaattttttttttttttatttgggttgtatatttgtttgtttggccagtcgaaagtatattttttttaatatcgttactttttttagttaaaattaaagaaaaaaacccctaaattattttgtatttagtgtttaagtcaaaatttaaattttatagttaataatttttatcatatttagatattgaatttcaaattttaaatttatactatataattatacttttttctatttttgaatgaacgtttattaaattaatatttatcttatgttaaggttctttaaattaatttagactatagaatttttaaacgtgaattatgaataatatacttttatatttttaaaatttaattatttgaatactaaaaactaataatagttaaaattcggtgttttaccaaaaataatttatttctagaataaaaattattaaaacattactataataacagtaaaaagttaattacttgctcacacaaaaacactactttgcaaccacaaacaattgcataaataaataatgtagaaagtaaaaattcacataagagaattataggtggtattagttttctctcgaatactattagacaacatggcacacccagagaaaaatcaattagtaaagtataaaagattacaaatgcaattgacttatacaaagtttaaaaaatctctctacgtatgctcactttctctcaaaatgagacttttacaagtcttctctcaaagacaacctcttgttcgaagctgctcgtgaacctattctatgaacagtacatgagcattataaatgttgcctcagatttttcccaaaatatgtggcagtggccgagggtgacacgtggacctaaaaaaggttccactcacgaaaatcaattaagtcttgagcaggaaagtgcatctcatggagtgagcctcccgggggagagcataagacacgcccttactctccgggaggctagaactgtaacaccctaactagcataggcgtattacgtgattttttttaaacatattgtgcagctnnnnnnnnnnnnnnnaggtttatggaaaacgtgattaattaa

SEQ ID NO: 36762 - DNA, 3248 bp, Cannabis sativa
ctttttaaagtgacttattttttttttaaaaaaaaaaaaccatagctttttaaattcataaaactaggttttgttttcctttcacaaaattaaatatttattagttttccctcaaaaataaattaaaattatttatttttagcaagtggcaaataatcataggttaactcaatattttgctaagcttaaagtcaaaaggcctcttgagaaaaatattttgttcttatatttctaatttgacttatgatcattaaagctacataattaaatttgacaccaaatttaagacttattacttgttttgttgtagatatgcatggccaacttggtgaaatagatatagagttttgataccatgaagtggattgatcatattttgtcaaattatttcattttcgttaatgtcataataattttgttttaatttgtgagtttattttgtggtttttagcttattggttccggttggctctaggacagccgccattaccttgggctgcttctgatttttagtctcatttgtaattaagtggcttatatgcttgcatccaatacaaaatatcccttaattatgcataaattttaggtaccaaacttatacacactactagtactaattatacccaaaacatacagatgcccttttcttttccttcttcttatcttctctctctctctctctcctctctctctctctccttttttttaaaaaaaaaatgaatttgtcattcaaataataattggaagtacaaaaatgatgaaaaaaaatccatcaaatcaagtttcttatccaccttgaattgaaataggctataggtaaaaaaaaaaattgagttattacaataaagtaaatgatatttttaaaaattattaaaaaatatgtatatttttcaaaatgtatattttttttttaggcccataaaatgagttggccttaagcgcggacctagcctgccttagcctaggtcgggtctgaccttgaatgtatgcacaactactccatgaaatatcatgaaataggaatagttcaagaaaattagtaagtaaacttgtgaaaacatataatgatcttacatcagtgtaaacatagagaaagcaaagctcaatgccaaattacaatcaatcttaaagtgtgaaagtagaccaaacaacaaacagctactttagactcacatttataaaatctgcttgaatgattataacagtctctacaaaaatattataataaaaataagagttcagtaaattaaaatataaactaatattaataaatttaaattgatttaataaagaggaatagaaaaatttatctcatcaataggatctctgaatcttcattaaaattttagaattttttttataactaacaaaatttaactttaacaaaatacggaacaatagcaatatatataattacttttagtcatacaaatatataataatatataaataattatgattaatttaataaaaaaacatttatgtaaaattttttttctcttttttaactttacttacaacaataaaaattatttatcaaatatatagataatatatattctttttcatataatataataattgttagattatatgaataagaattataaaaattgaaatgtttgagttgttagtttattaggtttttttcttggacaaattaacttattaagtgttagtttgacaatttaacatgttctaacatataatcatacataaaaaacaatcactaaattatgtataatttttttaaggaaattatgtatagcttaaactaaaatatcttttgaatttatactaaaaatatatatgatatcttaaaagtcttattacactataaaatcttacttttagtcacaacaaaatttgtgattaaaagttaaaaaaaaaatgtgactaattataaaatataatccctatattgtgactaaaaagtctatgactaaaggtattagttacaaaaattacaatttgtcctgactaaatgtatttttagtcacaatatttattgtcactaaacctaatttagtgacaacttgtacttatatactatgctttaatcacaagtaacttttttgctttaatcacaagtaactttttgtttaatcacaagtaactttttgttgtgatcacaagtaactttttgttgtgactaaaaatcacatttaatcacaaaaaatttatattctgactaaaaagctatcactaaagataattttttttgtagtgtgatcttttgttgataagcaactttcacatttgtgactcagcccatttttcttcgagtaggtctaacaatttttgtaacaactctttttttttattctgatcgtagaattcacgcctctgagtcgagatgtttacttccctcaactcaatgttataacattgcttcaccgttaattgatctcctttaacaataccaatttcagattcagttgggaatttcatagacatatgttttatagaacttccttcccccattctggttaatgtagggtggcccatgctcatattgtataccgaggataaatccaccacaaagaattcctgcatctgagtaatcaacagtagagaatctcccattattaatggaagtttaattgtcccatggctcgacactatcccctgtgagtccacatgaattcaccacatggttttaatttgatattttctaaccccatttacctcgagattttcttataaaaaatattaactaagttgccattatcgatcataatccattttattcttttatttacgagctaaacgattatcacaatgagatcaatatgtgagaattgaacatgggatgaatcttgttcgataaatagtataggtggctcctcgagttttgcacgcttaagcaattatacaggcacaaaagttgagttttgattcctcacttgattaatgcaacattttgtgcattgttgctagttcctgcgagatggagccttccaaaaattaacaaaatgtctttgccatcgacaagtggtggctggaaattttaattttgattctggttgttgacttgattttgatcacccccccagttcctcatgtattgttgaaaatatcctcgggaaatgaggctctcaatctgaaattctatttttattgttactaagtgaaattatcaaataatttaaatatggaattgtagtaaaattatatgaacataatttatctctggtctttcagacacaaaatctgactgaacaaaaatatactgcagaaagtaaaat

SEQ ID NO: 36763 - DNA, 4167 bp, Cannabis sativa
acatacttgtgagtagatctaggatcctggtaaaataatttccaacaatgaaacactacttctagtagctttaaggatagctaatgctgtaaatgataaaaccatacattgttttagtgattcataattgattctaaatcaagtgcatggtgaacattaagcaaagggagatgaaatggaaaaaaaactttgaaaaagtttggaaaacttgagaaaatttgatctttgcaaaattgaacaagtaccaagagaacaaaattccaatgctgatgctatggcaaaattggcatcgtagtatgaatatgatgacctcaacttggtgccaattgaaatgttaaaagaataaagcattttagagatggaagaacgagatgtagaaatgattgatgcaagtccaacttggatgacgcccatatgaattatctcttaaatggtcaacttccatcaaacaaagacgataccaagatacactattgtagaaagaaagctataccaaagagtaaattcaatgcctccactacgatgtgtattacaaacaaaagctgagaacattataaaggaaatccatgagggtttttatggtgaccttgctggttggcaatgtttgtcaaagaacataatctgacaaggctattattggccaaccatcaacaaagacacacatgagtttgtaaagaaatacgataaattccaaagattctcacaaataccaagaattccttcaatagaagttcacatgatggccttgccctatccatttgaaatttgggagatagatataatcggggtcattaccaacagggtgaggaggtgaaaatatgcagttgttgcagttgacttattcaccaaatggactgaagttgaacctttagtttcgattacatcaaataaagtcttggacattgtgatcaaaaatattatatgttagttttacatacccatatagatagtgccagataataaaactcagtctgatagcgatttgttcattgattttgcgagcggaataaaaccataaaaaaaattcacctgtctcgtgaccacaggaaaatggactagttaaagcagtcaataaaaccctaaaaggcgctattaataagaagctcggcgcattgaaaggaagatgagttgatgaattaccacacaagtactttgggctcatcgaacaactaaaaggactgtaatggaacatactcctttctcgctggtatttggcttagaagcaatgcttcctatgaaattcaatatctcgccccatagacgagagttttacgatcaggataaaaactaaaaattacttgaagattctatggactttctcgatgaaagacgcgacgagccacgaatgcaaaatgttgcatatcaacagaggatcacaagaaacttcaataaaagaattagagaaagactttttaatattggagatttggtatattgcggcaagtatttgctaatacacgagatcttatgacagagtgtctaatccaaattggaaaatttcatatgtaataaaggttgtaattgttagtctggccaaatggcttactggtaaaaaatattttgaacaacgaggatttacgaccatattaccaatagcattttcatttatgttaattctttcaaaaaattatgtaaatttgggttttcattaaatgaattttgagtcattcactttgacaagtaatcataaagttttattttaaaattatttaggaacatataaatattaatcaactagacttcacaactatgtcatttaacggatatgaaagtcaaatatgatgatataaggctaaaaattacgtaagttttgttatgttcaaactataaaaacaaatattgtttgggtttcagaaaaaaaaagcaaatattgtttttttaagtagttgttctgattatttagactctaataagtaattaaagtcttattgcttattggttgggcgttaaccttgattactagtaattaaagtcatagacgtgccttttctagtttagttgaaataatgcctccttcaaatgtttttatacaatgatcaatatgtaacctgtcattaatgattgaatttttattagaggcagtacttgttttttacataaatgatttaactaaaggcatagataagtcaattttcaaaaagataaataaataaataaaaaagcataaatatctaaattaacctccataacactggatagtaaaaaagcaagctttgtgaaccccttcattccctgtgtctttagtatcagttttattatattgtgatttattgagtgcttactaattcaagcagatactcacatattttatatttcgattgtttatagtttcctcaaatatactcgccctatttctatgttctccgaattccttacaacaacattctatacgaatatttttcttgggcttttctcctattataatttatatatcatcattttctatagctgtgtaaaataattatttatgtatgttttgttagtgttcttttagatctaaattccttgaagctaaaatgttgtgttgctaacgagtacggaagaatttcaacacaatttttgtatttgctaaccgaccaagataaagtcgtgttatgttctatctaattattctatattttggaaaattttctttttcttctttttttttttttttttctttctctttctcaaagttgcatatatgtaagataatattctcctattactaagatatttgtttgcaaagagttgacttaagagggaaaaacttaattataatactagacataaaccaaatacaagtaaaactctattacttaatacatatacataattaatattttatatatatggctatgtatacatgtaaactaatccaacaccacgaacacgaagcttgatgtgcacattataaataattaagaccgcatttggaggaaagtcagcatacttagaaaactaattaagtttttaattttaaacaaatatttacttgccactttaggataggcacacgaaaaatgaatcatactatagtcatataaagtaatcatgtgacattttataccatatttttctattactgattagagttttatgtattttttttaacaaattatttgcaacttgtttttaaggattgttaaatttctttgcttgcatcacaaaagtttgaccttttttgggagacatgcacataattcgcgcaacaatcgtgttcacaagaatatacagaaagattcaaagtagttccccactcagaaagtatctgattaatttattattatttccagctatatgtaggttcacaataatagagttttattccaaggtactgttgtataataatagaggtagaagctggttatgttgatatttggaagatatgtattactaaaaccaagatgagatcatgtgctttggaattttgctataagatctctatcgtgataagtaataattgcatcttaattagtttgacaagagaatctattttaataatatattagggttattagtattgtatctgataattactatttaaattagtccaacttaaaattcccacaaaaaaaatatatatatactatacttgagaaaaatagtaagataaggaaaaactaatcaataataatccacttatatctaccacattaaaatgtttaatattaggatctctttgcaggtacaattatttaattatcaaaatatatctttcttatattaaattagtaaatattctacgtttcgccgtaaatgtttaaaatatttttaattatataaaaaataaattatattttaattaatgataattaattaataaaattatatttaaatttggagaattgtcatgtatttttttatttagttttataattcattttgagattatggtgttttcatttttataaataaataaaaaaattaattataaaagtataaatgaagctcttaaaattttaacctaattaatttttaatataacttttatttgaataatatatatgagaagttattatactaaatttttaatattaatgataaaataataacacgaagataaataaattaataattaactttttttttttatatatattgaaatttattttataatactgataattctccctttacaaattcattacttctatttctaagtgctttggcatgttgtgttaattt

SEQ ID NO: 36764 - DNA, 3610 bp, Cannabis sativa
  modified_base (2749)..(2749): a, c, t, g, unknown or other
  modified_base (3061)..(3064): a, c, t, g, unknown or other
ttttatgacacccacatagccaacggttttaggaaccgttgggaaatagtataaaagacagttataaaccgttgggaaaaactaattttgtagtagtgaattaaacttttattattataattcatctataattatttatacaaaatttaatatataatcactaaaaatattaatatataataattaaaattaaaaaataacatttaaaattatataaataaataaaaatttaaaaaaatggacacaccttcatcttcgattattattattatgtaataatcgaagatataaggcatgcccttcgcaatttcgacaattaggttcacctatcttcaattattttgtactaaccgaagatatagttccctttacgttttcggtgttttcgaaacatacatcttcgcttcaattgtttttagcagcgagtattttaaaaaccgataataaatgagcttaaaaaccaaatttaaagcctatattaatttgtagtagtgttgctctaacaaaattataataagtgagactttcgtttgtcacattatttaattagatttatatttgtaaccattacaaattgaataaagacatgcatgattgaaatcactacaattgtgggggcataacatgatttaacatccaaaaataaaatacagaaatctaaatatgtacaattgaatgtgtggggcaatttgcaaggttggcaaatcgtattggtagggctgtaacacattaatgatatacatgtagaacaaattttggtttatatagtatccaaatttatatatagagaacatcatataatatccacaataatactaaaaatttaacaagtagaagtagccagtgacatttcattttcatcttatatatatatacatatatataaatatttattgtacaagtctccataggattctactttgtacacgatcgagtcaaccccagtagaagtaattaactgaatagagttaatttaattaattgaatattattgggagagaagttgtattgtaatctgggagacaaaaagctagctagaatgcctgaagaagccaattagctttaatcgagtgttttttgatctcctcaaaatgtttttgaagagcgttcctttttttttttattgagtgggagaagattaggaaggcttgctagctccttctcgtaatcctcagtttaatcattgatatttggtaccgtttctttcactctttttaatatttttattatctctttttggttatatataattgcctttatttattactttcctagttgggtttcttctactttgaatctttcattgatataaattatgggttctcttttctccacattggtgcaagagaaagccttattaaagaaagaccaaagaaaccatgtactctcccatcctttttcttttcttaattctctcaatatcttttgttttcctaatttaaatagttatctctcttataaaataatataaaattatataaagtagatgaaaaaaaataagaagaaaaaaatgaaaagagaaagaaaaagtgtaaaaatttctcagttgtttattctaatggggtgaactcctatttatacaaatacaagagtgaaatattaagaaactaagataaagagaaactaaaaaaaaaatgttaattacaattaataataataaataaaaaatttagacatccacataattattaatatctataccaatctcttattattattaattctgtacaaaagtctaaaaaaaaaagtcttgtacaaaagaggaggaaagcagcgcagagactacgtagattaacaaattagatgcttaaaaatgataacatagtattttttaaaagtactaaaattcttcacatcacttaaatatttaatattttatttttggcttattagttctaaaaatactctaataacaagctattatggttccacttattattatttattatattatttattttagttattgtctcactaaattttaaaaatcatatattaatataaataaaacatgatttaaggtactctaaacattttgacaataataaatgttacactaaattaaagaataacttgtaaaatatcataattataattaaacaatataacataaaatttaagttaaataaaatttaaaattaacacataaaataacataattaaatctaattatgtcataattaagaattatgacatatatttaaaaaaatgctaattaaatctactataattagtaagaaatataattataatattgaattgtagaagaaaatgcatgaaaatttatgaagaaaaattggtatgagaaataaatgattgtttgtgattattatagggataatcagctaattttcaaaaaaaaaaaaaaagaagtgagtatttacgaggagaaaagaacaaaaagaaaaatcggtaaaataattaaataattaataaagtttaaattgaatttatatatggttttttcataaaaaaaaatattgcaaaatgtagtagagtttacttttatacaacataaataattaatgaaaaaaatatgagattaaaaaataattaaattttaaaatatgagaaaaaaataataaataaatttaataaaacttgtaataataagttttgccagaaaagtcaccgataccgaaaaagtcactggcatcgaaaaaattgtcagaaaagttattgtcgccgaaaaagtcatcatcaccagaaaaatcactgaaaaagtcaccagaagtagatgtctcagatntaaataaaaatagaaccggttctaaaaataatgaataaaaacaaataactaaaaccagttataataaaaattaaacttgttctgtaagataatgaataaaaaataaataacacaaaataactcaaactacttataatgatgatagaatcagattcataacagtgttataataaataaaaacaaataacacgaaataactcaaatcagttataactaaaatagaaccggttgtataacacaataaatacaaacaagtaacacacaataactcaaatcgattacattaaaaaaaatcagttcctaaaacactgnnnnataaattaaaaacaaaactagttccacaacaaaatatctcataacacataatacctcatcaaatggttataatttttttcttaaaaaaaagtagggattaatttcaaaaaatattgcggcataaatatgaaaagaaccggttttacaacaaaataaataaacacaaataataacacacaataatccaaatataatataaaaaaatctggtcatatcaactagtcaaaaatttgagacaaaaaaactggttctgtaaaacaactaaattaaaaaatcacaacacaaaaatcagttaaataaaattactcatacaaaaatacccattcaacatgctccaactcaccaaataattacacccataccatatctaccctaaaaatatgcattcattatgttatataactagttctattttagttataaccagtttgagttatttagtgttattaatttatttttattcatattataatactgttatagaaccgattatattttaattataactggtttaaatttttttgtgttatttagatcggaagagcg

SEQ ID NO: 36765 - DNA, 4002 bp, Cannabis sativa
aaaaaaaaaaaaaaccttctagtatacaacacatcaaattaaggaatgctcaaatttgtgtggatgtataaatgtgtaatcacatataacttctcgttttgttatatgtattgttgtcagtgacggtgttagtaacttatgatttttttggtgagtggagtaacattttattaggcatctaccaaaataagtcaaggacttacataaactcagataaccctagctacgaaactcttgccacatcaagaaagagaatcaatttggcaaggttacaaacaattacataaaagaaacttgaaaaccttaagattagtacaaatatcaaaaatgtcttgcaaaacaatcttgaattccgcgtagcagaactctttcttatttaggagcttagcaactctttggcagtctatctcaacctcaacaccgttgtaactaagcttatagcaaagctgcataccattaagaaccgccatggcttctgcaattagtggagacaacgcacaagcagtcggggtgacagcaaaagccaaatagcccccaagatgatcgtgaataactacaccataatcaagcttcccatcagactcaaggatgtcggcgtcaacattaagcttcaatcgactcgctagtggaaaggacatgttagacccttagtttacttcacttatgctatgggaagtaaaaggtctcactaaaaataaaatatctcactagaattaatttggagaagtaaaaggtccttagtatatttattgtgtttttattgttggcttttagtttggcttggtaagtgtgtgaatgcaatacatataagtgtgtgctgagtggtatagtgggtatgcttgaactggttgtttgtttcaacatcaataagagaggcccaggctctccaaacctgtagagttttgattgtgtgaaccatatttcatcaatacaagtttttccttcatcgtctattttcactactgaaacacatattattcctattactattatattatactgttgtatttttcaatatccaggcagcaacagtttggttcatatcaattggtattgaagtactaattttggtgaatggtgtcgacgagaatggagaccgtgaatgtcgagatttcaggcatgaaagaacatctaaaatcccatgatcatagcttggtcgtgattacagaacaactaaaaatgttgatgaatggtcaagctcatatcactaatgaactcgctagcatccatgaagctattaggacttctcaaacccctgttcggcgtaatgctagtgagaactcatcaactccaagtacaactgggttcggtatacacgagaacaaagatggggaagacgataagaattctaagctcaaaaaattgaactgcccatgtgtttaagggctgacccagacaaccagacgtatagaactgatcgttattttggcctacgacggttgtcgatagcataacagcttgaagctattgtgttgtgtttgaaaggagcagctctgcattggtttcaatgggagaactcatgacaacctatacaaacttgggaagagttaaaagtcttgctcatttgacgattttgtccagcgcacgaagggactatttacgattgtttccttcatctccggaaagattcaaccgaccaagaattttgtagacaattcgagagtttggccgcttctgtcagaacgattggagacgttatgttggaatcgactttccttacagggcttcaaatggagatccaaggcccattatgaattctaaagcccactgggcttgtccaaactgcagaacttgttgaaattatagaagccaatcagactttagtgagatctcatcatcgatttgagtctgggaagttgggatccactagggcccgaaccgttagtacatcacaaatggatgctaccaaggtaacttcttctagaaaaatagtggggtattgcataatgaatgagatggagatgaaagaaaagaaatatcgaggagtatgtttcatgtgcgatcagaagtggcatcatggtcatgagtgtaaagccgatgaactacaaattattcttattcaagcagagcctgaatctcgtgaagaaaatcccatcgaagaaggtttgggtattttcccttcacccacgactgaagcactaattgagatcttcttaaattcagctgtgggattgacttctcctaaaactatgaagttattgggtagcatccaagattaagaagtagcggtatcgactgacagtggtgccacccataattttatcactactgagcttgtttctaaattggctatccccacttcaaccaccgaatcctatggggtccagatggggtcggtacaagtaataaagggagaatgtatttatcatggtgtgcgcttagtgatgcaaggtttggagataattgatgagttttcgcccttaacgttgggcagcactgatgttatccttagaattcaatggttagagacattaggaggcacgtatcaccattggaaggatcacattatgaagctaattaccttggggaaaaaattttacactacgtggtgatcctacactacatagaattcaagtatctctcaagactatgatcaaagtcattcaacaagagaagtaaggggtttgggcgagttgggcagtacagttgtaacagggttgcaccaataattactagctcctatttcaaagtttgcaaacttatgctctagtttttaaatcaccaacgggcctccctcctagtcacaaccatgatcacgccataattcttcgtactaggacatctttgattagtgattacccatatcggtacccccaatcggtaaagatgaaattgagagtttagtcggagatatgttggctgttgtcattttttcagtcaagcaccaaccctttttctagcccagtattacttgtaaaaaaaatatggttgttggtgcttttgtgttgattaccaagctcttaataaggtgatagtggttaataaatttcaattctatttattgatgagcttcttgacgagctccatgggtccaccgtgttttaaaagttggatttaagatcgggatatcaccagattcatgttcgtacaaaagatgtttataagacagcctttcgcactcatgaaggtcattacaagtttatggtgatgtcgtttcgattgactaatgcaccagctaccttctaggcactcatgaatgaaaattttaggccttttcttcgtcattttgtgctggtattctttgatgatatccttatttatagtcctgatgaagctactcatgttgaacatctcgatattgtgttgcaaactctttccaggcatcagttatatgctaatatgaagaagtgttgctttgctcggcaatagttggaatacttggggcacataatttcatctgaagatgtggtagttgactcgtctaaagtccaagtcatgctagattggatgctaccttgaaccatcaatgaacttcagggatttttgggcctcactggttattaccggaagtttatggctgggtatggcaccattgctcacctctcactaatcaactcaaggaggatcactttagttggactgatgctgctacaaaatcattcaatgctcttaagacagctatgacaaaggtatcgctccttgctctcctaaacttttctaaaacttttatggtagaaacagatactttcagttatagaatcgagattgttttgatggaagaagggcctcccatagcctatttcagtcaggctttgaagttccgcactcaactcaaatatatctacaaaaaagaacttatggttattgtccttgctattttgaagtggtgtccttactttttgggtcgaaggtttgtggtgcgtaaggattagaacagcctcaagtttttattggaacaacttctggtgacacttgacaatcataagtggctggtgaagttgttgttggagtatattttaccaggatctatatttactaacaagtatgtttttaacattttaa

SEQ ID NO: 36766 - DNA, 6235 bp, Cannabis sativa
  modified_base (6132)..(6134): a, c, t, g, unknown or other
ccaccaaaatatgaggttggatggttttttgcaagtaaattgatagttgagggggttttgccacaaatttttatactaaaaatataatataagaacaatattcaaacaatttatcttacatccggataaaagaattaagtgtacaataaattgtttgaaacacatttttggtatgttaaatttttctaaatttctcaaaatatgacaaaattccttaaataattacaacatacaggagtgtaaaaaatgaattaaattttttttcggatgtcaaaataaataagggtgtatcgatatattcttttctaagataaaaataaataaagctattaaatacataatataataaaataataaaaaagaaaagaaaagaaaatgtagttgttacagtatacgacatatatgtcgtttattgtagcaaacacaacaaaatgaagaggaatataatatttttacttaccattaacaaggctaatatagaggtttatatacaatgagtcttaagtcagtcaaaataataaaagattaaagctaataacaaccttttaactgtatttcaactaactttcctaatcgaatagttagttaactaactgttctcaataacccccctcaaacacaaggtagaagagcttttaactttgagtttatctctaagaagagaaaatctggagttggggatagccttggttaaataatcagctatttagtacatgcctaacctcaagagccttgttcaaaaccttttctcttccaaaatagagatccaatttaatatgcttagtttgaagtattagatttgttgttagtaacacagtgctaagattatcatactatactactggaacaataggaagagtcacttttaattcactgagtagagatgatccaaaagatctctattgtcacttgcaagacttcgaaactcggcttgagtcaaagacctcaatactgtttgttgattcttggattcccaagcaattagactttacttcatcagtagcccaaatagcatcacaaaactccaccagctcgagagcacttgattttttaatgtgaaggccatagtccgttgttcttgataagtatttgagtattctcttcactgcaaaccagtgagattggagggaattttgcatgaattggcacactttattaacactataggctatctctggtcgagtgctattaaatattgtaaccctccaacaacaggcctgtaaaaattgagcattttcgactcgatcacttccttatgctaataatgtaagaacagaggtcatgggggtggaattaggcttggcatattgcattttttctctgagaagtaagtctttcaggtactttgtttatgagagatgcaagccttgatcagtgtggaggacttcaattccaaggaaatacttgatttcacctacgtcttttagagaaaaaaatattgtgaagatcataaattaatgttgttatgagagaatgacaattgtctatgacaagaatttcatccacatagatgagaatggttgttgtggaccaaggtgatgtttaatagagagagattgatcagctctagacgattgaaaacaaaatgagattagaaatgaggctagtttgtaaaatcaggctcttggtgcctgtttgaggccatagatggccttgaaaagtttgtaaaatgcttgaggttgagatggatcttcaaagccaggtggttgttgcatatatacttccttagtgagttccccattcgtaaggcattgctaacatcaagctgatgaactttcgaagatttggacaaggccaaagttagagcaattcttatggttccgaatttgactataggactgaaggtttcaaagtagtcgaatccatgttgttagtggtaccattttgccactaatcgagccttaaacttgctaccaatgggggtgcaaccttcaagtagaggaaaaaatgtgtaagtcttgtttctttttagggcactcatagctgagttccactttgcatcaagtaatgcttctgcaactttgataggcacaatagttgtcataaagattttgggttttataatgccattcttagacctggtgagcacgagatgctggttatgtatggctagaatagaccctagctagagctattataggatcatttaagactgcagcatgtgtgggaatgtcactggaagcagttgttgcagtagatggtgcagcatcagttgcaatatctggaggaacattggtacatgtatgcaaagaaggagaaacactagaggaactagtgctggtattagtggtagacatattattatgttggtcatttgacagatgatgaaatattgtatctagagaatgagggaagagggggaggtgagggaatatttaagggagatgtagttggaattgaagactctgttgaggcagaagagagagaaggcatgaaggaataagtgttgaatggataaatatattcattgaatgtgacatatctagacaaatagattctcccatcataacttaagtatttatagcccttatgaactagattgtagcctaggaatgtgcaaagtggacctgaaatctagtttcatttattgtagggtcagagattagggtaacaagcaaaactaaagacttttagagaggtgtaatcaagttctttgtggaatagaatctaaaagggagaatatggaccaagttttggggaaggtagtctgttgataagatatgcagctattctaaagcccttatccaaatattttaagggcatatgtgcatgagcaagaagagagaggccaatctcagctatgtgtctgtattttcttttcacaacatcgttttgttcatgtgtgtgagggcaagattgaaaatggaggatacaacactactcaaaatattatcaaagggtttaaaatcacctccacagtcagattgcatatcttttataggtaaattaaactaaagttccacctgcttttcgaatatttgaaaagttgggaaagcctcagatttggttttgagtagatatagctaggtatacctaatgtatgcatctataaaggtaatataatagttattttcattctaggaagtgtgagggccatggccccataaatcaatgtaaatcatttacaatggttgagtataaactgtttttgagttaggaaagggaagtttgtgagattttcccaaacaacatgcatgacaaaagtcaaaaatagttttatttcttaaaggaacattacccaatgatattattttttgtacaattgtagtggttgggtgtcccaacctactatgccaaagttgaagattagaaggtacattttgatcagaaagaaaagcaacaatattgaaggggaaggaacttggtgaagactgtccagatgaagatggagcatacagatcactgatttgagtgtggtcaaacacataaatgtcatttttaagcttgccaagtagaaggatcttcttggatacatggtctttcacaaaacaggtgttagggtagaattcaaagaagacattattatcatgggcgaattgagaaacactcataaagttcttagtgattgttggaatgcaacaaatttttatgtattagagatttagaatgaaacgaggaattgaatgcagaatgatcaatgctagtatgaaaacctaaaccatttccaaccatgacctgttcttcaccaatatattttgagctacttgccaagatctaagcatctggtgtgagatgattcgtggcaccaaaatcacggaaccaatttgagtcttggactgtgttaggtgtggctatcaaggcttgtagaggtgctccagtagaggaattcgaaggaggagtattaaacgatgttggtccaagaaatgacttgtcaaacttgtagtagcattgaagagcaacatgacctaactttgggcacaatagacaaataggtctttgttgttgttgctagggttggtttgttcatcttccacgtctagggtggcctctgcctccatgattatttgagccatcacgagaagtgttatatgagccttgagtttgttgtccattgaagggggatttccactatagcttcctcgattgtttgaaaaacttcctcttccattgtgagcaagattggcttctgtataggatatgtcaagattagggctgagcacttttaccgagcttgacccgaacctggccaacctgcccgaacccgacccgactaacccaaaaatttaaagaatccccttcaattcgggtgagtcgggttcaacccggtacacctttcaggcgggtttcgagtttaatttttcaagtgaccgagtttcaggtaggacctcaaataataataaaagtttgtactctacatacattggacttcaaatataataatattttctattcttaaaaaaattacacaatacaatataaatacacttcttctatgtgttgaaagtttatatgtatatatgtctcattaaatttaatggttttgttatatatttatatataatatgtaagcatttaggtttagttatatgtttatttataattaggtatgtttatagataattaggaaagtgttaaaaaaaattttaaccgagttgatcgggtcaacctgttgacccgcccaaccctaacccgccaaccgtgaacccaaaactcggcaacctgcaacacgtaaataggccaagttcgggtacaatttttttttaacccgaatcatatgaacgcaaaacctgtcaacttgaaacccgtggtcaacccgcccaatatttagtcctagtcaagatcctttatacctttgtcaatacgtgcttcttgagccatgagaagagcttcaagctcagcaatggtgaatttttctttatgtatgttgtaggaggtgtagaagatgtcatatttaggtccatgaccattgaaaatggcctccacatgattagctatagagaacgaatggctaatggcatttagcagatccacaattgattttattttcagtaagtaattgctgatggaggaagcatttttcttagtattataaagttgagtcttgaattaacttatcttagagtttgtttgatttgtgaagaattcttaaagcgcgatcaaggcattcgtggaggtctcatgcccgatcatgtgtatattcatttggtcatcatttatggaggaaagtatccatgaaagaaggagttgatcttgtacttcccattctatgtaattttgagaaattatattgcttgtacgattagcttcagtctcgtacttgggatcaaggagtagagttaggttcaaagaattgttggagatgatgaccatgaacgacagtgagaatttgatgtttccatgacaagaaattgttttcatcgagtttggaggaaatgcttgaacgaaataaattctctgtaatttgtatctctgtaactaaagatgatctagacattgttgaaagaagtacgggacaaagagaagcaaaaaatggtgatgacgaagtacgaggacaaagatcaaggacagatcagaggttttctagcactgatgccatgttgacacataaacaaaaatggagaaaatgattttgcttacaattaacaaggctaatacagtagttcatagacaatagctcagtcaaaatagtaaaagactaaagctaataaccttctaattgtatttttaactaacttttctaactgaataattagttaattaactgttctcaataattgtttatgagtatgagaacttactgttgttgctgatcacatgtggagcttaagcatgttaaatcaatcaaatcaaacatgggtatgttttaattttttttatatagttttaattactaggggtgttcacggattggtttgctctggattttcataattttcgaaccaaacaagtataacggtttttgaatattggaaaccaaaccatatcaataaatttcttaaaccaaaccaaactaaattattaagaacgatttggtttggttcgaaaccacggtttaagtggaatttataattattcatattttttaagtaattgtactatttttactaaatttttaattttatttttcaaaatatgtatttaacatgataagtaataactctataacctataaataacaatataaaaatattnnnaaaagtcaaacataacataaaaaaatcaaaattcataaaataaaaaacttgacacacaaaaaaagtttaaaattatacatatagtcatatataaaatatat

SEQ ID NO: 36767 - DNA, 6962 bp, Cannabis sativa
cagtgactaattcagggaagagtatacagtctagtgtaagagggtggttacctaagccaacgaatcatcttcacatagttgaatttgcagcaaacttcattgtcccaaaagattttggttgccctggtgctgttcttgttaccaatcttcatggaaaagagttttatttgttagagattgttattcgtggttttgatggaggccccatattctttcttgccaatacttggatccattcacggaatgataatccagagagtagaatcatcttcaaaaatcaagtaaaaaaacaaataaaaattcaaactttctttgctttagtttcttgatgtatagataagtatgatttttttgggctcgtaataatgacaatcttggtgaacaacaggcctacttaccttcacaaacaccagcagggcttaaggacctcagacgtgaagacttgctgagcattagaggcaatgggaaaggccagagaaagctccatgataggatttatgactatgatgtttacaatgatttgggtaagcctgaaaacaaagatcttgctcggccagtcattggtggggagaagagaccatatcccaggaggtgtagaacaggcaggcctcctagcaaatcaggtatatacattgtattttctttagtataaataagattaacttcttaatcttggtggtttgtgattgtaattggattcgaacagatcctctatccgagactcgaatcgagaagcctcatccagtttatgtaccaagagatgaaacatttgaagagattaagcagaacactttctcagctggaagattaaaagctttgcttcataatcttataccatctatagctgcatcactttctagttcagatatctctttcaactgttttactgatattgataagctatacaacgatggattcttcttgaaagatgaggaccaaaatgaagtcagtttcacgtttccagttatgggaaagttcatgaaacaggtcatgagtgttcaagaaaggttgttcaaatatgatgtccctgctgttattagaagtaagtaataatcttccgtacttcctaatgtaatgcttgtcaagtgatcttaagaccatatatgaccactttaactttctttcttcaggagacagattttcatggttgcgagataacgagttcgctcgccagtgtttagctggggttaatcctgtgagcattgagcttttgaaggtaattaatatctagttctaatgaattttgctaaattagtttagtttgaatgattttctgagaatcctcatgatcaactccaggagtttcccattctcagtaaactagaccctgctaaattcggtgccccggaatctgccatcacaaaggaacttctagagcaagaacttggtggaatgagtgttgaaaaggtactgatatttgtacatattgctatggttatgtagtataattaagaaaaatagagaatcatctcttttctgttctacctttaatgttgttatatttttcgcaggcgattgaggataagaagctgttcatacttgactaccatgacatgcttttgccatttatagagaggatgaactctttgcccgggaggaaagcttatgcctctaggacagttttcttctatacaaagtctggtgttctgaagccattagttattgagctttcacttccaccatcttcttcttcccttgaaagtaacaagactgtttacacacatgggcatgatgccacaacgcattggatttggaagcttgcgaaagctcatgtttgctccaacgatgctggagttcatcaattagtaaatcactggtaaatatggctgatgaaatattacattgtgttatgtccaaagaagtttagatgtgtttaattctagtctgctcttgtgtttgtttattaaaggttgaggactcatgcttgtatggagccttatattattgcaactcataggcagctgagctcaatgcaccctgtttatgtactccttcatcctcacatgcgctacacactggaaattaatgctctcgccaggcaaagcttgatcaatggaggaggaataatcgaggcgagtttcagtcctggtaagtatgccatggagctgagttcagcagcatacgaaagccaatggcggtttgacatggaagcacttccagccgatcttcttcgcaggtgagcttaattttcttgcatcttaaaatctaatttctttcaaaccttttaaaaatttggtgtataacattgaaaatcttcaggggtatggctgtggaggacccctccatgccttgtggtgtcaaacttgtcattgaagattacccttatgctgcagacggtcttttggtatggtctgccattaaagaatgggtggaatcttacgttgaacatcattatgttgagccaaactctgtaagaactgatgttgagctccaagcctggtgggatgagatcaagaacaagggtcattatgataagagaaacgagccatggtggcctaaacttgagaccaaacaagacttgtctggtgtgcttaccacaattatttggatagcatcgggtcagcatgcagctattaactttggacagtacccttttggagggtatgtccctaaccgccccacgcttctaagaaagctcattccacacgaagacgacactgattatgagaagtttatgttaaatccgcagcgcactttcctgtcttctttgccaacccaacttcaagccaccaaagtaatggcagtccaagacactctctcaactcactcagcagatgaagagtacttgggtcaagtcaatccacttcatacacattggacaaatgatcaaataattctcaagatattcagtaaatactctgctgaattagaggagatagataagattattaacaaaagaaacaaagataatcgcctaaagaacagaagtggcgccggagttcccccatacgagttgcttcttcctacctctggtccaggggtaaccggacgtggaattcctaatagtatctccatctgaagccacaatttagcttcttcaataacattaatagtacgttgtagtgataatgttgattgttgcacaactttttttgatcatttaccttttcaaatatacagatatatctcttctatataatttgatgaaatgctttataatctgaagcacaatacatcggaagctcattgatcgtgtgaccctctaataagggaattgtagaatagctttaagattttagttggagagactatatctctaaagtacaataagagaatgtagcatcaagaacaaattataacttcgaagtgggaggtgatgatgatgatgcaagtttgattaaattcctccttaacacctttccctgtgcattccttggtattgaatcaatgaacctcaactttcttatcctcttgtacggagcaacctacagccatttgtacgtgtgcaaaactaagataaagcttgtataagctcaatacagaaaaaatttcatttaccttttccttgatgtagtccatgattagtgactcatcagcagcacttccagggcgtttgaccacaaaggccataggaagttgaccagcttcgtcgtcagggtacctgtgttttttaaatttagaattagaaacatgattatgttgaatcattccattagttactaataacaactaattatgaaacacttacggaacaacagctgcatcaattacatctggatgtgaatgaagcagatgctccaattcagctggggcaacctgataaaagtacacacatgaagacacaaaatggtttcttttttgatggaaaattactaattaatgagacccatttgtattattatcgttaatttatagagacaaaaacctgatagcccttgtatttgattaattctttaagtcgatctacaataaagagatagccttcattgtcaatgtaacaaaggtctccagttttgagccatccttctggatccacaactgcagcggttgcttcattgtctccaacataacctatataaatatatgtaatagcgtagaagttgagtgaagtgatcaactaaatgccaaaatatatgaatagattaggttcgagcagagtccttctcagaagcaacattgatgatacgtacccttcattacaaatggccctttaagccaaagctctccagttgttaatggaggtagaccaatggcagtcccattttcagggtccacaattttggctatgaaattcgacacaagctttcccgttgctccttctactctgctctctttcaatcccactgttgcaaacactcgcccagttgactccgttagcccatatgcctttaccacataaacaatatatacacatgagtgtatgttgggtttgatgacataattggaccagcaatgatcaacacatgccatataaacaaaactctttgatatttaacattcaacgtattatcgagttttatataatttaatatataattttgacacaatataatttaccaatagtgatacttctagaaagtattgttagtgcctaatagcgatgcttttaaagcactcccaatatcttctctactctattttttaaaatacattaccaaaattttacatttactattttacaccataaaatacatcacaaaaattcaatttttttttaaaaaaatttattatattttattcatttaaaatatatagtattaatatatacacatataacaaaaataattattaaaatccaaaacaattaataaaatatgtttagagcaatgaataatattctataaatgtaaaaaacaaataatgtattttaaaaaaactttaaaaaaaaaaagaatttagagcatatgctgtagcgtgttttttagtacaattctttaaatttctctatttgctcttaatatagtggtagcaacagaaaggtataaagtatttataccgcaaatactgattaagtatgccatatttaatagagttttttttaaccataagaaaaaaattattaaatattaaatatttattgaaaattgatgatatatcaacaaaaatcatttatatttgaacataattaacttcattactataatcatttattccaaacaaaaactttacaactaaaacgagcagaattgtaatactaagtggttaaaaaaaaaaagaattttaataataagaattaaattgtaataattttttttatatatataattttttttccttttgttagttatgtaaaaaaaatatactttttaataaatattaaataatttaattataaaaaataagcaagttacaaatttcaaataacataaaataatattttatttaaaaagaaacataaattaatattttaaattatttgttttacctggaccaattggacgttgggcaactgtttgctcaactgttcaataatacttctgggcagcggagcgccgccacaagcaatggcttcaagagagctcaaatcatagccctccctttcaatctcacgcttcacgacagctgcaactaccggcggagccaatgccacatggctcaccctcagccctccgatcgttctcaacatatggttcagatcaaaccttcctgtccccatcgtcactaacgtgtcaccttgtccaattgtcctcaagcagtaagcgaacccgtacacgtgaaagaaaggaacacaacacaacacaatcgccggcgccgctctatcccgccgatcagataatgctccggccaccaccgatatccaattacggtgagtcaactccactcctttgactaaccccgtggtccccgacgagtaaagaatcgtagccgtatccgactggttcacctcaactcgccgtaactcaccgatctcactcgtcatcatggattcgaactcgtccgagtcgattaatacggtgtctaatcggagagaggataccttccctgcggtttctgcggtggcgaatgcgaccatcggtttacatagctgaatttggcgggaaatctcagccgtcgtgctggctggattggccggagaaacaacgacgccgagagagagcaaggagtagtagagaatcggaatatggagcgagttaggagagagaacgaaggcggtgtctccggaggagatcccgagacgagtttggagagagaaagctaaggtccgtactcgtcgtgtgaaatcggtgaagagaatgcggcgaccgttggcggcgtcgatgagagctggagtggaagacggcggaggatgcgaggagtggaggtgggagaagaggtaatcgacgatggaaaacggcgtcgtttcgggtggtagtgagatgttgggtctgagactgtggtaggttctagtctctgaacagaacccgcttttcgggtctatggccggaaccgggttcgggtttgggttttgggagcccatgtttaaatggctcaaaggcagcagcacgttaagctttggtgagaatttggtggactgatggaaaatacacctgtctctcaataaggttagaaaaaagtagttataaattccaactattttgaccttattaggtcatttttttttttgataatgactttattaggtctttttgatttggaaaaattaaaacaatttggggaattttagtaggatggtagttacagataagtacataacaaaaacaaattacatggatggatggagtgtggataacaatgggaatactttctacgtgtttataactcccaattcacacaccacctcctcttaatttgtaggttagactatagtgccagcaaaatcaattatatagaggttaattaggatttttattttttaaattttaatatgtattaaattataattttaaatttttttggctaataaaaatttttctttaactattgagattattagatttaaatacttttgtttaatttcattcaattttactatttattgtttatgtactaaacaatattcctcaaactttgatatctatcaa

SEQ ID NO: 36768 - DNA, 8243 bp, Cannabis sativa
  modified_base (7453)..(7454): a, c, t, g, unknown or other
tctctctctctctctaaaacattactcaaaataacttctatgttaggtcaatgatgctctgaaggttaatggaaaatgcccaaatgtattatcgatgcttggagacttagaattgaagaatgatgattgggtcaaggcaaaagagactttgcgcgctgctagtgaagcaacagcggggaaggattcctatgatacactttctctggttcgtatgttatccagagtatacatatctgagatttcttactgtctcatggaatacctacctttgtgaagacacatgaaacctttttgatattctagtagttaatcaagcatttatcttcaactcacaagtgccttttggaatttgtagggaaactggaactactttgcagcagttcgtaatgagaaaagaaatcctaagttggaagctacacatttagaaaaagctaaggaactttacactaaggtaagtgagcatttattttctttctcgtgtatattttctatcctcatttctttccatgcattcaatattatttcttcagtgatcaagaacatcctttgtttgagttcaggttggagggatttttttttttaatattatatatcattgtgaacagaccacacgatcatgtgtatttagcactcaacttttatttacttgtaggttctggctcaacattctgccaatttgtatgctgccaatggtgctggagtggtatatgcagaaaagggtcactttgatgtttcaaaagatattttcacccaggtaaactatttttatgcatattttccatgttaaagggccttgctaatcatagttggaaaagtatgattcaagttttacttctgttacagtatttttatatgtaaattcaagaagcggctagtgtgacaattttttttgggctcgcgtgtataattttccatggttaagggccctggttttgaaatgtgtgatttcaagttttacttctgctacagtattacttatgtctttaattattttaggttcaagaagctgcaagtggaagcatttttgttcagatgccagatgtctggataaatatagcacatgtttattttgctcagggaaatttttcgttggctgtaaaaatggtcagtttgttgcatcatattttagtatgcatctttatgttgttttttactttgtacgttttagtgattgcgtgtcatgccacttcttgcagtatcagaattgcctgaggaagtttttttataacacagactctcagattcttctctatttagctcgcactcactatgaagctgaacagtggcaagactgcaaaaagacacttctgagagccattcatttggcaccttcaaattacgcactgaggtttgatgcgggtgttgtaatgcagaaattctctgccctgacactacaaaaagaaaagagaacggcagatgaggttgcctttctttttctctctgtttttagttgctcatgcttttacttttgtttccgctacatgcctagcctgatttcattaagcaccaagtgtatttaaacagaaaagataattggtcaaacagaattctttcatctctactatgatctggtgttcaacatgtactttgcatgtcatatcatcatattatggtgtgtgagaagtgctttacatacaatgattttaagatgttatgtcattatattttggtaggaacattttgagcaggatagttttttagcagaagaaattctgaaatttgtgcagcagtgagcaaattcacatttttacaatttatgatgcctcaatactggtttcatatttcttataatttggaagtaagattagatgcttgaaattttgtagtgataggctcactgaacttgctactatatgtacctaaagaatcatattgctaatcttttctttgagatgtttggggctgtgactccatcaactagtttattatatatttggccttatgtttattggagctcagctttatttccgtctcttttcttttgtgaaattacaggtgcgcctaacagtttcagagcttggaaatgctgttcgtgtatttaaacagttgtctgcttctgctgcttcaaaccttcacttttatgggttcgatgaaaagaaaattgacactcatgttgagtactgtaagcacttacttgaagctgcaagagttcacctaaaaaatgctgaacatgaagaacagaaaaaccggcataaacaagaagctcttcgacaaatggcattggctgaggaagcccgtcgcaaggctgaagaacaaaggaaatttcaggtttgctgatcatgtttcgtatatattatatatatatatatatatatcgcagtaaagatatatttagtagtcaaaattttaacacgttactgatacctctgtgtgggtagttggaaaggagaatgcgagaggatgagctaaagcaggtgaggcaacaggaggagcattttgaacgagtaaaggtaaatgttctgatttatattaccaacatgcttaagaagcttaatatactccaagatatgtcatctcttgagttactaaagtagctggcttgcaaattttttttctcaaccttagacactagaacaaattacgtttgcttgtttcattacaagaaattggaaggtataatgaaaagatacctgcttgtgtgagggagcacttgacattttttccagggacagatcatagatcatagttgatctagggaaatcatagatcttggatttctgttcttttaatatatgaaaaactaacttaaaagttgaatgaaatacttgtaaacattggcaacaattttttctttctaaacttatgcatatactttgtcaatcttcaggaacaatggaagagcagcacatcttctaagcgaagggatagaacagaggtcgatgatgaggagggtggtcatagtgagaagaaaaggagaaagggtggaaagaggagaaagaaggacaagagctcaaggtcacgttatgaagcagatgatgcagaagcagagatggtggatgatcaggaagaaccagagtatgatgacaccaaagtgaattatggggagcctgctcagacaaatgaccatgaggattatgcagaagaaaacgcccacgatcctcttgcagcagcagggctagaagattctgatgctgaggaagaggtgaaaaactttttctctgctttcagcttttaacaaaatgttttttgggtacataagccagtcttacttttctgggcggaattagactggtcctatgctgagttgatgactgtgccagtctaaaacaccttgcctctgtctgataaaatgcatatttttttttcccttcattatttctgattttttttactgtaaaggttgcacctaattcaaacgcaagtcggcggaggcgggcatggtcggagtctgatgatgacgggcaattagagagaccagagatgcaggggagtgatggtgagatcaaagaagatgataaggttggggaagaaggtgaaattaacgacgaggattgagatctgccatcttgaactacacaaggccattaacaaacctatctaaggtggaagactttccttgtaaactgttacattgttaatagttgctcttttgtattagttcatttatttaaatactcctttttgtaactttgaaactcatattttaatagaaacaacattcactttagcagtgtatggctcatatcaagttttgtctccttaaagagttcttcagagtccatagtttttccattgagacgaccaaatggcctagcaaattatttcatcttccttaacgtaagatgctcatgctgtagtatcctaaattactaatggcacttttcttagctattaaaacaaaacaataataaatggaaataattactataattacaggaaagtttcctgcccataaaaagtgttgcatttttcctttgttttttgttggacaaagtcttgggtggtgatgtaggacaggagaaccagataaggagtctgcctactgagactgactagtgcggaagccttttaaacctgtaaagagtaaagactctgaattgtgatgtgtgaagtgtgaagattgacagcactgctttcctctttttggattaatgcaaccacagagtgacccactcactcactcccaccaccaccatcagatgcagcacaagcatttggacttgtcttctttttgtcagaacttctcttactctatttggcttggcttttgctcagagacaataattatttcaagaatatctacttaacttaaaaacacggtcactttggctacctttttttcactcttataagtctctctctctatatctctccttttatttatttttaagtaaagaagttaaaaccgttctattctctctttattaattggctattacactacttcaggttacgtcaaaatcaaatgcatattcccatgtaacaactaacaaatgttggaggaatttccgtgtgaagtgatttttgttttaataaagtatatcctttgatcatctttaatttatcaaagaaaagaaagcagaaacttatgaaaggatttgatatatgatgagggattttcacgggcttccgtacaagccagtacttggaataatgatcttttgagttgcattttttttttctttttagttcaaattgagttgcattttctgcctgttatcttttgagtttggaccacggtagaagaacatgtgatgtggagtcatttttaagctacttgaatgcaccccaaacaaaaaagaagtttctctacaactctatcttcaagctaacttaaaaaataagaaataataacaaaaaaaaaaattgttagtaatgtttaaggcataaatttcacttatgatttgtccatttcgtaaaacatttacacaggattgtagagtttcttaaccttcctcaaataagaatagtaccttattcaccctcaaaaaaataaaagtacatatgattaataatgtggaggtggtcacattttttactattgaaagttgtatcattagttaccacacactataaataataataataataataataatatatatgagtaaagatgaactaaagtctaaagctgttgaatggatctagcaattgtctccaacaaagggatttgtttggtgctgtgtctctttgcctcaatgttgtatggaaagtgaagagtaaacaagcaattaatgtcattttgatatagtttgatggggcaacaacttttatttgactctttacaaacattagtttaggtgagtcagacgttacaaaatggagtccaaaatggggtccttaagttgtggttataaaagagtctacactacacaataaacttatgaacatcaaaggtagaataaaccaagtcatgttagacagatataaaatagtacggtcgactcattgcagtcaaagtatgaagtaagacaatagagccaaagccaaataaaataaaaataaatgtagagaaacattggattctttgttaaacatacattgtccaattcaagccctgttcattcaactaaacaaaaaaaaaaaaaaaaaaaaggagagaccaatgtccctaacctcacacaaaaaaacagtaccaccagttaagtacaactttggcttttttcttttttttttttctttctttctctgaaacccagtaagatgaaaactcaatcacctgcattgcaaaacaaaaaacaaaacaaaacaaaatgaatttgtagccatgattcccaactgggccatcaaaagaagattagtaataaagacaaaccaaataaaagtaagtgaaaattaaccaattaatgttttggtaaagaaacatattgagatgagttaccattatgagttctacaagtattgaagatgggaaagtcatatgaagaggtgggaatcgaaattgaaagctgggtagtggagacagatccactgtttgatgatttgtcatccaactctagccatgatgaatccttttcttttacaggccattcatcaatgaagtgaatggttttctgtgttgcttcttttctctccattttcacatcatttctcctcaaatcacaatgattagaactctgaagctgcaaataagaatgctcactttgtaaaccagagcaactcctctgtttagaagaagaagaagaacaactcattgttagtggtgtgagttgccaactctcatccatagataaatctcttacatgagttcttgaaggttcttctgaaaagaatgaatgctcatcaacctcatctttaagcccataaacatacctgctttttctttccaacaaggaaagcaatcaatcacagtcacaacccaaaagaaactactttaaacaaaaaagttgagtttgttattattattattttttttgcatagacaaaccttaagtctgcattagagtaagacccagagtcgaatagcaatgatgtgttgctatcttgtgatgacaaaccaattccattaggccttgaagaagaagatgaactgtggttataaacactaaaaggctgttgttgatgatcaagatgggggttatgataagggtgaagatggcggttttgggattcagatggaagtgatgtcagtgaagaaagtgaattattagacagattcttgtttgatgagacaagtgttgatggatttgagagattggagtttgtcccagttgttttcaaaacttccacaggctttcttgaacggttttttcctctatgcatgtgcctttcacaatattttgaatcaggaaaagcttctttagaacatctccattttttgccatctgttcttctgcacctccctggctcagggtctatctttcttcctaaccccatttggaaacagttccacccaactaattcaccataaacaaaattcaaaaagaatcaaaacccattaaccctttcagcactttttatctaaaaatgtaataaagagaaaaaaaaagagagaaatgaaggtaagttaccattaccatgttgagaatggtgagggaaaagctttgaaggtagtactgctgtagagtccaagtaacttcttttaagggtgaagagaagatcaggtgggatgggaattcctgaaaccatatacttaaagattagagcttggtgttcaagctcttgccattgagatgcagtgaagggaaacctggtctttccactcatcatccttagctacaaacagaaattaaaactaaactccaaccaaaagaaaacttgtttcagacttaaaacagtgcagtaaaagaaagaaagagatagagagagagagacagtttcagagttcagataaaaataagtgtatcagaagatgtgttttgtgggagtgaatttattagtagagatggcttttggagtagagtaggtatatttatttcagggaccatggagctgcagaatcttctgtacacggataaaactaatggttctgattatagtgctgctgcatgccacctctctctctctctctctnnctctctctctctttctctctctgctcatattgtgactgcacctctctgatgcttctgcttctgcagactgcacctaagctgcctctgtggcagctcttgtctctgacatctctacggaaacccataaactataaagcaaaagtgaataaactaatatttttttttcaaaatcaaaagagaaaaagacatgatttttataaaaatattatttaaaaaaaaaaagaaaaagaaaaaaaattattacatatttataactagaagtgtttgagttggtgtctgaagccaatgtggctattctgatcttaagatgaggtttgtgtacggttttgggcttttactacttactactaactcttttactttttctgttccatacctcagttccttcccaatagctcccacttacatttttgacctttttcaatttgggaaatttagaaaatgtgactcagagcaggtgtgttttttcaggtttttactgataagcctgaaactggacccccccaacataccctaaaaccttaccttctttttacatcttcatttattgcatttacctttatattttaaaaataatacccaaaaaaaaaaaaatatattgattagggtaaatggttgtttagttgattaaatgggattagttgttattgttgatcttctatcttaaatattaaactgtactgtaaattttatcatatcttttattagtacaaaacatttaaccatgtggtatatcatgatatgattgttcatctcttgggcttgggtttatgcctttgaaaaggcatt

SEQ ID NO: 36769 - DNA, 6974 bp, Cannabis sativa
tgtaataaacaattaaaataaagatttatgacaacataggaattcaatgttaattatgagactgatttatgacatttcctcttatatattcaacctaaatcggtctcataattaatatttatatactctaattgcacgtatgtttattgaaaaaaaaataaacaatgaacaataaaatcaaggttgtgtttggaagaaatgaaagtataaatctctaaaatcatattacagttccaacaaacaggtatttatttatttttttatcagatttagtttcttacatattcattttattatctattcttttgcctttgtgggtctgaaataatagtaattttatatgaacatccaaagtatttgttctatatactttgttatgatttcattgatttatttatttcagccttttttattctattttttttttaatcttcattgtttagttagaatcaaggtataaacttgtccaaaaaagacgatgagtccaaagtacaatcaattcttattcaaattgttgaattgatagaagattaagataaagtttcactatactttgttatgatttatcataaattattttttcaggataactactatataaatatgtatatattgagattcacgtgctttttattattgataacaatgtacatatcataagtttatagatacaattatattttacttatcaaatatactaaaacagtatatttttataaaacaaatcgttcaaataatcatattattttagttatcaaaatctaaaaaaaaaaaacctcaaataaaactaacagacccggtaagtaacatccatctagtaaaagtatattactcttgtagttttcaatcaaatttttataaaaaaagaaaattactaaaaagtcatatttctcacatgtacaaatctatcaaataagttaaaattgtaaaatgccatctttgtgctatcctttatcgaaatatatggtaataataagtatatttttacgaattatcctaaaaaagctattttcttttaggaaaaccataataatatgagtttctcttaaaagtactactgttttctttcgaatttcgatgctaggtacaagttgattggaagggagcccacttacgaagcccaattaaggcccaaatctacttagaccagcctgtaatcgacacgtgtctctttctaaaccagcgattcgttctagcctctgattatggatcgtgttgacagaaaataagttattgtattatattagcagaaggaatcatgaacaaaagattctatgttcaataccgaaactaccctctaattcctttccacaactccacaatcccaacgcctaatttggtaatttcaacttccaaatggatgacgataaaagtaaaaccacaaaatattcgttatatgtacccttaattaaacacgtgcgaataaagagctaacccttcaccggaagccatagccacagaccttgaaactccctaatgctctcgattcaaatcgagccccttctttgttcgatcaatatacgcttttccgggaaaatttcgaacccggaaggaaagtagagaggagagtgagggaaagttttgacaggaagaagaatgcattctctgagtcttaaagtttttgctgatttcaacggtaaggtgactgcggcgaggtgtatgccgtcgggtcgaggcagatatggcgtctcgggattggatttcagaacgagaaggtttgtttacggaagcggagattcgaattggaggagttgtaggattacggcgagttcttcagagagggatgctaataatggcggaggaagaagtcggagttcgagctcgagctcgaattcgagtactgattctagctcgtttctttctagaagccaaacttatgctctgttgaagcagaaaatggaagttgctgcaaaatctgaggtcagttttcgggtttcttctctttttattagcatttaatcggcgccaatcagacattcagagagcaatataaataattcactatatattgtgagttataggattatgaagaggctgcgaggattcgtgactcgttgaagttattcgaagaagaggagccggttttgcgactaagaaggttgattaaggaagcagttgtagatgaaaggttcgaggtaaagcgccttcttgttttgaaaagcttatccttgtaggaatcaaattgttggtttctacttattgatttggtttattttgaatcagaatagtaatttttatattgttgattgtgccattactctcatttccctttcttcttatgagcgaaaatgttatgctaataataatagggatatcttagctttttcaaaaaccagtttttaggtaccaattctgggattaaggggaatcaagaagcttaaaagatgtaaaaaccttaaagtttcttgccataaaacaatcattgtgggaaaagacgaataatttagagtaaaatggggaaaagctaggatgctttgtaactttcaattatggccattcgaaaggcttggacctgatatgttaagtttctatgagtctgactgcgtgcactgttactactaaaccaatacattaaagacaatgtttcactgccagtaaaacatgctttggtgcttgtgtttttgcatctatgcagtgttgatgaaaaatttcggagaggcttgaggagaattagaaggatagagattgttgctaagttgttttgctgttggtgaggatccaaaacagttgtgagatgatgccctttattgtttgcttggtttcttttcttaactaatttgtcttctcctcttgacttttggtcatgctcaactattcagtccttcatttttcttgttagttttggtatattgctttattgagttcagaaatcattgtactgcataatgcatagaaatttctgacatttcaaacttgttctcaggatgcagctaattatcgtgacgagctgagagaaattgcaccccactctcttttgaaatgttcaagtgatgcaacaaccttggtactgtttcagattaatgcttctaccattcattagatctttattagtatttcactctttttttttaaaataatataaacattattttcggattttagtttcaatatttgaatttttcttagtttgtgaaatatttttcaagaagatatatatatttatgcttttggatgttggagcaagtcaaagtgatgtttgttttctaatgaattactcctataattagacttgataatcttctaatataagtgatcagattatttcatcaatggttaatattaaatttgaaacctatgatttttcagggaatcagggttcaagtgaggagtgtgtatattgagggccggagtcaaccttcaaagggtcgctatttctttgcatacagaatacgaataaccaataactcagaacgccctgtccaacttcttagaagacattggatcataactgatgcccatggaaaaactgagaatgtctggttagttatttcttttttcatgccatctgctattaatgtcgtgtatttttcagcttctagtttccaggtatcaaattctctacacccagtgaaattgttatctggctaattgcagggggactggtgttattggtgagcaaccagttatacttcctcaaaccagttttgaatactcatctgcttgcccattatgcactgccaatggcagaatggtaagatgattattaattatatttttattacaaatttttcccaaggagccatctgaagtcataatttaatgtttcagcttcttgtctgcttagcttagtaaaatcttgaaagatatattgcttatataatagctgtatgaaagaacatggtgaagttgaaaaaaatagattgtgtcatgtttttagagatgaagttgattaaattggtcctgattatatgagcacaaaactattgaatacattaaaatttgaggtttcacgtaaaaagtagggctagactatagaacattagtaaagtagtctactataaaaaaaatggtacaaatcaagtaataacataatagtggtacagtaaatggttgtatatctaattaatatttatttgactttattcctttttttttttacaaagatgatgtccttgatattttgatgctttctaatttttttttcattaattcttttcaatgaaaaataaatttgtttgagttatttcaatgtaggaaggtgatttcgagatgaaacacattgataagacaggctcacaatcctttaacgtggctattgccccattttccctttctatacttggggatgatgatgatagtttttaagaagtgaatgactaaatggccccacgaatctcttttgtaaattttgttcgaaaagagcagataaaactagttctgccctatatataattatacaaatttactagagtacatattcgattacttgttggtctaaatgaagaaaataattgaaacattatgctaaactcagggaaagtatttttgtgaagagactgtatagcttttgtgaatttcttcagtagtgtgattgatattataattcaatagcttagagctctcgcaatagtggagctctaggcgcattgttattagccactaatgatacgtgaataatagtcttgtgaatgattaagagtttcacataataattattaaataaaatatgtaaaatttgatatttaattacaccaataataatatgattttgtaatggtgtcttttaacataattcttggtaaactctatgtttcaaaataattacttaaattgttaaatattatgtattatatattttttacattaaattttttataatttttattatatacattgtttaaataatattatatatttttttttaatttttttagagaattaaagatgagaggaagagaataaataattaatttaattatatatatttttttttttaaaaaaaaacatatattattgataaagttaggcaatatgggcactttacgcgttaatttaattttttttagtacgaaaataaaaatataattccaaataatagtaaaattatattatttaattccatattattaatttgtattatatatgaaaatacaaaatggtaagtctatcgagataggaataaacattttggaagcttatcatagagtcatagcagaaaaagacaacaagctcaactcacatgttgaacaacaagctcaactcacatgtccaggagagaatggtcatctatcactctctcttcttcgtttcttttcttcttcgtcgtttcttcttgtctcatctgatttattttgcctaaatctacttcatctcgtcccttcttggttcattttcttcgtgcttcgtggtgtctctggtattagtgtcttgtttgtctgggatttttttaagtgttttctgtcctgagttctttctcctagttcatgttccccttgggtgcttactggtgggtgtgtgtttttgttttgtctctcttctagttttgcttgagtttcttggttggtggggttgggttgtatctcttcttgtttggttctctctcgtcttgttgtggggttggatgtttgggtgcatttatggaggttgttaaggctgacaataggggaaaatgcttgtcatttaatgaagctactgtagagttggccccatgtgcctcttctgttcatgcattaacttccttatgtctgtttgggaaagtcgttgctccaaggtttgtgggggaagctgttgttaaagagcttgtgacctaagtttggcataaacctgcttctgtgactgtactattggatgaatccaatacccacacttgtattaagtttggttttgagaatgtagaggataggagatgggtcttagataacggctcatggtgtgtaaaaggatataacttggattctccaggattgggttcaaagtttgtcgggagctagctgtggagtaatacccttttgggttcagttacatcatcttcctcatgagtttttcttggttgcaaatggtacggagcttggtgctcgtgctagttcagtggtgaaggtttgagttggatgaagataacccagccagctggtcgaactggtttagagtcttaattgatgttgatattgacaagcctctttttaggatgcttcatcaatgcctcgattggtgctaaaaatggatacaatttaaatatgagaaccttggggtattttacttttattatggtcggttaagacatcaacggaggggttgttccttgacttttcctgacttggtgatgaatacagatggtgttccttttccgttatttggcccttggctggtttcgacatcgacttacaaggattgcttctctgggaattctaaacaagttgaccatggccttactcgtcgggttctacgcttgtcttctccgaccaaggtggaagcaaaggttgtttctctttgtgagaaatccttaggtcacagtcaggcaggcgatacttcgagtaaaggcctgttttcaagaagaccaaagatggtgactggaggtcctcgagcaatgggagggaaacactgcaaggccatttggatccccaaaatttttgaagccacgcctagggttggggatgccatttcagttaatgtttccagtaaacgttttgatgtgcatggaaagggtactgctcacgtacctactttggatggtgacaatttgaatttgggagggtgtagtcgtgtctccggtgaggggcctgaggaggggttcgttctatattgggtgggcccgaggaagaagatggtattgctttaattaatgggcctagggcttcgggttgtgctggtggtgggtcaggtccattaatgttgaaggttgggagagttgggtcggtgggtgtgtttttgactaattctggtgggcctaagggatgtgatccaaaacttagttttggtgggtgtcgtggacagaagcatttaactgtttgtgattgtgttgggcctaattagagggg

SEQ ID NO: 36770 - DNA, 3171 bp, Cannabis sativa
attttaaaaaatacaagattcattttgtcatttaacaaaatagaaggtttaattagtaacttttataaaatacaaggtccaaaatagtatttacccgtaataatataataaattaattaaaaaagaaacataatataagtgaaggaaattttgcaaccaattttataagactgatcataaaattttgcaaaggaaaagaaaaacaaaaataaaatacaaatattataaaactctacaagactacaaccaattaagaacattgttactaggtgtcggacaacacactaatatgtaatgtattataaataattaataatttactatattatttattaaatcaaactatataagaactaatattaaattatacaacttatcattttttttttcatcttacacttgtctgatttatactgaaaagacatacagctttgcccggttttgttttaattccaatattgtccctatttctgtcttgttcccttttctcaataaaaaaatgaattatattaatgtacacttttttttttcttcttgaaagaggttatataaatacactttacaacgttacagaatgtcaccaaactccaaactgtcatatatattacctagcacccttgatttttgggggataaaatatttatataactaataacagtcaacatgatctggtgtcctatcttatcctattcattctccttcactttctcactttttttttgtttgtttgtatttttgtgtttattaataaaatactttacagtattcttttaattagttaataatgggttttgagcctcccttaacactaaacaaaaaaactaattattaaatagtaatctagctataatttaagcacactgagagccacctttgattttattatattttataagcaattttacaaaattatgtataatttaagctgtactacacacatttttaaaacaacaacaacaacaacaacaacaataattataataataataataaaataactatcacactaatatacactatttgaatagtattcaactaacttatcttcacaaaaaagtactcttaatcttcacatttcaactagaactaactaactattaactttctatattgaaatgaatagaaaaattaatgagcttatttattattattattatggttcaaggttcaaagtattgttaccaataagtgtggtgtggtcataatttattagtttctgcgcgcgagaacaataatatgaattgacaagccatcttacatttcatttctagttaaatataattttgattaaaaaaaatctatgtaatttatgcaatcagtaaaactaacaaaaacacaaaaaaaaaaaaaatccctaaaacaaacaaacaaacaaatataaaactaaaactaaaacacacaaaataactcatcatactctagtcaaatttattgatattttggaaagatgtttaattaacaccataattaatataagcatatataagtacttaaatggagtctaataattattctttttcaatttaatgtccaattacgccgattttgtagtccaatatatgatatttatatcttaaaatattaaatataaatattagtaatttcaaatatatatttttgttttgtaaggtattaatttcaaatattgaattgtcaaaatttatcaaacttataaatcatgaattgataacacactgaataaatatcaaacgttgtaaattaaatattggctaccttaattttaaaaataaataaataaatattggctgacataccaagtatttacacataaaaattatttatggacaactacaacacccttaaagtagataatgaatgttctccaatagtctactaagttagcaaattttattgaaaaaacaacacattattcccaaccaaaaaaatgctaattaatattatatattgtttggtgactagccaaccctatattgtaatagttagatattatatatactatataaactagggaatattcagtatttaatgctcataagaaagaagagtataaaatattcaatgcaagatttaataaataaaatagaagcatattgaaaatgttttgtaaatacatatgaaatgaataaatagatataatatatatatttatataacaggtaataaataatatgttaatagtatacagtagtgttagtggtccaattaataataaataagtccaaaaataattagatgagatgagatgagatgagatgagagaagagaagagtgcaatttcaacatgtagccaaaatctttaatatcagccttcaaatctgcatttgattggggagaatctgtttttgatctttcataaaatatcagacttagaaatcttacctgaaaattttctttaatagttatttcatttctattacacttacaggtcatgaataaagacaagtgtacgtatacgttcgattgtttatatctatattatttatatgattttttttaggtgagaacattgatgttactctcataatcaaagattaaatgtcataatataccttcacttatgacagcaaaagtgatgctctcaacattgtatgttttttttttttttggaagaaatcatttatatagttcaacttgatttgtatattgttatccttttttacctttaattttggtatatatatgggaaatttgtctaaacatacatatattagagtaaaaaaataataaactagataaaagtttgtaaaaattagtaaggtgagcctatttttgtatatacccagtactcttcttattcaaaaaaccttcccagtcgctcggtctctatttttctctcgctcgttctctcttccccgatcgcgactccccaccaaacgacaccacgtcgagccaccaagcacccaacccagaccccattctcacctaaacgaaaagccaccttgtagacctccgagatccataacgtttgtaatgactgcttagctttcttttaaaagatatagcttatattcagaggtaggcttttaattactatttttgcaattatggagatatatttgaattctaggtgtttaattatgataagtatgaaattttatgattttcatatgttatgcccgataacggtggaatgcaacgtttggcctatagagttacttagtaatggtttagtactttataaatagtggg

SEQ ID NO: 36771 - DNA, 4388 bp, Cannabis sativa
ttttgtagattgtattgataatttggtgaagaagcaagaatcagaaaggcttgtgtatgggattctttaccgttgttactcaaacaataaggttgaagatgaagtgaagcaaaaaagtggtggtgtttctcaagtgtctttgaggtctaaggttgagaaagagtctacagttggtacttatgtttctgatgatgatgacttacttggtgataataagtggaaggttgagcttgcttggatcactaaagctcttgaaccagctcttcagttgtgtagatgggctctcccaacaacaggtttgtttatgtctagcttatgattcacttacttcttttactttcaaggttgataattaagaaatcaatgtgtgtttgtgatgcaaatttgaatgattcaatgtatagtcttttttctgaaggggagatgattgcgaaatcttttcttggacaagaatgtatttacttactcatttgaatatatgttagaatggataaagataagataatgaagaatgctttgcttttttgtactttgtttcttctataattgtgttgatcaggtttctttatgtctagcttttgattcatttactatgttcttttacattcaaggttgagaataaagaaatcaatgtttgtttgtaatgcaaatttgaatgattcaatgtagtctttttcatggggatgatgatagtgaaatcttttcttggacttgattgtgttctctttctcgtttattggataatgaataaagttttgattcttctaagttatgattcatttactttgttcttgtactttcaaggttgagaattaagaaattaatgtctgttgttgtgtgtgtgtgtgtgtgtgatgcaaattgaataattcaatgtagtctttttcttagttagaagatgatagtgatatcttttcttggacaagaattcgtgtacttactcatttgtaatgaagaaagaatcacggtggagaaaagtttgaatatgaattagattagataaagataagattaggaataaagtttttgtttttctgtattttgtttcttctataattgtgttgaccaggtttgtttatgtctagttttattgttcatttactttgttctttcactttcaaagatttagaattaagaaatcaatgtgtgtgtttgtgatgcaaatttgaatgattcaatgtatagtctttttctatggggaagatgattgtgaagtcttttcttggacaagaatatgtttacttactcatcatgatgaataaaagtttgaatggataaagatgagataatgaataaagttttgctattctatatgttgtttcttctattgctgtgttgatcaggtttggttatgtcttacttatgattcatttactctgttttttatcaatgtagaagagaactaagaaatcaatgtctgtgtgtgtgtaatgcagatttgaatgactcagtgtagtatttttcttatttagaaaagagaagatcataggtgaaatcttttcttgggcaagaatgtgtttacttactcattttttatggagtaagaatcatgatggaataaaatagtgaataaagttttgttttttctgtattaacggaagtctgaaatttcttctcaattgtgtacataaaaaagtaaatgcatacggtcatgacagatttaaacaaggactcaatgttagattgtattgtttgtgtttcttcatcataaatgcatggttatgctgaagagtcaatttattatcaaagttgcaggaaatgatgttggaaatcgatccccacctagtgctcgatcggtttcggagatcatttcaagcattcaacggagtaagattggtattcaggattggactttgagcgatcttactgttggcttgtatcttttataccttcgtcaagcatcaataaatcccattaaagatgttaaaggcattcagatatcttcagattccactgtatttactacaccttttcattattattgagtcttaatcttcaagatctgtgtgatccttatcaggtttcagttttggtgttttgttttaggtccatgaccttatttaccacaccgaattagcaaaaggtgcttataaggataacgctaccagtctcgcaaggcatagcatgcttcgggaaagcaatgtgttgaaatttgttaagaattctagtgttatgaggcccgggtattatataggggtggacactcgtaagaaacttgtgattcttggaattcgcggaactcatacagtctacgaccttatcaccgatatcgtctcttcaagtgatagtgaagttacatttgaaggctattcaactcactttggcacagctgaagctgctcgttggtttctcaatcacgagatggaaaccataaaacagtgcttggcgaaatatgaggtgatgaatatttcaatttctttctttttcggttttatgttaaagcattggttattagtttttaagttgtttttgtagtgaacctgactcactaacagggatttaggttaaggctagtggggcattcacttggtggtgctatagcttctttactagcaataatgattcgaaagaagtcgcttaaggatctgggttttagccccgacaatgttaccgctattggttatgcaacaccaccatgtgtctcgaaagaacttgctgaaaactgctctgatttcgtttcaactgtggtaatgcaggtgagaaattgcattttaacatcggtcattttgtatttctgttcttatttctctctcgtgttttactcccctgcaggatgatataatcccgaggttaagcatagcttctcttactcggttgaggaacgagattcttgatactgattggtaagtaaacttctcctagacatttggaaagagctatgagattgtaatggttaagaaattttataatttgtttcttctttaattttttcggtattcaaaggacgagtgtagttgagaaggaagattggagaagcctcatagatttggttgcaaatgccaagcaagtggtgtcatcagtgcaagatgtagctcgaaaacttgctgactatgcaaagtttagcgggaatgaaaactcgtctggtgagagagcccgccattactcgtgtttctattgaactcaagtgttatctttgccaatttttgctgtcttctcttacagatgttaacgtcaagaaagaaatgcctaagtctccaagagcaacttcaacccccgaaacagaacataaaagacgctctaccagtccatgtccggaggaattgtttgtaccgggttctgtttactacctaaagaggaacttggactctcaatctagaaatggtggagagtttttcacactttggaagagaaacccgggagaacattttcagcgaattgtgctgtcgagcaacttaatatccgaccacaaatgcgatagccattactatgcattaagagatgtgctcaaaggtttacctgggcatgatgattataaaggtattttcagatgaataaaagggtatataagctttgatttctacttgtttgtttgtatgtaattgaattttttttgtaaccaaataaagaaaaagctaaagattataatatagagaaaatgtacaaaccgaaaagttgtgtttttgccattgtaatgtacaattaatcatttttttttggtcatcagttccattgattggtggtgtagttcacagtaattatactatatttgaacactaattatgttgtatttttttgttaagtttgtattaaaaatcttatattcataagttcttctctattaagttacagttcgcaacagaaaatctctatcaaggaagacatagtaactgaaaagcttgtgaaaacagagaaaatctctactgatgtgaacttttattcactatacaatacgatcaaatatgacgtaagaaatagaaagtgtagtctggtatggatgtttcgtaaaagtttcagcataattatgcattgacagaggaaatttgtagagctttgataatttcatacacaaatcattcaccaaaggtaagtttatttggacgagcataaggatgtaaatggggcgggacagaggtggggtgagattgctcccccacactatattctcttcttaaatttacctcatattcaccccaatacccgtttaaattaaagcggggacggggcgaagtttacccgatggtagaaggattcccatcgagtacccattatatatttttgaaaaaaaaaattgatatctcaaatagaattataaaaaaaaatttaaacactcattaaaaagataaacataagtggaataatgtgtataataaatagaagggctattggcggctaaactacctgaacgttaaattttttaacacttaaccacaaaaatcgattttttggag

SEQ ID NO: 36772 - DNA, 8232 bp, Cannabis sativa
aacttccttctggactcaactatcattccacaactctttccgagatgtacaagttagctgtttcgagaacaacatccgaaaaatacttaactttccaggaatgattttagagactttttcattttggagaaactataccacatgtactattgtattaattttgagtctttgaagttgtgttgggaaaaattcaacaaacaccataagatagctaatagcaaggctctattataaaatgagaaataataaaaagtatcaataatatctaacatcattctatctatatggttctagagaatgtcactaattaattgcaatttctttataaaataggaaaagaaaccatagtcttccaactcactctgtctgtggagatttctcttgtcggcaaaagcttatcgtttctattttccatggttatatactataattttatttatctcactcattttatttgtgagcgaatgtttctattggtgtttttggatttttgttggaatattaacttttaagtatgtataatgtatttggggctcctaaggatgtttgtgtatggcttaaagacttcaactagcgagaagagtagctagggtcggtatgccaatagtaaaactcagatgagaatggttaatttcaatcagacattattaatggttattgacagttgcattcttgtgtaaatgggtgcttattcactgtcaactgttagtggaattgggtgtttatgaatagttgaaactgtagtaatataaatttctgttaaagtcatcttttttaatggtatattatgttaaaatgcgcaacaatctattaacatacaataggtaagatattattttattttaaatgggcatttttttctccggcagcttagttgagtcgctgcccaatcacgactacttgtgagtcaacccattattttgtttgtttgtttgttcacattcgaccacactatatatgatttgtaaattgtaacatataataataacttcattatatataaatatatatacttgttgtaattgttgtacatcatctgaaacccaagaaatcaaaacaaaaatcagaggtcaaagtcaaaattagtataatggaagtgaaagctagagctcccgggaaaatcatactctccggtgaacatgcggtggttcacggatccacggcagtcgctgcctccattaatctctacacatatgtcactcttcgctttccgactcctgctggtaaaaaaaactcacctttctttccgtctctctatgtattttgtttgacttagatttgggcgattatggtggagttgaaccaattcaaggtctgggatttgtttggaatgataattggaaccttcccttttgagattagaattaaagcatcaatcttttcatgtcttttgcatattttttggctcgaatatcttgtgtttccttatattttaaaccattaataagaaaaatggttgtcagaaaggtgtcatctattatagctttgtgagaatggtattgaaattttgtgaacttagctatttaggtgaagaatcaataacttctcttttctttttctctttttctgtttttatcttgcctcatctttgttttgaaggtgtaagagtttcttcaaggattgactttcattcgccaccaaaaaaaagatggattgactttcattatgtaattagattcagtaataaattattcacatttcattttaatatagaggtggcaagaagatttttctggccaatagtctaatggtcatgtaatgatagtcgatcatcaacataaaggagccttgtatacaccaaaaacatatacggtagcacttaaaataaggaagtgtaactaagggtgtcacatagttgtaattctcatctcccagtaacaaatgtatagttcattccatttgagcttgttaatggtttcttattaacttgatttgctttcatttcttatgtagacaatgatgataccttgaaactccaactcaaggatttgcatttagagttttcatggccaattggtaaaatcaaagcagcactgtctcagttagatcttcctaattcatcaacgccaacctcttgctcaattgaggccatgaaatcaatcgcagctctagttgaggaacaaaatatcccagaggcaaagatttttcttgcttctggagtatcagcttttctttggctgtatacgtctattcaagggtatgagtccataagtttaatttgtgttgttgaaaattttcttctggtttaaaatttgaaatgattttgtttttttatattgtgtcagatttaagcctgctacagtgattgttacttcagaacttcctcttggttcaggtttaggctcctctgctgcacttagtgttgcattagcagctgttttgcttgccttttcggacttagtaaacatagattttaaccaccaaggatggttaatgtatgcggatgaagaacttgaactactaaacaaatgggcttttgaaggtgaaaagatcatccatggaaggccatctggcattgacaatacagtgagcacttatggtatgtttatttctgagctgccccttctaaaaattgtgttgtttttgctccttctgtcacagtgttacatcgtgataggaatatgaatcacttatctcctaaatttgccatgattggtttacttgaaaaaacttaaaaatatagtctcatcaacgagtgacaggtaagaaaaccaagtatagctagcaagttaccggcagtttgaaacaagaataagaaagagaaccattttgttatttgttggatacaaaattcttccgtttgtatctgtcacatgcatgacaaattgacaattcatatggatgatcacagattcacaatatgatgccttgtgcaacaggtaatatgatccaattcaggtctggtaatttgattcgcatgaagtccaatttgccactcaaaatgctcatcactaacacaaaagttggaaggaacactaaggccctagtagctggtgtctcagagagagccttgagacacccagacgccatgaactttgtctttaatgctgtagattctattagcaaggaactatctgccattattcagtctcctattggtgacgacctgtctgtgacccaaaaggaggagaagatagaagaattgatggaaatgaaccaaggattactccaaagcatgggggtgagtcattcttcaatagaaactgttctacgaacaacattgaaatacaagttagcttccaagttgacaggagctggcggtggaggctgcgttttgacactactaccaaactgtatcctcttttctcttgtttacttggctgatagtatgttttcactgctcatagcagtatgttttgtttaccttgcttatagtatatttttacaactatttttttaatttttttttggatactaatggcttctttgataaaaattatacctagaacttatttgattaaaacaaagggctttgttgtagaaaacagaaaatgaaaagatttccatgcaaagcctacacagttttgatatgtatttcttcatatttcaatatcttgttcttgtttttcaccttaatccgttcatcagtgctatcaggaaaggttgttgacatagtgatgaatgagctcgagtcatgcggattccagtgcttcactgctggaattgggggtaacggtgttgagatttacgtgggtggttcatcctgatttcttaggtggagcgagttcaaagtttcaccatttactaataatttaaagctgcacaatttgctgctgtttatctctgctatctgagttgtatgtacattagtcactttgtagtttcgttttgaatttactttaatcaagctcctttcttatggttccctggctatctgctttataaccaatttaaacaagtgttcaaagcttcgtgttttgtgattcattgtaagagcaaaaggatgaaaaagaagccataaagggatgattgcatgatgtgtactatgtttggttgatcagagtggcagtctcatcttgtgtgtccagatttgaaagatttgagtaaccgcaatcattactaatttttttatgaactttctaagcagaatttaagaatcaccttatcttcatttatttgttttttcatacaccactatatgtatatttacatatatttcacaggcaaggtttacaagctttttagagactcttgaagataagggcactcaggcacactcaccagcataagatagagactctcaaccattcattatagccctgcttgccataaatgcaaaccaaacaatggaaaagagaagaccactataaacatatttggcacacgcatttttagtcgtttaaatctctgtttatttactattagtctattactagtaattaactcaccattagggtggtggaggacttgaccggtcatataagaggagcaggggttacatgcaaggaacacatacgagggtgtaacctcaataggctggccggctcgcttcatgggcacttctgagccaacttagctgtctcattgttgctgaaagaagccagaaccagtggtgtccatcggtccaggagctaccccattaacttgaattcctctgtttaccagctggagagcaagtcctctagtgaacgccagaatggttcctttcgtggctgtgtggtccagtagctctgaatttcccaggtatgctattactgaggtcatattttttctttttttgatggaactactgtggtcgtgttgattatggcactcccttccttcatgtgcttcaaaagcaacaccaaccatagtaagcatatcatccacacctagtgcactatcctcttgagttaaatcatacttaaacaatgttaagttgtttaattgtttctgctaactgtttactcaatcaaatatgtgtcaattctttattgatgaaaccaataaatcattagctgctacctattaatgacaagactaattagaatttttatcctttaaaacttgacatgtgtcaaatcatgctcttaaacttttcaggtcgttaaatttttttctgaatttttgaaattgttgaatttgaaaacttttatcaaaattctatttaattttactaatacggtgattgtccatgtattaaattgtacttctaaatttttatatctatcaaattgtacccccgaacatgatatgtaccaaatcgtgtccttctgaattttaatccacttcagatttttgttagtaaaattagataacaatctcaatagtttgagaagaagttttaactatctaaaaagttcgggagacaaaaatcttaattagcctaataacaaaaaaaaaagtacataattaagacaaatgtaaatattaatggagcaaaatttcctaattatttatgtaaaacgagttcctaatcttgtttaggaggccatgagaaattattagtcctgaaaatcctctcaagtctttcattatcaatgtcatctagggtgctcatcctttgcttcacgttgaaccccagatcagctgcaaccgctttgattccttaagtattcttagtgtctttagggtctttattttcatgacccttcacatatgtgaagttcacggttgccccttccttctacccagagtctccacctgtcaccaatgctatctttccccacatgaatattcatatgggtacttttaacttggtcccattaatatatctacacatatatgattaaaaagttgtattaacaaatgatttttttgagaaaaagttcaaaaaacttgttttcttttatttttgctggataaaaatacttgcttggagtttattataggcctgattatgatggcatgagaactgagtgttaaagaattcaatttagggaatcaaatgttgagctgtccaatgtaagggacaaatgattgagggaagccttatgctgatttgcaatcattgctgcataacaaacttttcgttaggcattattattgtgtatattcctttccacgtgtaatggctgtattggtacattgtaccctctttgtatttccctttctctttaatgaaatgctcttcacctcagtcctttgagctaagttttccaatcaatattatttctctaaatcttcacttggtattagagccttttcaaggcttctgcaaatgtcgaccaaccaaagccagaccagtcaaactacaccagaaaatactggtcacagggaagctccatggcgcatgccagtccttcgatggctgctactcctcttaccccggcgactcccttcaataataccgtgagtcagccattcactatcaaacttgataggagcaatttttccttgtggaaaacgatgatctatactattgttcgaggacatcgattaaaagggtacctcaatggccagaagccgtgtccacctgagtatatctcagtggaaaaagttagtgagaatgaagatacagttatagagcttcaaccgaatccagctctcgaaacttggattgttcatgaccaactattaatgggttggttatatggatctatgaccaaagctattgcatttgaggttatgggatgtaaatctgcttctacactttggatagcacttgaagaactttatggagcacactcaagggctaacatgaatgacttgcgcactaaacttcagaccacgcgaaaaggagctcaatctatgacaaactacctgaaaatgaaaagaatgtggccgattctctagccttggctggagatccatatcctgagagacacttaatagctaatgttttgtttggtgttgatatggtctccattgtgctgttacttgaacatagatctgacttgtcttggaaggagttgcaaggttctttactcagctttgatagtaagcttgagagactaggagttgtctcaccaacaagaaaatctctgagcaatccatctgctaacatggctcagaaaccctctaactccaacaatcgtggaaacttttctggtagaggaagtggctacaacaataaaaacagtcaaggccatggtaactcctcaagaggtggcagcaatcgaaatcgaggaagaggcagatacagtaacaataactcaagaccaacatgtcaactttgtagaaaatttggtcactcaactgcgatttgttactacatgttcaatgacagttacatgggtcagccacctcagaatgacaatactcaataccaggacagaaatgctcatatgacagctcttgttgccactcctcaaacactaaatgatgattcttggtatgctggcaatggcgcaatcaatcatctcacctcaaaacttgacaaagttaacaacaaagctgagtatgatggtaagcaataaatggtcatacgtgatgggagtaaacttgagataaaaacatattggaatcggtactatcaatactacctttgaacctcttgtattgaatgatttacttcatgttccttccattacaaaaaacttaattagtgtctcaagattaaccgtgacaatgatgtttcaattgagttttttcccgatttttgttgtgtgaaggacctaaccatagggaaggaggtgctacaaggaacacctaaagatggtctctaccaacttggctttactttagcaaggtctcatggtctcaaatactccacaaaactcttttctggtgtctctttaaagtcatgtcatcagtctagtctgtctaatgttgtttccctaaaagatacctgacataggcgctaaggtcatccttcttctaatgttttaagtcaagtcttaaagtcatccaatgtacctgttaatatcagtgaaactcacagtttttgtgatacttgctaatttggcaaagcacacttgctgccattttctagatcaactagttgtgcctctgatgttttagacttaattcatactgatttgtggggtgctgcccctgttgcttcacacactaattataggaactacatccattttttggatgattttagtcgatatacatggttgtttccacttaaacaaaagtctgattccttggttgcttttatacagtttaaaaacattgttgaaaatcaattagagagaaaaattaagcagttaagaactgattggggtggtgagtttcaatcattcactcaatcagtcaatgaacacggcaaaaccttgttgaaaattaatttgagaggaaaattaagcagttaagaactgattggggtggtgagtttcaattattcactcaattagtcaatgaaca

SEQ ID NO: 36773 - DNA, 10408 bp, Cannabis sativa
acagtatttttgaaaatattccgtgtgacagtatttttataaaaattaactcaaattccagtatttttgtaagtttcccaaaatttaacatctaatttataattggatcgcaaccggatagacctaaaaatattggatgtagtccaataagaaaaatactttcattttatttgttttaagaaaaaaagtaaaaaaaaaaacaacaattgtaactatgtttagtatctatggggtgaaagatcaatggggatgtagctcagatggtagagcgctcgcttagcatgcgagaggtacggggatcgataccccgcatctccaaaaattcacttttttccgaatgaaattgcggtcgtatggtatggtgtaaaattcttttgatatttcggtgatattttttcactatctttccttttttttttttggtttgttttgagctgatattaatagtacatatttatgaatcagatctgttagttgtgatttgttttaaatataataaatctagacaagctcttggatcgttacaacattgtttttagcgaattgtcgctttagagaacaaggctaggagaggataatatataactaaaatgagtaaagtaaaagaaattaatacatgaccaagatataaatatatatttgttttcatatataataaatatattaacacttgtgagtactaaagggaaggaaagacaacttaaccataaccagttaataccttggtgcattacattatataatatatttctttttttttttttctgatcacgtacccaatagccaaatgctcagagcttaagattcctcattcgcctgcataaaataaataaatatatatatagcaagtcaaattaaagaatgtaggcagtgtatttgtatatatacaaaaatatatacatatagtagataaacatcattaaatatatatattattaacttcacaacccaacacaacacgtactattcttgcattagaaacaaattccctactttgacgtgttgtataacaactactatatcttagagctggagtcttattttgggggaacaaataaaaaataaataaataaaattcaaatccttttatttttagcaattaagatataagccgactaatgcacgaaggtgggtgattgtactagtactttttcgaaatgataatgctgccatttttctttagctggatccggccaagatcagagaaggaatgtgggatatgatttaaaaagaattggatagcctcaattaaagagtagaatatattatataatatatatatatatatatatatatcctcatcaatactcatggtatagcaccgataagtaatatatatataataattaatttatttatacttttattgtgttatgatttccaaactatataggaccatgtgcatgtgatctagaagaagtagggattagatttcatgtgggctttctctacttaggaagttgatcgagtagaataatatatgaatagcaaaaagatacaaaagattttccttttatggttctcatgtcggtatcttaatatgtcacggtcaattttggtcaaatactataattaaggagatagaagagtgtaggggtggcaatttgttacacactatacgtggactagctacgaactccctcccattttatttatttttttaattataataataataaaacggctcaatatatcttaactaaagtagagattattattttatttttatttttatttttaatttgtttcatcgatctgttgttgattttcagatgatgagttttattttatgtatgaacaccggcccatacgtacagaattacaactaatatcgtgcttaatatataagaacaataaataacatgttattatagctaattaatatagcacttaataaattcttatactataatggtacgtacataatgtgggaagctagcaattaagtgatgatggatgagttattaattacctgtgttgatcattattatgatcattaggaaatcctctaaggtggttgcaggcagagacagagcctctgtaattgggtgtagggaattggtcagattcaattttgaggaggtcctgcacaaggatttcgtagtgtctcttgacttcgtctggagtcttcccacccactgctttggccacattttgccatcggtcaggggtgtccttgtcatacacagctaaagccttttcaaattgcttgttttgcttagacgtccaagcatgacagaatgatgatgaccctgcagatgatgacattattattattaatttataagctgtgagtgtggatgtttatatatagtacttcagagaagaaaaagagtgatatatatatatatatatatgtatataagatctaaagggtggtggctagaaaagaaaagttaagagcagagttgggtagctgtctgaatatgataaatggtaagaatataagtaataatgtaagagaagatattattcataagaagtgatatcgatcgatggtttggcaaagtagtgatggctatctatgctccttataagctggaagattatggggcggtggtgttatgagatgatgatccttcagaccaagttggcgaatatttttctttttatggttatacatatgtattgtatatataatatatataacaagatgggattccttttatgtaaaacaaaagacacgagaggactcaggagaaaagaattatattaattaattttattttaactactactgtagtactcttaacagtactaaacagtagctaccctagcttttcacatatatagtttataatttttttttattttttatttatttagcatgtggaaatttatttagagaattttattttttcataggttgataaggttttagatcccaattgtcagtaccattaacgtagatgcgctataacagtatgaacatccactccccacaatatatatatataaatatatatagggatatgattactttcacggaatgtattctatggtacattcgatgggtctcagggtacattaaatgagtgttagggtacgttcttactttttaaccctaattatccctagatcaatctcatccgtcagatcaaataacttcctcatctgacggctgcagtcgtacatcacggattacaatccgtgaaagtacaataacgggacaaaatcatatccgtatatatatatataaatatatttgttatattacgagccacaaacgacgcatgcaaccaagccaagatattctcagttacctaatttacttggaccccggggatattaattatcttcctcccaggccaacttgccataatatacacctcttaattttaaacaagaattaatatgatatcatttcatcttcactagcttgtaatattgcatttaaatggttttattatattataaatcatgttaattttttttttcttttggtaagataaatcaaattatttgttaattcaggggtccggccgtaatgttacgtagtcccatgtaaaaatatttattgcatatgtcaagttagtattcttttttggatctcaatatatagtacttaaattatcctaatatatagtgttcgaaatatcactcaactcaatggctttagtttcaagaaataattaactttccctttccctgaattggttgaagtactacttctgttgtgtactttacagagagaactactatttataattaattgtgtgaatatttaaaactcgatttattgaaagtcatcactgacggtacatacatgcatgtgaaaattttattccgaaagagatcatgatcagatcatgtatcctaagtatatattcatatttaattaataaatatatatataagctgtaatacaattaacataaagaaacgattatcttaatattgctagtgtgcttatatatatatatatatagcataagataattaaattaaattagtgaattggcatgcacaatattagtatctatttggagaagtaacattttacttttatttgttttcattgccttttttggtttgttacttcattcgtttttgttgacattcataaaagatgataaaatggaattcttactcaactacggattgacctgtttgttgtatagaattttttctccattataattgtaagcctttagaattatacattaattatcatatattttttcacattatatatattagtgccacttgcagttcgaacagaatatgaaatagtactgcttttttgttcaaagatgcttacaataagtttttttttttgcaatttttttttcttttaaacattgctttgtcatcacctccgtttaggagcataacaaattcgacatgcaagttatgattaaaaatgagatacaaccagcacatataaatatttatataaaaaatgtatatatcaagcactaaaagaagtgatatattattattagtcaatgttgaatcttacacattttaatttaatacatattataaaaagagtaatttgtggtgaaaccccctcaactattaatttacttgtaaaaaattatccaacctcatattttggtgggaaaaccctccaaaatactgtttcgtttacatttttgaggtgtcgtctgtccaacctcgttaagtcctaatttttcccacatgacaatacaggtcactaaaaaattatcctacgtgaccatattttacagcataaaaatatgtaaaatttaatatgtaagtatacgcaatcgaaataagtaataatataatgataaataaagtaatattcccacgagaattgattatcaattatcaatccattaattacttagttctatttaattaataaaagttgttggatagaaaataaagtattaaagaaataacaataataaagacaaagattattatgattcccaattattctttattttactttataatgtaattactcaatttctcttctttctattgatcaattgataagttgagtcaaaagtttataatctggccaagacttataaaccaaatttatgtgaaaactctctatattcctatggtaagtttaatcataaagatgacattaaacataccaactaataaaatcatacaaacaacctaggcattttcattctaaatcaatttacatccaaaataatcagagcatactcaaatctcacattccagaattttgatttgaattcataaattacgattatagattgtcagtaaataattgcagaattaaaacagattgtatgaaattgaataaagagaagaaattttttttgaacaactacattaattcataaaataaattcaagagattcacataataatcttttaaatggccatattcccctcccccatcttcttgaacaactttgataggtaaattaaactatttttttgcaagacttctgaacttgataaatactcaaaaacttgagattttaaggtaagaggaaagatccaacagaacctactataatcatccacaaaaacaatatagtatttatagtttactttagaagaaatgtgggagggacatcataaattattatgcacaagtgcaaggggttgagtagctcgagtttgagataagggaaatggcagcctatgatttttacctaattgataagctttgcaaaaattcaaattcttaagagagtgtggtatatttttttagttaagatcttgcttaggatattaggtgcaggataaccatgtttgttatgccaaacattaatgtaggtaacagaatttgaaaaatatatagtaggattagagacatctaattaagaaaagaaaggatttattattattctatttagtacaagcagaaattgaattataagtttgagtgtaacacttattacaagaatgagaatgaaaaaaagtggacatggactaaatttttgtagttacaagatggacttgtaatgttgtattggaaagactcgagctatcatctcctaaaagatagaggccatccttaatttttcctttgagtaagactgcccctgtttccttgtccttaacaaaacaacatgttttctgaaattctaagaaaatatcattgtcattagtaagcttggatacactgactaagtttttagtgattaaggaaacttgtaaaatggaatttaaattcaaagaagaagaattggagggaagagtggttgtaataatgttggaaatcaccagtttcttaccattagcaatagtaacagtttcatggtcaaaataaggagtagcagaatcaagattatccatagaaattgctatatgattggttgctccagtatccacataccagccaacatcatcactaaaatctagcaaagtttgagctataaatgcctgaggatcatagtcaagacactgctcagtgaggttagcttgaggctgagttgtggaagcctttggagtaacccaatttctgtcaaacctataatgacaggttgcagtagtatgctcaaatcacatacagacttgacaaagtaatttgttgttgttaacaggtcgaaatccattaccttgattaggaaatcttgagacatttcctgagccatttcctcttcctaaaccattaaaaggtctatatggtccatttcttgatcccattgagaggtcagctgccatccttgttaaaagatccataacagtagcctgtctttcaatcttgattcatgagacatcaagagagcctgaacttcctcaagagagagaacttcacttcaagagtaatacttgatacaatagaatcaaactcggtaccaagtctattaagtagatgcaaaatcaagttaaaaacatttgcaggatgtccagcaatagccaatgaatcaaacacagatttaatcttgtcaacatagtcagaaatagacaagctacctttttgaagatttatcaactgacctttaagttgaagaagctttgctttcgattgacttgagaacttctgttccaaagctttccaaacaaaattcaatgttgaatagcaagcaactgtgaccaagatttctttgaccattaaagatcggagccaggacagtaatatctgatctttgcgacgccgctgcaagaacagaggatttatcatcgccattgatgagatttaaaggaggagtcgaattactgaagagcaattcattaagatcatgacctatgacagtaggtatgagctgaaatttccaagagaggaagtttgtgcgatcgatttttaaagtaaaagaaacagtgagagaattctaaaaaggattccataattgttctgtcaaagaggactgagtcggtacaattgtaggattggtgggtccagcttgagacgagtggtcaccggaggaagtcattgacgttagtgaattggctctaataccatgaagaatgagaataggggaagaaaaagagagaacatagagtgtatgtatgaatgtttaagctaaatgcttaacttatttatttgattgaatgagtatttatatatactcagtagaatacaagtggctacaaactgttgtaaaactaactcaataatctaaaatgtcacttttactagtatagttcgctagtgcgttggtaaaagtaatttttactagcgcatttcacaaattacgctggcaaagagatcaaagttttaccagcgtacatttgtattggctaaaatctaatttttaccagcacatttacgcgctgggaaaagttatttttgtcagcgttttttattttctgctggcaaaagttctaataccaacattgatttgccaatccccttttgccaacacatcacaagtgaattctattttactagcgcaataccaacttttgccagcacaaaaatgtattgacaaaagtgacatttcttgtagtgtaactaactattaggtagaaatatatatttatcaaatttaagagagtagaatttacatatatgtgtatgtatatatatgcaacacttaatgggtaattaactattgagggttacttaaaaaataactataaatatcaaattttagaaatattaaattattagatgtaaactatattcaattagtttaatatgtagtaaacatgttaaatggcttgtgccagcagataaatgtgttaataagttaactgaaataaaaattgatcatttacataaaattattattattaggtatcagtagtgttttacaaattattatatattccatactagttatacttaaatttatctatagcaatattatacattggatggtactagatactagtggttttttagcatttctctttacataaacgacttatacgagtcgtatttcggtatgattaataatgagtcgaacacaattgcccgccttagtttgaaagtatgctttactcatcaagagtataataatcatctaaatccaccaaacatatgtttgtgttttgagaccacatgctggagatttttaaaaaataaaataaaataaaaaaaacatttttgtaagtgagaaatatacattaattcttagaaggttgaatcttctttgatgaagaatcattcgatgatgtcatttgaggttagcgtgtattaaaaattttagatttgagtctcaaattatatattgtaattaaataaaaaaattcatatcataacttgataatatttcaaaagataagaagtagacacgagaggttcctttttcagtcaataattaataaatatatataatttgcttatatttttgttaatattagttgttcataaaataacgaatgaaacttgagggacgacttgtcatgtctatgattttattgggagagaagagaagtatatgtgttttgaatttctttttggttttaattaatatttgtctttacaaaaaagacttggccttcggaataataataatttaaataattttaaagttaatagtagatgccatgtattgtcatatcatatttatcttaaaacatgggtattgatttcctaccactaaaaaatataaatatatatgttaaattatatatattatattaaacttttttatttttcatttttgacaaaactaaatggtttaataataattagtagtagtagtaacgcggccgagcatcatttgtgaggtttaaaagtactacagatgaatattgtggaatttatgataaagtgtaagaagaaactggtcagtctactcttggagtcgttgggttgtcccattcctattacagtactttaattaatttgtttttatcctaatacacattatttactcaacgcggaggatatatagtatcacgtgctccttattgtgaggctaataataataataataataatgtgggtgagtcgtttttttttggggaattatatttgtgtgagattattgataatacgtggaaataaaataaaataaaataaaatggaacccatatgcaccttatcatatactctttaactatacacattcttacaaaataaaattaacgttgactattacttttcttctcttcattactactagactagtaagaaataagaatgtttgaatataaagtaattttgtgagagatatatatatatatataataatactggaagaattttattttctgcagataatctcctttacagtacaatctaccaccaggaagctacatgtccatgtctgatcaactcattgactataccaaataacgtacgtacacgtaactcacttatgcaaagaatcttattactttttttttttttttgaatggagaatcttattacttaattacagatctcttctttcttttttcttaagtggtttggtgactgtctcttcattaccatacagaatttttgggacattccattagggaaattgtgagattttccttttctttttgggtatgttatcttagtactaatcacgagggaggaaaacaactttggtatgttgtaaagtttcattccaactccagtcatttcttttctttgttttaattgtgacaatattatatatttgcttgtgggttttgtttagctatttggtttttgatatatttcaaactagttggaaagtttaattacgtatactttgtttccagagaaaatttgttctagtttttcattaattaatatgtatttatattagctagagagaaatttggaatatatatagtgtctcgaacagaatatactacttaaggttcaatttaatttgaatgggtcttcattatatgttgatacattaattaagctcatgaatatttcactttatataattatgcaggttgaaggtgcatatcaaatcaactatatatactgatgaaatggaacgtagttcaggtgttcaagattttccatattatttccaagttaaggtaataaacacataattgtaattagtgtgtttttcaccattaattatatacttagtgttcgttatagtcaccttttcagtgt

SEQ ID NO: 36774 - DNA, 6020 bp, Cannabis sativa
aattcaacaatctcaataattcattggtcatttttaacgaccttaaaaattcaagggacaatttagtacatgtcaaagtttgaggggaaaaattcttaataagcctatttttttcagctaaaaaattaaaatagaaagatatttttagtattgatttgtttgtactctaattatatatattttttattttagttagtatttaattattttataatttaaatttattaaatataaattaattttatgaaataatgaaagagtaataatattttttattaagctattaataaaaaatagagagttccttgcattaacatagtcttatttatttttttattatatgaagctatttttttgtataattaaaatttattctttaagtcttatgttaagtgtgattagagaacataattagagatgctctaaatgaatattccctagttttaatatttatttcgacattcaaaaaagttctttagttcatttttttttattattatatacgctgtaattatttaaaattactctaaataatttacagtaccaaaaataaaataaatatttatttacgtataaaaaaattaggcatgcaataaaatatttgaaccttattttcaataatataaattattaaaaaatttctataaatttagatatgacactaaataattataagataggcggttataaaaaaaactaaaaaaaatctcataattcataaatagagaactaaataaaaaatctcatcctctaagctagtccacactcacttaccatgctcagtcctcactatagttaatctcaaccgttagatctccgagactctgacagccactccttcgattacccacagtactaaagaccgtctttcacttcagtttgcccacgccacttcccatagtctcaacaaaacctcaaaaggagctaccttttcccccccctctctctctctatagttcttcttacttgcttttcattagcttttgttcttttaagcctccctttttcttctaatttcatttttcttcccccctttactacctcttctgggtagtggggttttctagagctctcttcttcccttggtgagattttgttgaagactgagaagaaagattgttcttttagaggattttaatggcgggtcttattctgtttttgcttatggcaatctctgttgttgcagctgatgaaggtgagcttctccatttgacattttcacttacaataatgtaaatgtatgcttttctatttctgtttttgatttctgggtgtttgatattttgtctgaatctcttagtttatgattttgtgtaataggtttatataatcagttaattaagcttaaaaatgttgttttttgttttcaagtttgcatttttatgtgttgttatatctttttccaagttgggttttgtttataaattcaaagggcattaatatttagtttgaaaaaaatgaagagtttcttcaattgttgcattggacccatctctttgattttggtgaactgcctcttatgagttatgacttcttctgctatgctttacttctttttctcaaccaatgtgtgtggctctttctttggcatttcttgtgttgttaaatctatttcctaaatgggatttgtttaataactttagagcattgaatatttggttgggaaatgaagaaaattaaaaagggaaaaaaatattttgaatctgaccacaacaaggttcacagagtcagaaatggaaacctttccctctgttgaaaatctcttgtccatcatcctcagccttctctaatggggaatcaagcctattgcatcccagctcatttgccagttcttttaccatcttaggcctaaactaaaaatctccatgacagtatgcataatctctaaaagactaaattacccttcttctgggtaaattgaattctaggtgttactcaatttgagaggataatattgtcattttctgtactattattaaaaataggaaaggaccattgtatgtacagttggtttggtccactagtgccaaagtactgcattacattaataacccaagccaattgcttctctctctctctttctcaggcgtttcaaattcatcattatagtacaacaaattcagttcataatcttaggcacctcttcacttcttcaggagttaattttcaaaatagtacatttattataattaaaacaataattaattttgctgttaagtattattatatagtaagacacactttgatataaagattggatttttactattgtcttattatgtgtccactaccaactaactgtcattaatttgtgttcaatgttataattaatcctatcatttattgaaacatttgtatatagcattgctacacactggtaccttttaacactcaaacaacaaatgtaaagaaagaaaagacaaaacatgagaaaatgagcttttgattgaggctgatggaagaagagtaggacccacaaaggtgatagataatcatagtatgagattgtgttgtaattgtttaaggttatatgagctatttgaacaaatactatacaagagttaatattgatatttcatttttattggattgaattagtttataacggcaacagcaacagctgacttgtcaattttttttgctgatggtttccatcttcaactattgacatgctttattattatatgcaatgctgagttattattattattcttagcagcttttctgacagtgtgtgtattattgtcgttttatagaaatagtaacatggccccattcatctttcctttgatgctatggcttgttggggtttttcttcccttttaacatgcagttattgtcccatcacagctgtttcgtcttttcatttttgtacatcttcaccagaagaataatataaaaagaaagatgcccttatggtgtttatgataggttatcaataaaaaaatgcaaactttgatgacatatgtttcttatgtgacatgtctcaaacttgagagttattcttaatcaactatgccaatttgttcttaaacataattttttaacatgttgcagatgctttcatcggtgtaaatatcggtaatgatgtttctgatatgccaaccccaactcaagtggtggcacttttgaaggctcagaatattaaacatgtaagacttttcgatgcagatcgagctatgcttcttgcacttgcaaacacaggcatacaggtgattgtatcgattccaaatgagcagcttctcgggattggtcagtccaatgccactgctgccaattgggtttctcgaaatgtgattgctcatgttcctgccaccaacataacagccatagctgttggatctgatgtcttgacgaccctcccaaatgctggccccatcttagtttccgcactaaaattcattcactctgctcttgttgcctctaatctcgatcgcctaataaaagtatccactccacacgcttcttccattattctcgattcctttccaccttcccaagccttcttcaatcgaacatgggaccccgtcatggttcccttgcttaagtttttgcaatctagtggctcataccttatgctcaatgtctacccttattacgattacatgaaatcaaacggtgtgattcccttggactatgcactattccgcccccttccaccaaacaaagaagctgtggattctaatacactattgcattacaccaatgtcttcgatgctgttgttgatgccgcttattttgcaatgtcttacttgaacattacgaatgttcctgttgtagtgactgagtcgggctggccctcaaagggtgactcaacagagcctgatgccactgttgataacgctaatacttacaatagtaacttgattagacatgtacttaacaacacagggactcctaaacgtcccgggatagctgttagtacttttatatacgagctttacaatgaggatttgagaccaggttcaacatctgagaaaaactggggcctctttgatgctgatggaataccgatttatatcttgcacttgacgggagctggcactgttctggcgaacgacactacaaatcaaactttctgtgttgctaaggaaggttccgaccgcaagatgctacaagcagcgttggattgggcatgtggaccgggcaaagttgattgctcacctatgttgcaggggcaatcatgttatcaacccgacaacgtggttgcacatgcaacatacgctttcaatgcttactttcagcgaatggcaaagtctcctggaacatgtgattttaaaggagtggcaaccatcactacaacagacccgagtaaggattaaaccccggttaaagattttcatttttggtgctgcttgacactatttgacaatctctaatgcttttctcgtttattcttgcaggccatggttcttgtatatttcccggaaggtaacaacatcaattttttgttaatatactgtttgattgctttaggaactgtgaattttaatgttaaatgtagcacttctagcattgtttaccttacgtttttctgtcttctcatacttgcagtactggaaaaaatggaacctttgtaaatggtacatcacttgctccatcttcaaattccacaacttccggttgtcattcacaatatctcgaccgtggcagttctttcactagctctgtgatcataggcatcttatttttaaccttagtagtttcgttgtagaaactatatatctatttgtattcgtgcaaatctttcgggaaacattctgtttcgactgttggtggaagtcattagaaaacccaattttgtgtccccgtcggggtgtggggttttcggggggtaccggcttgagatgatctatatttagcaagaagttgtaaggtatttgtccattggagtgtgtacaaaaaagaccaaaaaggcgattatttcagtttaagtttgtaactaactagctttgtaggaaaaatttgagttgtattctttgaactgaactgaaaatgtaccactttcttcttgaaatgaaaactacattacttttattcccattcttcatcgctgttgtatcgattttgttcacaagcttcacagacaaacccagcagatgtcgaagaaccgaggcctttctcctcggcatgctgcttacagtacggcttgttacaaaaattgcatttgggaagttgaagccagcaatccaagcacaaagagtcttcacaaacagcttcttcttgctctaaagactcgaaacatccactgcactctatgcatctcggaatgcaaaagatgcagcctttgcaacccattttcgccttacaggctttacttgcacagtcaaagaccggtctcagctctttgcatcgtgggcagatttcgatgtctatcgttggctggtctttgtagtaatgtctgattgttgagaagtttttgtactcgtgaaatagaaggagaggccgctgtggcttttgctgctctttcgggttatgttgaagacacgaagagagtgtttcgagatggtgtttttgaatgtcgttaataccgtttatccataggtttttcaaggtgtggccttgttgagataatgtctttacagctctgatgactccctcggccgacaacgctgtacatcccggtatgaaaagctgaacaagttcgaaaaatagaaacatgttatgctagaataaaattataaaacattatcctcaaaaaacatgaacttgaattctaaaaggccaaagaaaagagtttgcttttcttgagaaaacagtagttttcaagaaactttctcgagaaccaaacagaagcatgccttgttttttcattcttggctttatttaaacaaaatagaaccattatcacagacatatacacatatatacacacaatgttgtacattgaacactcttgtcagtaaggtcaggctcatctcatgcatgcaaaaagcttaaagaactttctttgcaataatgcaattaaaaatacaaagcatcagacaaatataagtacaaatgctaatttgatattatga

SEQ ID NO: 36775 - DNA, 16227 bp, Cannabis sativa
  modified_base (48)..(54): a, c, t, g, unknown or other
ttcatgttcttcaaaatgttggtcattgaggccatttgagcggttagnnnnnnnaaagcatctacttcaagaacacccgctacttttcggcttgtccataaactccacatttgtatccttcttaggtcctatgaaattgttgctttgataccaagttgataagaacaacctgctcaattcagatcagtagcaaaaattaaaggagaataaaacagggatgatggataaaacgacagaattggctttgtattgaatactcaggactttgagaacctggttctctcccaaatggttataaaagacttaaaatacttcacacccctcaagagaaaactatctagccttttattacaaaatcagtgtaccccaaaaagagctacgccttacccgagtacccttcctagtcttgcgagaataaacgtaagtgatggctggtctatcatactagtctagtcaaatattttaccataatgttatttgatgtagtggtaacaatattcctaaaaggaggtcataagttcaaagttccattctttaattttaattttttttatgattgtaatttgtagggatttgaatttagtaattaatgtaaaatatgataattttaaaatttattttatacacaaatatttattattttattttttattatagctaaatttgtaattttcatcaaaatgttaaaatctactgaaaataaacattgttattaggtattattgtctctaacaccactatgaaatgtcatattgtagttgtctataatttaaaaaacaaaataagtgaaatttgatattaaattttaccgatagttatataacaaattataaaaaatgctaagcaccaaaatacagataaatcgctccacttaaattttatttcttaattcacctctgatcaggttgaagcatcgtattccactcaacagaatgcttttgtggtgagacaataacttatatgcaaattggaaataatgaaacaactagatcaaatcaaactactatcactttttgtatcattattttacaggttttgtgatttatgtaatattgtaaacagtaatcaaaacacaaatttgttctgttctttgcaccgatagattaataccaggaacgtttttatttttttataaataactatcgtgagtaatattgagtataataaattcccccaaacaaaaattgtattttaagaaatcataaacgcctagtttttgctgcaatttagtaattaacaaattaatcttggctattgtgatttccatcaatctcttttctaactttgaatgtcatgaaaaaacctgtagaaagacaagaaagtaaatgtgtaagaatgtatttatatatttatttatacatattatatacatagagagactaatggattaggttttttttttaaaaaaaaaaaatacacactaatgtaatgtataacatgatttctggatacataattttgtcaattcaataacattcattaacattcttcttaactatcttttactgatcgttcatagaattaatgtacaacatttgcctatgaatgaaagggcatgacagattcataaatgtccaaatacaagacttggaaattttgatacgatgatagttaattccaacttgagagtagtctctctcatctctcgtctgcaccatccataaacttacaaaaacagttgaactgacgttaagagaaagtcacctaccagcatattcaacttgctttagttaaaagttcaatgtcagttccaacttcaacaatcttagcgtctttggaagtctttgctgctttagcaatgttatccacatcaaaatctaaggctattcttttaacaagaccatcaagcatctgttataaaaaatggacaataatgcgacatatcaatagcaagttcatgaatgtttggtccaaatgaattaaaatgataataaataataactaaaagatataagattaccaatgatccaattgcaactaaaacacggaactttgaatccacttctaaattttcctcctctgcaatctgcagataccaaaatggacaaaaaataatgtcatactgcataagcatcatgattcaaatggattaaagaaaacgacaccatctccaggaagggaaatcccatatgaaaaattcattctgaaaaaaacaaaatattaaaatcttaatttaaatttcaatgggagtgaatcccatctaacaaacaaatagattttaataaataaaatacctctaaatatcaacgtaatattactgcaataaaagggggaatccctccacattggaatcaggcagtaaaatatataattaggataggatcccttacagcgtcactattaagagtgtaacgtacctcaagagcagcagaaagaacttgagactgaccttcttgatccttcttatcaattagcaacacagcatagctgtcaaatgcccaaaagagaacaaatatcaggagtgaatgcagaaaacctcacagcaccactaaaataaacccaaaaaaagaaaaactgaaaaggaaacaagatcaacaattaactgctaatatggctctatcaaaaaaacaaatacaaataatattgcctgatatttggagtcaatatagtactcttgttccttcggacactcgataacgaacatagaatgcatttggtatggaagaattataattctggatgggataggaccaaactggatagatttttttatttttttttatttttgaacaacagactggatagattaagtcagagtcctatactaaattcggtaaattgcagatgaactgtaaaagtaaatataaaaagagaatttaattaaaagaaacttaatattaaaatctttatttgaatttcattggctgtgaatcccatctccataaaagaataaaaaataaaatagatttttataaataaggtaactctaaacattaacataataatactgcaataatgtgtgagtctagagttcccatatttctgtggcatagatattcccaagaaggcaagaactagattctatgagcacatgcgcatcaaatactctattgtctttttaactgccaaatgtagaatggggatcaaatatctctgtaatttctcagctgatcctacaagcatgacctttttttcttcttttttcttgatggaacaaaagttcaacatgaccttacttaacaacaacaatcagatgataataacacacttactttagtatcaaggttgaataggacaactgcaaatttttatttggagatgaataacaactggagaatgcatcgagaacctgcaaaactcatttatatataattgtactcatacaatcctaaaccagatgagcattaataatatagaaacctcaacgcgatgtctttgcaaccagttgaagaagctagatttcttgaatagattggtgacaagacgaatgcttgtcaagagattagcaggaagtgaagggttctctgtgaccctttttattatttccatcaatgtatctgtaagagacaaaatcaacgataaccataagcatataatatatcaataacatttacttttgcataagcaagaatgcatcaggataattttgccataaaagtttagaggaagggcgggagtcaattactagcttcagtaccattttcagcttcaacgtgtttgaggaacaaagttgccccatctgggtgcagcacgaccatcctgagagtatcaatgactaccaaaaaacaaaaaggacaaaccgaaaataaaaattacataatgaaatctcgctaactggttatacaatttagtcactctaaaatagaactttcaagagcacaggtaacaattcagttcagtattgtgcatttaacataacagccatacacaaagtactccaaacttcaaaagttattaactgaaatatgcaaaactatacactagcccattaagcaaagagaatgcttgtagaaagtatctgcaatgcatttaaggatgagtcagggccactgctcgttcacagcagcaacacaatatttggctaaactcttagttatcagcaccttgagcaatgaatttttgtttaagccaaattaaattattttagctatttctataatttttttacttccaacctcacttcccattctacagcatctataattcttttctaaagagaacaaagtcgcatataattgcagcaacacaatattttgctaaactgtgagtcatcagcaaccttgagcaatgaatttttgtttaaaccaaattaaattattttagctatttctatattttttttacttccaacctctcacttcccattctgcagcatctataattcttttctaaagagaacaatgtcgcatcaaaccattcaaccgagccaactcaacccaaccaattttttgcattaaagagttatgttaagagtagggcatggctcattggtctgaaaagtaataggccatataattatgggatgattatggtttgggcacactctaactctatataactcaacccaactcatttcttaagagacattccaaatttgagacaactttcatacataaaatatattttacatttacaaaatatatacaaatatatattttacattttcataaataaattatattattaagataaccttaaaaaatgaattaaccaaaacacatcactaacaagtaatacatagttaccctactacttctaccaacaagtctaacatgagaatcaatcactattattaacttttctagccacacaatgatattacccttaccaccttagactttttttaaagcactatatctacatacatatatatatatatatttacatgtattgttttttttagtatgcactaggttaaattattttatcatgtttgtaacataaatattaaagcttaaaatattcatctcaacccaatgaacccaacccaatcatattgttgtaccaagtaggttgggttgtacaataaaaaaaattgaatggtttattgcttctccaaaccgcagtcattgggttggcctattaaaacacctctaacttagccaactcaacccatgtgcacccctacttaatacaatgaattggaagacaggaaaaatcacatcacagggaaacttggagactttttctttcataggttgatcatgaccacaaagccactcttatcagcctggtgatgatttcaacacccacatattcttcaacaagcaacaagagaaacacttgaaaaagtacaagcacaagcactcgtagctgtcaaacgatagtgttattatagaccacccctagagtaggaaaagaacgtctttctcaagaaagcatggaccagcagtaagttgttataaaacaaagcacagcttcaattcagataaattatatgatgtaagataatatttttctcttttaaccaggaaacatgtaaaatcaagtaacataacacgatttcctgacactgcagtcagcaacaaagcactattaaaacttctgtgcatacaaaaatgtaacaagtcttgaattccaacctggaaatatcatcgtagttggccatgattttatggcgctcagcaacacagcaatatcagaatctgctaatttactagaatgataatgtgaagtgtccttcaaaactttaactaaagcacccaatctggaaatctcaagctccgataaagccaagtgcttcttttccttcaaaagaatagaattttgttttttagaaaactataaattagacaaactattaatgccaggtacacaagaacgtttaagcataaaagatcaaagcaatatatcattagttaaaatactgatcaagacatgatagataaagaagcctactttctctaatcaaaagaagaaagtttaacatttcacttcattaagtaatcaaatgttaacgagcattaaacgacaatatataattacaagatacactattaaagaaaacaatgaaaggaaaaaggacaatattagatcacataaagaacctgcctgatcagagtgtagagcactgttaagctctgtaatcttcttgaggatcccatcaaactgagctatgtcaaaaacaagcattcctttctgaaattaagatggttgacaaagataagaaaagatgttgcataagagatggatttaaattaaaaaaaatccctgccctaccagaaaaaaaaaatcactgaggtaagaacagcgtcagccaataaattttccatttgtccaacttcaagaatgcaaccaggaagccaatttactaagggtgtgtttgataaaaattttacttttgaaaaataaaaatgtggttgataattgtttttttttattttattttaaaagcaaaaataaaaaatgtgtaggtaacttttttttttttaattttaaaagcaaaaataaaaaatgtgtaggtaacttttattttttatttttttatttaagtgagggagaaagtaaagtaagagaaagtggagagaaaatacagtgaatattgacgaaagagaaagacaatataaactataactaaaaaaactgttgaaataaattttaaaaagtaacttattttttatttcaaagttttgattcttattttaaaaaattaaaatgaacagttttatgaaacatgttttttaaaaatattttcacttttctaattaaaaaaacaaaaagctgttaaaataatggttccagaatgcaccctaaaagattctgattcccaactattatatattctttttaattatacatttacaaagtaaattccaatatgcatgcaaatacttatggtggcaatgatacaatgagcccttaaactatttggataagcttctgatgatgagcaacgtcattcagcagaatatctgaatgtcggtctaattcataggctgtctaatacataaaagtactttatatagtaccattaactatggataaagtaaacaatttcaacaaataatgagccaagatctgagcacaccttaggaatatgcttgaaagcaggttttgcaacagtggctgttaaagagagaattttgtaagaattacgcacattggaaatttttatttgagaaaggtaattaacctaatatacagtaccagatttggaatattctccaggtacatatgcgctagctgaaatggaaaacacagaagcataaacaagtcaaaactagaacaaagcataataaaaccaagtcaataattcataatggtctatgtcaaagggttgacatgaaactcacagccagtgaaaggatcgcgaaaagctggatcaggtgtaaagtccttctgtccagtattttggaggatgaattccactatttgttgccgatatgaaagtggtagattctccttcagaagccacttgtcagcagtgtcatatggattatctgaatcaaaaagtttgtataactgcttattatatcaacatatgaattcacagtttttaaccacataataaaatacaaaacatgagtaacaatgtttgtcacagaaagccttttcattatccagatattttcaatttttaagtagaaatattttagttccaacgttcataacttaaaaaaatccaccgcctcaattcagtgtctatgtttgaaaacttattaaacaagaaatgtacttttgataagagaattctctacaaagaaacgcatacagaccaacattacaatagatggtgcgtatatcttcagactgttctagctcaatttcccaaaaaaaaaataacgagtggatgataagaccgaatagataaagaatgttcagacttcagaaatatcagccaaccagatatttggaaaaatcaaagagcgtgatagaactacctgatcggttgtgaggcaacttacgaattggctcaccatctccaatatcaacatcaaatactgaataaaagaaggaagagtataaacagtttaaagtcttgcagaaaatggactgttttcatattttcataaacaacaaacgctaaccataatcatattcaattccatcaagtacaggacgcttcatgccatcatctggtccatcaacaacttcaccaatctatatgcacaaaatgaatttaataaatgagaaggtacgaacaagaaaatagttcagttgtggaagataaagcccctaaaaaaagtgagcttcaggttctagaagcattaaaaaaaaatacaagtaataaattagaaactctctccaattcattttagttactgacttaacacagtcaactccttaagtgtgttaagccaaaataattgttggttctagaagcattaaaaaaatacaagtaacattaattttataagaaaaaaacttccaacaaagcaattattttgctcattaaaaattgctatcctcagtgatctcatcgcagattaaagtctcataaattgatgattcattcggataacacatccttgattttatgatgaaaaaggtgctgagaagacatatgtaaactaatagcatgaggaaaatgccaaacatagttactatggcaagaaagtaaattactttatcccacttcccttctcccaaattccatgcataggccacaccattgtccccttctctgacaacttttgtctggccgtcactggttcctgatacaaaataccagaacttactcagagatagaaacatggaaaaaaaataaggggttattctcaatacagggaaggaaaaagaaatttaagtgtgcatactgaaattatggactgataaagatactcttattggtaattagaactattatgaattatttgctatttgatttggcttcctactaatgcttacttgtgtagttccaaattgtattcatctccctccctccctctctcccccgcagatgagtcaaataaacaaatagctatttcgtataaactaaataaataaaccttaaaccaaaaacctttcatcaatcacacagagaagcctgggacaagtaggctcaattcactagagaattaaaacgactaatttcaaacctggaatctgtaaagcctcaagcccgggtaaatcttccagtttcaatcctccaactctctttctaaaaccaggaaaaaaaaataacaggtaaatcaggtagagcttccaaataataaaggtaagaactcacaagaaaatcatacctgagttggacctaaaaatccacagggaatggagcgcagtttatgatagtgaaagtgagcatttatttgcataaaagggcaagtaaataaagaataagcaatgaaattaatttgactaagcctattcacagaaaaataaaataactggagtttggctaggttctttcctccaaacaggagacaaagacagcttgacaattttctgaatttaggagtgcaagaaagaaaaggagatcatgcacaaacatccaagggagacagaagagacttgagaaaaacaagagtgttaaagttgcttatgagaataactgtccaacagaagagatttgaaaaaacaagtattaaagttgcttatgagaataactgtacaacaggatactgcaaacaaatggatggccgagctttcatacctgctcaatgtgtattgggcaagctgagatgaatataattcgagatccagtgggtcagcaattttgtcctggtgtattgtccaaacacgtacaactccatctgaacacgctgtcacaatatccccattttccaagaacttcgcatcccaaacacagccaggatgttctatgccctgaacacaaactccatctggtacacaccaaaaacttctagtaattatttaaacaagaataggaaactatgttctaagagccaatacattagccttagtgaactagaagaggattgatacaaaacaatgtcaattgatattgcagtcatttcatgagctaaggttatattggcaaagagagagaaaaagaatcaccacataataatccaaaaaaaaaaaagttgtgtcaacatttctgatctaaacccactcagagaggtacaaaatgaagtagtgactcagaggaactctttcatctaatcaatgcttacaagtttatcatatcaacattacacttggccataaatgaatggcataataatataagaagaaggagcagaaaacatgaaagttatgttaataaaagtggaagccaaaggcaatacaataaaaagtgggcccaaaaccacaatagtgaaataggttcttatcaacagcacaacgcaaatttgagatgtacgaaattagcacatactaaccttgttttcagaatctcaacttatgttaggaaactcttagttagctggtactaaaatgtagttacagaatacaaaagaatgtcatgcataataaagtgcaggaaactcctaaaaaaaggcatacaaactcaaagcaagctcttgtttgagatgaagagcacaaacctttccatattttagcaaaacgatcttcacttccactgagtataagtccagaaacatgtgaatccacagaatagacgatagaagtatgaccaaccatctcaagtaaaacttcaccagttaaggcccataacctaatagaactgtgttggggaaaaaagattttgagtctccacagctcaagataaatttttgtacatgtataagacataacttattttattttgtttttatacaaggaaataagaacccttatcccctccacacacactcgcacatccaaccacttgagctagcctcaggtgccacagacattacaaaacttagttgtttaatgaaactacacagtaacaataataataataataataataatatattttgtaatcacccgaaaattcccaaactcacatagcaagcgcaaatttgaaactgcagccccaaccaaaccctactatatttggatattaaaaaactataacattcgctacatgcccaagagggactgaacttcaaatcatgagggagcaaaccacatgcttaacctttgagtcacccctcatgggtacaaaaatagaagatttgagttttccaagctcgatatttataaaaagcaggcaacaaaaaatttagttgtttatagatattatggtatgcaaaagccatgatttgtttcccaatagccatgagaacttatttgctatacacgttgttcactaaatttaggttatgtttggtaggaaggagggagagaaagatggatgaagaacttaagagaggatacggagtaggaatgatggagaagatatttgctctcgtttgtgttgtttagtattaagtgtgaagttggaaggaaaattaattagtaaattacaatattgtccttttgaacagaaatatttattacttaatatatagggaaaaatatagtacttaacaaattttattgtctttttctacaatcctccataattggagggattaaatttttacagttgagtgagaatgtctccatcattctctccctcttgccaaacaagagagtgagagactaatctctccttccatcactatccctccacccctctctatttactcatctttccctcctaccaaacatagtgtttcacgaatcatgatctaacttctaaattcaaccatgctcgttcctcttataaaccaagtggcatatgacatatgggcatgtttgcatataatatatatacacacggactagtagatacacttcacaacatgggagaccactagtagatacaattcacaacaatgtccttaatgcaatgtacatcgcaaagacaaattaagaagataaaaaaaagcaagcgaacacacaaaggtctcacccatcatgtgatgcagaaagaatccctaaatcagacatcactgctaagcctcgaacagtatctgcaaaatcctcaccatgtcagttttcttgtagataaattgtacactttaagaaagtcagccaagttacaaatactcaagacatgatatgaacagatcaagaaatcctttaaactgagaatgccaaaaacacttatcagacaaaactaatggaactgtagtatcttctagatttcacaatttcatccagcttaacacaacagatttaaaatatctttttctgcaaatgcagactagtagagtgaagtgaacaaatctctaccactcctatttccattatcatccaatattctaatctaaatcttatcttgctttatttgttaccttataagtgattatcagagtttgagaactgcaaaaacataaaaatcagcactacacggaagtatgtccccttcatcaaccttaagccacaaagaaaaagataaatgacacaacattaacgtttatcaaacattagatcatccattcgtgcaagagccttatagaacacattgttatctgaagcaaaataagattttattccccagaaaatgttaatcaataatgatcaaagcctactggattcgtcaaagtgaagatggaaactgaagtgagattaagtggtgaaagcaattgtttcggtaatttggatcaacagtaaaagtgtcttatttttggttacttttatgggaaaatgccaaattttagcttctctttggcatctgtgctaataatttcaagggattctcatttcttctattattctcggtataaaaatactgtctccaattatacgtgtacattaactttggttcctcatttcctttgttctctatttttgaggtttacattaccctctaccttctagtaatctttctctaatcctatccattaaatttatgtttcttactgaaaggggatctgatttggactttccttgggagacatcgggaatcaccaaacttaatcaccccctaaccctcccaaaaaaaaatggtttcaccaaataaacatgtagtaaaagtttcatgtatagctgccacaaaaaaaagagaaaaaaaaaagttccatgtatagcttttataccacataacacaattctatttatatatacataaattaaaatacctgtatgccctgcaaaagtttgtgtgcatgtctttcctttccaaagttttatagttgtatcactcgaacctagattatgcaacaaaaagatagtcaacaccagttcaaaatatcgtctaacctaacacagatcaattgcttcacagaactgtcaacaagttaatttacctgtagcaagctcgcctgaaggcaactttacgattgtttgaatagcagacttgtgagcttcccatgattcaacagcttggccttttctccaccgattcaaagtgctacataaaagacaccgaaacaaaaatactgagccagattttaaaatcgggacaaagatagactcatccaataccagcttaacttaacaaaaattctaattcaaacattgggggcaaaaacatgttttttcaaagtatcatcaacaacaatgaaattcactatcaaaggtgcacagtgccaactaatgtaaacgaaaaaaacaaaaagcagttaccaatcgactgaggatgatacaatgtcgccgttatccaacgcaagacccgtgacctgcaactgatggcccctgagagtgtggaccttctccccagttctcaagtcccaaactaggaccagcgtgtccatgcctccagacacaattgcaccatccgggaattcttcggcatcgggcgaaatccatgccaacggacccacgaagctcgtatggccgagaagaattttagatgccgagaatcgtctctcgtcggaggggtccaaagaccagaacctcacggttcgatcccgagacgaagtggcaatacctgcattgccgcaaacgcaaatccctcgaacctaaaaacaaattctcaccaatcaagtaagtatatacaatatatacacacaaatagaacaaaacgatttgaaaaatcgaaacaaaaatgggaaagggatccaacgtcgtcttcgtggccgcgaagttcacagcgcaatttgtattcgttgaaatcgatatccatagatgttgagagggagggtgttcgatggcgccaattggtagaatggaaagagtgaagagtacaaagagtcgagttcaggccttcaacaaaaatatatagctttgttaccaagttttctcgagtacaaatgataattatataagctattataacatcttagttaactttctttcaaaaaaaaaaaaaaaaaaaaaatctcttagtcaacttttatatttgaaataacatgtcgaaatattttttttaattttttttcataacggtattcgttagagttacagtatcatctttataaatttttgaaaaattccaaatagtttacagtaccgaaaatagaattcttgatattccagtttaccacgcaagttcaaaaaacttcaaacgtattttcggcacggtaaactattagaaatttttcaataatttagaaggatgatgttgtaagtattaacataaattttcgttaactaaaattgagcttaaataataaacttacacagaaaaatgaaaatggcaaagaaaagaaaatgaacacaaaggtttttacgtgattttgcagttaaaattttgcatagtgcacaagtcaatcttattaatttctaatggtttcttagggccttttttcttataatttttcctccatttttcagtatatcttgcctctacttataatcacatagtaggcagttaattacagggttaattgtgatctttacaacgtttatcccctgaaatcgtggggtttaattacatatcacgtagtataaatgtggttattatttgaatatcatacagctgtgatttatccgcttttactgggtcaaaatgatcgtgtatttaaacacgttttaaatcatggcgttatgggatgtctcgacagaaactcagtaccaacgaccttgatagcgagctggagcttttcccctatctttccgaggttgatgatgtacgccttgtcgtttcttctcttgaagacataacacttcattttgacaatcacagttctaaaaaaaaggtacttcagcaatcatcattcgaatgtcagcttctggctcgtcaagactataagtctcactgaaagacatccggagttgattggtgaaagtaataggagcatgccttcctatagcgagataggcgcctcgctattagttgtttgggttcgcccgactgttataattagtttgtatattatacgctaagtgttttcacagtcattgtgcatcgctttcatctttccaggtgtaacgaagttgatgtctcgccttgcgcatccaatgtcgtatggtttctcgtttatacatgaggcaacagtttatatatctttatctcgcataagaccttacagtcaacgagttgtaagtatactatgttacttccgcatttaatgagttaatctgttaaatgtgattaccgttacacgcatcgatctatattttccttaacttgacacgtgtcctccattgaaatggtagccaaattttgggtataaaaattgccccttaaaaagttctttttaataaaaagtgctttttaataattacaaagggtatttttgtcataatcccttttgcgaaaaacgcgtcctctgatcttggcggttgtacggtttcgagggtcattattagtataaatgaaccgtcttttcatcttctgcctcactcccaaccgttagattttccaacctttagccttcccgttatcggattttgagtataaaatagtggcttaggcttgccatgttccatacgctcttggtttttgatgagtttcatccagaaattggattgtcattctcttgcgaagatgtcccatccaagttcagaaacttatccctccaaactcgtaacaccaaaatacaccaaccactcttcctctccatatgttcccaaaaacttcaaatcacagtttaaattggaaataaaggattcaaagagtgaagatctttcgattgattcaatccaaggagataaagttgatcgttacaggcaaacgtcacaagagatttttgagggtaagtatcatccttcgcgagtggtggtctgacctggaatattattgatcttttatctttgtctctacagaaatggacatagattttgagagcaagttcagaggtcctcctcaggctgacaaggaatccaagaagaaggtaatcccagttggcgaggtcatgggttctactaaagaacccaaatgaccgaagacccaagcttgcacaagaaaatctttggaccagccaatctctggtgttgataaatttcctgaggctgggaatgaggtcccggttgcaggaaatgggatcttctgatgtggagaat

SEQ ID NO: 36776 - DNA, 9688 bp, Cannabis sativa
  modified_base (1812)..(1816): a, c, t, g, unknown or other
aaaaaaaaaaaaaactattacaaggtataattaagtattttcaggtaatttaatttaataattaaataaaatatatacttaggagaattgttattggacattagtagtgtccaatactttttagatgacactatataattggttagtaatattctctaaaagttattacattaaattatataagattcaatacttaattacaccaatagtgacataacacttacgagggtgctaggcaccagtattgtcttttagtatttccctatacctatgtggcaagtcatttttaataagtgaaactcatcttaaataaagatgattagttaaaattatatgccggataaatgtgtgtaaattgtgtgtgaagatatcattactcctattataaaatatagttagctaattacaagttgttacctctaagtagtcctaggcactattgttgccttacattaatattttttttagtatttcttacactaaaagacaccagtagtgctaatcattgattagtataattaaatatcatgtctcataaaatttaatttaataattattataaaatatcactactcaattataatatatcttatatcaatccttttaaatttaatattaagtctaacaacaatgttatattttactatgtgttatgaaatagcaaagacatgaaatagcattactttaagtttttttttctaaaaaaaataagtgataatattttttctttaaaatgcagttcattgacactcttatgttattactttaatatttttgtcttgttttcttagatgaattatttttaattggtttaaaaacttaggattaaaacaatttatttccaataatcaagttcattattttttgtttttatgcttgttgattttcattaagaaaagatcaacctaagatgatggcatttatattgaaaaaaaaattctaatttaataaatcaaataacaaataaaaacaaaaacccttaaactcaaccattcaaaaaaaaaaaaatatatcctattgttatacttatttaaaatatcgtataaaatttcttatctatttaaattcaaaagtgtgcaatgatactctttccctatatattttgagtatgatcttttattataatatttcataaaaaataattaataatgactcatatataggtaatatatactagtataattaatacaaactcatatatacgagctacaacaagttatgtaaacctttttggtccaatttataaaactaattctttaataatttttacaagttattgactaattagctaattttgaaaaattcatcctcatactagttatttatttcggcattcaaaaaaattagtgaattagcgtgtattatgttgtagttattcaattaagatatcaaattttttaaaattttacagaatatttttcataattacaacttatacaattattaaagaaaattgagcaaaattatgtttttcataccgaaacaaataaaaatacactgtaaaaacgccctataattttagtgtatataattgatattttatggaagtaattataagtatttgtagtttagataaaatatgttaattacgttaagtaaatattatatcaattcaatatataattatatataaaaatatataaataaatttataacacatgagtggactcaagtctatcatattctaattaatcacacgatatattccatcatcttatattattcttatatagattattaagaaaatcacataatatatataaatagtatattacacattataaatagttaatctatatatatatatatatnnnnnttttttttttatatatataaataacaaatacatatatggaataatgcttatgcgtgttagttttatataaatatatatttatatataattattgaacaaatcaatgtaataacgtggacaaagctccataagttatggttaaaaattaattgttttttttttaataataaaattattaattaatattattggaatactaccaattaatattaattaattgttgcatcgatatacaaatggattggcttcaaaatcaattccattgacttgttaagattaacaacaattaataaattaattaatatagtttgtttaatataaaaagaaaggttttatttaaagaatattgctatatatatattaatatatatatttaattagttaataatgggaagtgagtgagtgtcgtgctaattacgtgcaagagtggttatattattattataattaattacacattaaacaactcaaaaaaaagtaattaattagacataataaaatgtaaaataaagttgtctttttcaatgtttaaaatttaaatattatctttttttgttgtgtttcttttttcggtcgtgttgctcttctattgtaatcagcgtgtgagatttgtgtagttttattttcgtaagactaatttatttataggataattacattaaagaactattttttataatttttttttttacaattttacgtttaatttttttttatagtattttataaaaataaaaaaaaaaaattacataaaagtaatagaaaaataacattaaaacaacaacaaaaaataacataaaaataacaaataatcaataacaaatcaataagactataacataaaaatacattaaaagatcttattttctataaataaaattataaaatcatgaaaatatttataggtttatgattaaaatcctaaagtcggtggctacaagaaacgagattgttaagttagttagaaataactaacttaaactaacttaaccaattcctctttgaacgaagtctctatgttagcttaagtatcagagcttccggaaacatatatgagcttttagacttagggaccaaggatactcgcatatgacactttcagataggatatggtctgctggagttgactatccgaatctaccatcccaagagtgacaactaaccagttagaactcatttccagggaagggctagctattctgaaaattgaacacgaagtggacatgatagtcatccgagaacacccttctggattcgactgtcattccacataactccttccaggactggcaaccgtgagtgaacaactttctaaaaataacgtttgcagtacttttttatttagatgaacttataccacagaaaattttgtaaaatgttataaaaaaaaaataaattaagaggggcaaatatagattttcaaattttctaaaaagaaatacagaaaaatagaaatacagtagcttggtaattcaataatttaacttaaaatatatctaaatgtacaagtagcaaataaatttttaagagggaaaataaaataaacacaaagggcaaaatatattcttaaaaaaatgaattgtaagaggaactttatgagcatgtgaataaaagatgctcctatttttatttttatttttctataaataataaaaattatataatgtacatcttaaataagattctctgcatgactttttaatttataataatatgtcatgtggctcatgatttgagcaaaatataaataaaaataacaacaatttagttactaagtttttttggggggtaatcatttaagttacattttaatactttttttaaggataatttaatattgtttaagagtaaatattacccaaaagggagaaaaaaaatcaagaatcatttatacaaaagtttctttttgggaaatattcatatctttgtagctattttatgttttattaaaaaacattccaattttgattgctatttagtcatttgacaagtttgcatttttgttaacttttaaagaacaaattgcaaaaataccaagggggcaaaaccgaattaaaaaagtttgtagagcgctaaaccgagcaagtctcacaatccaagtgagtactgcgggattggtcggtagcctatagaatctactgcaaccgactaatcccgcaacctctcttgacagcatttattataaagaaaaatttacataaatttctatatttggtaaaaaaaaaattacactttcacgttcatatatatttttacagtattttataaaataataaaaaaaattacataaagataataaaaaatcaacaacaaaataataaaaaaataacataaaaataacatgaaaacatcaaaagattaaataaatttttaataaataaaatcttaaaaaccgtaaaaactatttaaaattccgtaatccataccatatttatataattcttttttttgtatattctaaaataatcactcatataaaggctaaacaaataaataaagaaatatataataaagaaaagaaaaaacaaactagccaaaaatatcttctttgtttttccatgaacataagaaattatagttaatggttcatacttcatacatactaatatttactgttaattttgctccttacaacatctgagattttgagtttcttttcaatttttcttccttaaaacatcgtcacgaactgagttgtataaaaataaacacatagctcgtgttgctgcttttgtccttctcgggacttaaaactacaacaaaggactttcttttttttattattgtgaaaaacataacaccatgactatcaatcatcatcatcatcatcatcatcatcacaatgcagctccaagatttgttattacaattacaataatgtatgaaaagagactaaaaagatcatcaaataaacaaggaagagttgcataacaggctcaccgatcgatttgcagcattcgttttcactcccttttcggttttaaagaagccctcttcttctcttgtaatcactaacagtcaaagtcagcacatgtctccgtccatcattttcggggacttgacaaccgactgttgattctattctctgctttcttgccatgaatcctgcctgagctccttgtggtccaccgaatttatgaagcatagctagtgagattggcaactcgaagttgtgcagcacgttcgtcactgtcccttgatccacaggggcgagcgtgtcaaccaacttgccagcatctgctgcagcttccaaggctgctgcagtagcttccaacccgaaatctgttggtaaaactgcaccacctcgaccattacttgctgcaactttaggtactgttttattaacaggaatcgcttcagtttcttcccctttcgcctcaccaggagtggaaacataataatttctcgaccttgtccatcttctcgaaaagggatcataaccagcttcaccagctttcaaagattggttaataggtttgagttcagatgcattcttgaaattctcaactctgttctttctattcatttcggctagtctaatagccttagcatcactctcttttactttccgagatgcttctaattccaccaatcttgtcttgatcctctccacctctatgtcatcactcttgctttgtgcaacttctaactcccttctcaaccgatctttctcgagtgcaacgttcaatggtcgcgacgaggctgattttttctcttgtaacatttgcttcacagtagctgctgagtacacaaaagaattgatctttttaatagcttcctttttttccaacaaatcttgtttagttggcattcgaccgccactcctctcaacttccctaacccattgcttaaattcttcctcgatcggagcagagtcagaaaccatcgccatctgccacctggctgcagagttttcattcccccaaacacaattcagatacttatgagtgtttttattctctagtttgtactgtctatcgggatcggttgcatcaacattcctaaccatacaaagtctgtaaattggcccggtttttgacctaccaataccaacccgaacaaagcaacctacgatcaattcctcgaaaaatggctccataaaccactttccaagttttgatctccgaattgtgatatccttaacatcttcgaatgttaccccgtctgatcccctctcatcatcactgtccattccaccatcacctgtagagccttcatcttcgcttcgagattggcgatcactgtcactctgactagagctactcaaacttgttgttgatgtgaaagatttcctcttgttgttcaagaaattcttatttcccgagcttcctctcgacgatgtatccctatccctaagtttacggtgagcctcagggtcttgttgcttcaagcgttttgctcgtaactcattcaaagcatcatcttttgcagctgccctgtcagcagatctagctgatgagcgaattcgagacgatgataaaggagcagtctccttcctagattgcgggatcttccctttgttatcccatttcggtctcaatttctcctttaaattcttatcctctttcttagatgctctatctaacaaaatcatttctctttgaagttcagtcatttcagcaagctttctcctatcatcatcatccttataaagatcactaccaacatcagattcatcactgtcaccttcgcgatcagaaccaccacgatcatcatcatcttccccttctccctcgctaccttgatcatcatccatttctgaagggtccaacctcttctttaaaggaacttgagccccagaaggctttctacttgcataaccgccaccacgatcatcatccgaatcatcatcatccctagagtcacttcccccatcagaatatgaatcctcacgccgtcttctagactgaggaggatgctgatgcgagtgtcggtttctccctcctgaattcgttcttcctgctgcctccaacaacaagttttctaggtctgccattacccttctgcccaagcttttcactcactacctaataaacacaacaaattgttaaaaacccaactcaaaaactgaacaagaaaccaaattaaaattacaaattcgacacacatattgttaaagttctaatctttaacatcacaaattctaatgcctatgattttttttaatgaatttgtccattaaaaaggtgcatctgtatgattctcggttgcatttctacccaaatttatgatttttttcaatgaatttttcatatacaaacaaaaaaaataataataacccaactcaaaactgaacaagaaaccaaatcaaaattacaaattcaacacacatatcattaaagttctaatctttaacaccacaaggaatttaaaccttaatttctcattattttgaagaagaagaaagaaatactccacccaaatttattatttttatcaatgaatttttcacagctacaaaaaataataataacccaactcaaaactgaacaagaaaccaaatccaaattacaaatttcaacacacatattattaaagttctaatctttaacatcacaaattctaatgcctttcatctcaaggaatttaaacctttatctcttattattttgaagaagaagatagaattactccacccaaatttatgacatttttcaatgaatttttcatagctacaaaaaataataataacccaactcaaaattataacacatatataattaaagttcaattctttaacaccacaaattctaatgcctttcatctaagggagtataaacatgattttttccattattttgaagaaaaaaaagagcaagatagaatttctcaacccaacttcataacatttttttcaatgaatttttcatacaaaaatataaaataaaaaaaaaataacccaactcaaaattgaacaagtaataaatccaaatcacatattatcaaagttctattctttaacatcataaattctaatacctttcatctcaaggaatttaaaccttaatttcttattatttatgagctaaaaaaaaaaaaaagaaaaaacttacattttcaacttcttaaccaaagaaaatcataatattaatatatataaaatcccaccaaagaaatcccaatttaatatataataccaaaaattacaaaagataattctaaatctaaatcacagcgcagatctgattaaatacatggaaaaaaagacatgaaattcccagaaaaattatataataattacattaaatattccaaacatatttttttctcttgaaattaaataattgggtaattaacaccaacaaaaaaaaaaatataagatcggatttgaatttgaaaatcagattaagcttactggaaatctcttcgatggggctgactggcggtaatcggagatgagaaatcggcttacgttgttctcaggtaatgatgatttagtattttagggtttagaaaaaaaaaattaaaattaaaaatcgaaactttagctttgaaagtgagaaatgagattggtttttgaaaataaataatgaatttgagtgaagaagtgaaagaaatcagattgaaatgcgtcaaaatctcttttagagagagagagagagagagagagagagtgtagaagaagaacactcactccattggagacacttttttgatatatttgggtttatttgattgggcacaaagaacaaaaattttcacattgttttgataaatccaaatttaatttggatttttttttcattaatatatttaaataagatttgtttggagatataattaggaaaaaaattattattgttaaattatttttaggaaaaaagtttaatttttcaagctaattttttttgttgtgtaacacttctcgtaaattatagaattagttcggaagaaagttcggtatttagttattgagaatcgaagtgtattttgatgggaactacatttttgagtcacgtggtaagaatttttcagtcttctcgactaatcttgtggtgccatatggctcgagaagatctttgagaaggtcttttctcgagatatgtagtactgatattcttaattatataacagctaaacacaaaataatgaacgttgattaattcttccttattaatttgagattttgaaacttaattttttagaatttttaaggtaactgatgatactattttgcaatcttctcgactaatcttgtggtgccatgtggctcaggaagatctttaagagggtactttctcgagatatgtagcactggtattcttaattatctaacagctaaacacaaaataaaaaggtttgaacgttaattaattcttcctcattaatttgagattttgaaacttatttatttagaatctttaagatagttgatgatactgatttgtcgcttttagaaacattacataatttttttaggttgtaaagaaattgtaacgcatccaattaacctaatgagataccaaaacgtgtatatttatgttttatttagattgaatggtattgaaaagctgttttaaaaatttattgaagtcgctttaagacaatattatttgtgataccgaaaatttattttttggtaactcattaatctacggtaattttttcttaatcaagcgaaaaagtaacttaggtttactttttgaattatttcacaaatcaaccctaaaaatgttatgaaaaatggaaaacctaaactcacaatcttaaattctttatgtgaaaacacacatgacttctattgcctctatcacaatatgtgggctaagttcgtgattagggcccacttaaatttaaggcccaaaattcatataaatatatagagaaaaaaaaggaaaatttacaaaaatactgaaatttgggttaactttt

SEQ ID NO: 36777 - DNA, 3985 bp, Cannabis sativa
  modified_base (71)..(92): a, c, t, g, unknown or other
cgcgtgcaacacactgtttgaacataattttcggtgtgttaaaattttccaaatttcttaaaattttacannnnnnnnnnnnnnnnnnnnnngtacatgaccatgagaaaaaattggattaaaaatttatttcgaatgctaaaataaataggaatgcattaatatatctattttaagagggtgcattgtattgtagaattttcctaaatattattctctcatgttatacatcggtaataatacgtaccaagcatgaaagaggtcgtccaatactttattccgtattaattaacacaacagcaacttacataatttatgctattatttgagtattattattatccaatattaccgaggtgagttgacgtcttatccatatttattattatttttataatattatttaattaaaatttatgagaactttctaatatggagactaaagtattctttaacatttcttcaccagcgaaatactaatctatgatggatctcatgcaatattatcacccaccgtttaattaatagcgtagctaatagatccatatagtcatagattgggagcaaagtcgtgcgttgacacgtcaaacatcatgcagcaaacaaaatgtaatcttatgatcaatcaagatacttattaaaagagcattgttattgtgtaccactgttgtcttacaattgactagcgacactctctaaaagttattatattaaactatataagacccaatactaaattagaccaatagcgatgatattgacacgtatgagggtgcttggtaccatttgtgccttttaatatttctcttattaaaaagtagtatttcatattaaatttgacacattaattaattttttatttattaaaaatttaaatttttgattgaattaacataagtagttaataattaatgtgtatttaaatttaaattagtttaataaagtatgatgtatgagcatcacgttttaacaggaatcttaattctcttatgatataaacatggagtaagtcattttagtttgagcatttgctggttttttttttttttttgttattacaaaattttaaattaatatatatattttttaaggtaaattaaaatatatttgattctatattaattaacttataccaataatattcttaaatagtgataaatagtatacatcattaattacatttctcttttggccagtctctaatttcgtgattaaacttagagcatgtgatatgtttatgtagtgtccccacaatttaattatgacattattatatattttttgtcacacattttaatttaaattagagtaatataagacttgatattaaattatttttaggtgttggaaactataaaaataattctcaactaaactaataaactcaaatcaaagcatataaatttttaaaaaagatatgcataatattattaattcatcatattattatgaatatattttccctatttatttttctatatgtaatgttatgtttaaatgtacataaaaagtataaagaagtaaaaatgaatatattttttttcttatttaagcatttatatatcacaacaatatgtaatttaggactcgaattcaaaacatccaatacacaagcaagctagtctcaagtggtaaaaagaaacctaatctatggaataagtgttatttatttattttggtaagcaaaagaattatatggaaaaagtgttatattacttgatgattgatgagactgttaatagaattcaaataaaggaggacaaaacacaaaagttgtgtacgcgcccaccccattttttcctcatgtacgtatatattcaactcatcactcttctataaataaaaaccaaactcacaagccaaaaatataattcataaacaaacccagctagagttaagcaatctcaaaaccccccattcttttccctctctccctctttactcttatcacactcatctttaaccattctcttgaaaatgactcttagagactacataaatttttcactaattatagttttagcactcctttctgcttctccaaacactgtttttgcttattctcttgaagaagtcaaatcatggtgtagccaaacacccaatccccaaccatgcgagtattatctaagcacttccgactttaatagctatcacactcatgggagcattaaacaaaattccgacttttttaaaatatcaacaaaggccgccctggaccgggccgtctcagcccacaacggcgtcgtttcactcgggcccaaatgccgtaacccaagtgagaaggtagcttgggccgattgtctcgagctctacgagtacacaattcaaagactcaacgagaccacttccaaaactgatgacaagtcatgcaccaaagatgatttccagacttggctaagtacggctctaactaacctcgacacgtgtctttctgggcttgttgagatgggagactcagacaatctcctgccgttgattaagtcaaataatgtttctaaattgattagtaacactttggctataaacaaaccagcttctgctgctactgggtccaacactaataaagatgggttccctagttgggtgaggcctggtgaccgaaagctcttgcagtccacgtcatcaccggcttctcaggccaatgttgtggtggcgcaagacggctccggcaactataagacgataaaagaggcggtgagcgcggctgggagtggaaaagggagtggcaggtttgtaatttacgtgaaatcagggacctataaggaaaatattgaaataaagaaaaataatattatgttggttggagatggtattgggaagactattattaccggaagtaaaagcgtcggaggtggttctaccactttcaattcagccactgttggtacgtatacatattcctatatatatactcttgattaattattataattatattagttaataaacagtttttacttaataattagttgttgatcatagaataattattagtacctgatagtgaaatgatttggattcatatgcttgaattccgtaatttaacaatataatatttataaatatataatgaaagcaaatttaattagtactaggaaggaagattaaaatatattaattggaattattagatactttttagcaattaataagcttggagatattgtattatataaaaaatggtataattaattagtcaaagttgttaaccacttacggccaagatgtaaaaccattacgtatataaggaagaaatagactatagagatttggactttcttttgtgatcatctagaaaatacgtgaataaagaaaatatcaaactagtacgatatagctttgaaattaaaaaagtgtttaatatgataattattaattattattatgtggtttaattttcttttgcttatgtatactcttccaatattaattaatttcacgtcgaaccaaactgtgtggtgtgtgcataccttgagaagttatattttgtgactaaaaagcggtggaccatatgtggaaatgggatcaatcatgaagacttgttaataaaaacacaaacatttattaaacttacacaaagtctttgtgtcccagtcaccaataaaaatagaatagtgttatgaataggtacttatggagttcaatttggccaccatattatatatggtggtgtcccatggccatatatatactcatatactatacataaatgttgataaataattaatataaatattggattactaaaagacatatttcattaaaataactcatatttttgtataatctctcccacccaaaaaaaataaataaaataaaaatatattgtaaaagtatttgtaaagattttttattagacactactatatatatatgaccttgttgacctatatgacatgtataattgtatttatgaaaaaggacatctgaactatctttatagattattaattaacgctcatattcgattaacaaatggtatatt

SEQ ID NO: 36778 - DNA, 7691 bp, Cannabis sativa
  modified_base (56)..(63): a, c, t, g, unknown or other
aacattaaatgttaattctgatctatattaataagaaaatctgattatattgaaannnnnnnnatttaggtcataaaacccaacacaaacccgctcaaaatgttcagccctagtgcccgaccactgccaccaattatgccaaaattgtggcaatggtcggccaagtggtttccataccacttggtggcttctttcacttggttttgacatatcattggtgaaaatgcattattagaaaaaaaaagtatcactttccctcttcatcatcgaccactgcaattcattgtgccacaaagatggcagtggttggctaaggttggtccttggtgggaaatggtttctctcacttgtttgcactccttggtgttgaaggaacacatttatacaattttcccttcatcatttgtatgtagcgaccactgccattcccttttggcagtgctcttcaaaattgaagagcactgtcattttcttgtggcagcgctcttcaaaattgaagagcactgccatttccatatggcagtgggtgtatgtgccttgttccttgagggcttgatgccatattgactttatgcataaatctaagtcatttcatgcctacatgagtcaagttcttgttggtttccttggcagattaagatttctagggtgaaaacgctcgcacgggcccatgaaccttaatttaggcacacttgggtgtgtgagtcccgatgccaaatggtttttttttttttatgtttttgagtcctctagaagtgtcatggggccctcaagaaggatgtcttaactcatttgacatttataagtcttggtcaaagtcataaggttgacttttttgaatttttgaaaatcttgtataacattcgcccccccaaaagtgtttgtcaaaaacttttgggaaaaacttttgttattgtacccttcttgtcttgaaaataataagcatgtcgccttttgcttattttgttgtctcttagagtactcggttgagactgtcgtcattgagagtcagttctattttctaagcgacttatctcgaaatttgtggaatttaaactttattacgtgaaataaatttaatttgtctaaggaaaataaatttccattttttcacataattaaatgttaaaatcataaattttaccaacacaaataacaagtgtcacaaggagatgagtaccaatggcacctacaataaataacatgtgccaaataggccaagggcatttttggaaacccttggccaaatgaaaggcatagccataagtcttattttctttataaatgcaatcccctcccacttttcaaaacacttcatcacttttttaaactttcactcactaacactcaagaacaccatcccaccattcaattctcaaagggacggctagggattctcaagcactagcaaagataaaaaaaaattccctttcacttttttttattattttttcgttttatcttctcatccactcattaactttaaaaattacaaaacccctagaaatccacattgtggccatggctcttgcttggtgaaaggaaaaagggcttttcaaaatttcttcaaggttttttggaaattcaagcaatttttgaggtaatttttaatttgtaattggttttggcattaattacatggatgaaatgattgtggatatagaaattaggattgaatttgtgttttcttgaatatgtttagatatatgttgtgggaataatgtttggataggttttgaatttattgtgacattggtgatgaaaattgactaattgggagttgaagtagcaaatttgggcaagaagtgcaaacttttggtataagtttggactatggaaaataggtcccaccaagcgtttgatgaaattcccaagtgagaaaaatatgtgttttttgtcactttgggtgctcggatgcatgtgattttcacaaatactttattagattacttgtgtcgttgaattgtctttgtctcgatctggcatgtccccatgtgggagttcttgtggccgagagcttcaaatgattaagtctctttatcattgctttaaacacatagtccctcgtgatggaccatagccacgtcatcattagtgctaatggtcatctccataggcgccccattgtaccacgtaagtggaggttgcatgttgtccgaaataaggtcacatcggtgactttttctatttttttatgactttaggactacacatgggctccaccaaatacaattaagatacttttcttttttatatatatatatatatataggccacgtcacttttctcaagagaaataagtaaccccttgccataatttcttcctcaggttctaacttcctttttgtttttgttaatttttcaagaacaaaaagagagttgtgggatccaaaactatatcatcatgtaacaatctggcgaatatagaggaatctactcattcaccctctactagtacctgtaaaccccctccgcggtctaggaccaaatctgtgggggtgtatttcgaggcgagctgtatcacttcttctttcggaagcatgttccaagttagtgattgccttagagttcacgagctcaacctcggtgttggacgactaagaagagtcttgactcccaccgagtgcagctattctcctcctcatgagagcatgtacgcgtggggcacttccttgcttatggcgaggggtgcactcacattagcctctgattattgggacatccatggagccttgggtcttactcccttctagctatcctctaatagctatcggatcttggctgggcttaagtccctctatcatattagatcttggagacccgacacctgcggaggtgttgtacatgtactagccgagggccaatccttttgggaaggggaaacatagcgatagattctattatctgaattgtgtgaccactccaataattcttcaaggtctcctcgataaaccacctgataagaaaaatgagttcttctgggtatggggccaatctgacaggggcaaccatgacttcaagcgcacaggtacaaatattgcactttggctccatttaatgattgttattcattatatatatattttttttcgaaagtgttgacttgcattttcgtctttctaggggccattcacatccaaccattggactggttgaatgagagggtgagtcttctccaaagtgttgacatgcgcaagcgaaaccttcgctttcttcttcatgacgaacacctcaggccgtgcggtccattaaaagatatggggaagattgtggatgttttccttgagaaagttgtcaattaagaaggttttcctgactcgactctcccttctcaaaaatagtgagctaaattggtgttgactatgacagccccgtccaaaatttctaccccgaacataatgggtatgagaccagtaatccggggggtaaagtgtgtgaattttaccttaggcttttaagtagagctgggtggttccccttcatacccatgatgagtatgaatattcattgcctatgtataaggaagtagatgggaaagtccatagatgggaccattggttgatgagtggggaactgctttatgtgagtagccccaccttgaaagtactgtacgcatcggggttggatcaatatggctccaaccttatgtctgaaaaagataatactttagttctccccatggagagagtgcatatagttttaggacaaggtattttctttatttccttgcttgactttcttgacttgacttggatatatgcttgtggttgcactttgtctttatgttgtttcccataattatgtcttgcagtatacttgttgcgtaataattcttgtgatggctgacatgtatatttccctttgattttttaggtaccatggacgttttagcagcctctgtcaaataagcatctaaaaggcaaagggtgaacaaaaaggccatgcctcctcctcaagccaacgagactcccttagcggcagccgccccaactcaaggagtcccactaggtgctaccgttgcaccttcacaagaggttcccacatccacaggcttctctcctatggttgcttcaccttcgggcttggctctgtccagcttgccacctttgacggctgtagtagcactacctgcgatgccatctgtttttctagtggcccctccttttggtcaacctcggcacccagtcatggggccgccatcttgatttgcttctgagcaattttttttcaatcagttggcccagggacttgcattccagggagaggcttctgatcctatattgcccaaagcaagcaagttctgaaaagtattagctcgagaatttcatctttacacacctcaactaggggggctttcgacagtgatctggtcccaataaataatttggcgcaacgacgcctcgactcccttgctatggtgattgaacctttaccactttagcttatgtagatgtatgtatatatatctattacttttttttttatgtagatacttatgatgtcgctgactgttttgctttgtctttgtagttcctctttgatgacttcggcctttaccagaggaccaatgcctcccataacatatatccaaagaagtgtaaggacctcgagaaacgcaatgtggaagccactttgacaattaaggagcttgaggagaagcttgcttcttttgagaggaagttggaggaagcaaatgccaaataaaaagttgttgaggaagaggccaaaaccaagaatcatgagcatggttcgttgaatgccaagtttgttaaattggaggctgagtcgaaggttatgactgacaaccacaccgcaaccatggataagctggagtcggagaatgtaaggaccattgagcagataaaaatatatcacaaggcagaagttgctcgtattgaagagcttgccaaggagaacatttttgggatatcttacttgtgttggtgccgaaaataggacatggacttcagcttcatgggcgagattttgggtgattttcaagagcattgtcgcaaggcccaagcgatcgcaaccaccatcgaggtcactgcagcggaagccaaggagaaaggagaagaggtcacttctgaaccagccccagagtcttgaggagaggagttacacaagggtgctggcatgttggcggtgctctcccttgtggtggcgttccatgtgagagctgccatgtgttagtgctctccatgattgactttaggctttttattagttttacagtactccatgcgagagctgccttgtggcaatgctctccatggactaattttatgcactttcttatttgtatgagaacatatttgtgtttatgtctccttgtgccacatacatttattttggttatgtattgatatttgggtccatatggatgggttcactcattgtccacttggtgtggagtgctcgctagttaaagctaacaagtcttttcacatctttggaactttttaagcatatataacttagtttattccatatcttggtgactttaaaattttaagttgaatatatttttttggcttattttatttcgatgcttattatctttgtaacgtggggttttaaagatcacattagctttattaccaatggtggcttgcatttttactagtttgagcaagttgtcgacatgggtcttaactctttgggtactcaattttagcacgcgacccacttgtcaaagtctccaatataggcaatttgagatgtctttggtaagtggaatttttgagttatggctccttggagcgccctcatttatcttttatgtcgctagtgtaccaactttgccccctgtccgagatgaaattttgaaaatatattcatggcaatttttttaaaaaaatttcttgctgttaaagtggcgtgttagtaatgacattgagatttatttttattttgtcgatataccgactttgcccctacccgagatgaaattttgaaaaaaatatccatggcaaaattttttaaaagcccatgctcagaaagtgacgtgtcggcaatgactttgagatttattttgtgaattgatggagtatagttatagcctagaccatatatgccccccaagttataaaagtattgggttacttttgtaacttgtttgggtgaggacgtaacattataaaagaaatatttttgcaaaaagtgtaaacatttatcaaaaaataaacaactgattatctaaaaaggaattttaaatgtcgtgcttttggaatggcacttaacaactgaaaaactaataacattgttcaatcttctgaaaagaaaataaaagctaaaaagactcggctccacatggcttctcctagccacttttattatcttggcaagtgtgttcaaaagttgtggcttggaaaagttgagttccaggttgggattgacctttcattaccacactgttgcatactcttgctgccaactgatccccacgcactatgccattcccatgatttgttggtaaacttcatagaaaaatttctcattgatgttgccggcgccagtgcgataagcattggtgttcccattattacattataaactgatggaatgtccaccgcgacaaatttttttatttttgttacagtttacggggcctctcccattgtgagagggagagtgatttttccaatacttgatatgccttcgctgataaatctatataaatatgtgaggcatggttgcaagtctcgagtctcaagtcccatcttattaagggtggacttgtatagtaagttgatcccagttccattatcaacaagtattctataatggtgtttttaaggttaactatagtggtgcaatattttttatctaattttatttttaatttttttttcaaacgataattagatcgctgattatttaatttatttttttaatattaatcttaactgtgtttctaatgtgagaagatgtcaaaactattattttaacttattagtattaataaaaggattatttttcttttcagttttaactaaaaaggtaataatattacaaaaatactttcagctgaccaaataaacaaatatacagcccaaataaaaaattacataaataccacttacacacacgttcaacccaagatccatgcttcttgggcaactatcacgcaaccacgtaacaaccaaactcaattgaaacgaaaattcaacgaaaaagagaaccaccattaattccgacgatttcacctgagaagacgaccagaatcaatcaaaacataggctgtttcgaattcataaaaaaaaagtgtagaaaaattactacgaaactaaaaattcaacaaaaaatccaatttaatttgcataaaactaatgtcctgacttcaattttcaaatccatgaaagacatatctcaaaaagttgaactagagttctcaaacaatccaactcaagtataatctaaaaaaaaaaaattacatcaatatagtaaaatgtttatcttggtgtattttcgttgttttctaaatttctaatggtaaatttgttaatattaaatcataaagagacatgtagataaagttacgtacgtgaaaacaatgttatgatttttaatgtttcataaaaattttgctaacagctattttgtttgattgaaaccttcgtctgatgcaaccttcggccaaccacccagcaaccacactgcaaccattgtctgattgaaactttcatctg

SEQ ID NO: 36779 - DNA, 3003 bp, Cannabis sativa
  modified_base (76)..(82): a, c, t, g, unknown or other
tctcctgagttagttgccattgctttggctgatttctcagtttaatgaatactgaaatttttattcaaaaaaaaannnnnnntatatatatataaattaataataagccactttttttaaagaaaaaaactatatattatcaacaaaatgtataataataataaaatagcagttttttttaaaaaaaaaaacatcatcttcagcaagattttttttttttttttttgcacaatatattaagcaatattttgatttattatcatatgtgaattagttcgtgtgattttttgtgtaaaaatgtatgttatggaattctataattaaaaaaggtttaaaaatttataagttttatctatagtataatctatatacattatttgatttaaaactacatgtctcatttattttaaataatgttattagttaattagtgttggcacttacttattaacgtatcttattataaactagcaaacactaatacatttgttttttttttaatagaaaggattatatagctttaaagttttaatacacatagttcaaatttttttgattttagttttccacaaacgtacggcaattacattttttcctaaacaacttatcacatgagtagtcaaaaatagaaatagctgcatacaaaatctagacgtatggtatcataagtggtcccctatattttgtaaccaatcaaatacatgactctatgcgattttttttattctattttaagattaaaaaaaaaaaaaggtgtatatatgtacatctaggaacttttatgagctaagccattaaaaattcgacatgtagaggtaagatatctaatcaatttattatatatgtaaccactctaattctaaaaaatataaaaacttaaacagagtcagagaacgtgcggagaaaaacctcttgatggagataaataattagttttaaattggcctcgagcctcctcatggcacaaaatatattccttagaccctcaatttgagccataaacaaatcattgcattccaaatccaatgttgctaaatccacatattgaactatttaatataataaaatattatattaattaaggcactctcgagttttttctactctatttattaaattttttttttttttattttagcttaaatttttatattacaccatatataattttttatatttttactttatatcataaaatattatgtatttaaatattatgtatttatataaataaaaaatatgagagaggaaataattaaaagaacggaagaatataagaatataaaaataataataaaataagtttggaaaataattaaataatgtgtagttaaatttagaaaatgaaagtgtttagctaaatttttttgaactattttagctgactatttaacttttttagcttttagttattatagctcgatcactcaatgcaaattattattaaacaccacggatcaagtcaaatatctttatatattaaaagtacctatctaacgccaattcttggtttaacgattgtttttggtttatctgtttattttaacagaatatacccttctttaacagaatattcataattaattttatattattttataaattattctaataaaataaataaaattattgatattttttcaatcgttaactgacaaaatgaaaaaaatattatacaatttaggtatagcctaaaaacttggaaagtaattaagtattatataaagtagctacatcctttttgaatttttgtagcctagcaacgagaaaacgacaccagcgttacaagaaatcaccgcttcaaacatccatggcaaggtaagttgatccttattttcacatgtctctaattctcttctctcctatgatattgattcttttggtgttgatctgttggttactgtccttgagtcagagaagaagccaatgttttttttttgaaaaagcttaaatggatgctctttgaagatgtaaaatatttcaaaaagctaaatgggtgctctttggagatgtaaaatttttcatgtaagtttcctacttgttgggttatgtttcttaaatcaaggctgtcacgttcaatcaaaagttgggcgccaactgttcgaaaaaaattttcagagtctcatcaattaattttccatgtagagtgtgttgttaatgttgttaatgttctgggttgattcttgtttgtgggtttgtaatctcgtatcagagaaaacactcaaattttatactaattaatcaccgctgttgacattgaatttttgaacagaggattccgatatggtggagatggtactactgggggtgtccgatagcgtggagcttgtacggattggtggtatcgcagtatggtgatgtaaaggaagaaatggacaatggtgagagtgtagaagaatttgtgagacgttactatgggtatgatcgagaatttcttcctgtggttgctatcgtcaatgtggctttcactgtcaccttcgccttcatctttgtcctttcccttaaggcattcaattttgagaggagataattaactcattatttatttattcttttttatggtaaaaagtgaaaaataaaatgattaatataaattattgttgaagagtatatgattattaagtattcgtgtatattaaactttattcgtgtatattaaactttatttaatattattattttacatctaaagttgttagagcacattaatcagcagtgatgatgctctcgagtaagttttttcctatgaattgcaggccccgtttttaatatgagtttaggatttttcttactttgattttcttacttggtgagatggttgtgtgagtatttaatggggctgtttttcattgtgacaggtttattcaaccaactttccatttcacatcaagaaatttgcaaagaggtttgcttgcattgcaaaatctgttttttttttctccccttacttcatgttgccagtgatttcacaaataaaacgtcaagacccaattctcacatatt

SEQ ID NO: 36780 - DNA, 4867 bp, Cannabis sativa
ttgccaatacatggttttcatactatccctgtgatccgccccatatagaaatagcaaaagaagtagtaaaaggatacatggggtcaatcatgatgttcttttttgtcaaagaagaagcagcagcagccgtgggcttttgtccatgttgtgataactttattattcagatgtgggttattgtcatttgtactttgcatgttcatttgtgggcttacacaccggcacattcatttctttatgatttatgtaaaaccagctattgataacatgctcactaattataggatttgatcttaacatgtttatattttgattgcaatgttcattttcaacagctcccttttcctgaagcatcaatacggagttggttacactctaactttagtaaaggtatacttactttctcttttgtgttttgtggctcccatttaataatttttttctaatgataatagaagaataaacttgttgtggccttgctgttttacttcttcagtctgcacctactgcctctgtagctgctgacattgtttatcgccatattccatcggctacatgtgtgagcgaggtattcctgttattcgatgacttaggaaaatattgttagcgattactgcatccattatgttaatattatatttatatcaattatcagatgttttttttttgaaataattatcagatgtttgatgaagaattttgggatccttactttttattttatatttgaatgatgaaacaattttaattcaattagggaatagttaggtggcggtacgaggacctctaggttgtggtttgcagcaatattagctagattttgggctgttggatagagaagaatggtaggatctttgacagtacagaacatgaagtaagatgatttgtgggagaatgtcaagttttggcttgcttcgcgggtttataaaaccaaaggtgttggtgatctgtcatttcaagatctagttagagaatggggatgtatcttggtccaagatagtatacacttggcttcggaattttgaagtttattgtttactttaatgtaatgaaggcctaagtcttttggtataagattgttcgttttttaaatttaatattttgttaccatggttttactctgccgtaagtgaggctccctaataatatgggaggaggtcagtctaagcaatcccaatcccttaacatgtgagaacataaaaacaaggaagaaactatgacactctttagccatataggaacccacaagaaagacactaatttggttttaaagtatctataagaaatctatacaaatgtacttaggtcggtgcaccatatagctttttgttgatcttggcatttatgtttggggtaaattgagattagcctttctactgattgttctcagattaatatgaaacaaaagtaccgtgaattactaaaaatttgggatagggctatattttgggtggcccatggatgatctcaaagttcgctttttctgagttaataagagtttggcatcatctttggctgtgtagtatgagaaccatattaatcagatattaggtgggctgtgtaattccatttcctgtggattcttgcaccgtattttgcattctgatttgatcatgtttcatagcttaattacctatgtggctttaatgtttctccaggttggaactgagatttctttcaagcttcctatagcatcttcaatgtcgtttgagaatatgtttagggaaatagaagggtgcatgaaaaaaccagattttgacgtaaaagcaagtgatggtgaagagagagattatgctatgattgaaagttatggtatatcggtcacaactctcgaggaagtattcctcagagttgcggggtgtgactacaatgaagctgaatgtttagagcagaaaaatagtatctgtttaccttctcctgtgacttctcaggttcctcatgatacagctcccaaaaagattttgcaatctgacaaacttttgggtaactataaagatattctgaggttcatgtgtactgtggtggggaaagtttgcgggttgattttcgctacaattttaagtttcattaacttcttaagtatgcaatgctgttgttgctgtatcatttcaaggtcaacattttggcagcactgtaaagcgctattcataaaaagagcaatatctgctcggagggatcggaaaacaattgttttccagcttctgattcctgttgtgttcttgtttgttggtcttctttttctcaagctcaaaccacatcctgatcagcagtctgtgaactttacgacctcaaatttcaatactttgttaagtggtagtggcggcggcggtccaattccttttgacttatcgacacctattgccaaggaggtttgtcagtgataagtctctctgataattttatttctgtctttgtttccttgatatgaagtacattctttttgttttgtctcggtatgtttagtccaatgtttgctaccagccaccatctaatagcttaaaattttaggtaaattggtaaactaacaattggaccttcactctttaactgccactatgtgtgtgagcaggagtgatgttagaatatagttttctgtttaatgcatgcataattttctcttagaacctatgtttgattgcaggtatcacagtatattgaagggggttggatccaaagctttaaacctagtgcatatcgattccctgattcagaaaaggcactaactgatgcaattgaggctgcaggacccactctgggaccagttttactttcaatgagtgaatatctaatgtctagctttaatgaatcttaccagtcaaggtatgtcggtaaaaatgttaagagttcctttcatttatttcagttaagctatgcaactgctgctattctatcactttgaatgaaaattatataaatttcatttatgtcgttttaatttttatagtatttgaaatggatcttctgcctcacttctaccaatttcatgttcttacaaaattttaagttgtgtatatttccatcacaccagtctcttgagattgcttttgacatttcttgcttgctgtctcttcctctctttaagaaaaaaaggggaaatgaatatatgttctgttttctctcggttcattttcattttagactctgtttgttgcagatacggggcaattgttatggatgatatgaatgaagatggaactttaggatacactgtactgcataacagctcttgtcagcatgctgctccaacttttattaatttaatgaatgctgcaattcttaggcttgctacccaggataaaaatatgacaattagaacacgcaaccaccccctgccaatgacttatagccagcatttgcaacgtcatgtaagtttttcctttcttttaaatatatagcttaatggtaaacagtctcatttttaaatacagaggaaggggaacgtagaaacaagaatccaaaaagtatgtgcactgtttttattgttttttaaaactgtcgtgcagattaatttgttcttaaaaatcttcaccgtcctcccttacatcacttcagtctttttagcttaatattaaatgtataaacaaccattgaattataactgctggtcccatttaagttgaaatgctaaaatataatgaaaagttcatgttccacaaaattgaagagatttgaataaacaggcttgttttccatacttgcgtccttatactatgcgagctaaattcaaagatcaaatattttgtagttgcatgtccgatttttttaaacaatattagaatgcttcacattgaacgacatcacttctctctctctctctctctctctctcttaaagaatttgtagactttagcaatttgagttaatttgtaaattatgcaggatctggatgccttctctgctgcagttattgttagcattgccttctcattcattcctgcttcatttgctgtttccattgtgaaggtaatgatgagtctactacttgtttgatactctactaaagaacttatctttcatggagtttagtatatgcaataggcagtggttaattcaagttgatttgatgaatcttgtctattgtttttacaaaagcaggcctctcctagttgttgaatgctctctctctctctctctctctctctctctctctcagtttatattttcattgtctttgtataatttgtaatgtggtataattttttatatctatcatggatgagtaagtttgttgggtttaattgatgtaggagcgagaagtaaaagctaagcaccaacaactgataagcggggtacgtgtattttcttggaaaacaaattttattttgtcttgtctattagtaatttagcaattatgttttcattcttcttgaggttcacactggtagttttccttgatcaggtttctatactttcatattgggcttccacttacatatgggacttcatcagcttcttatttcctttctcatttgcaattggtctttttagtatatttggtatgtcttatctttaaataatattttatagagaaaagttgttgattttgaactacttcattgttaaaaaattggatcactttgcaactcaaaatgcaaaaaaacgaatatcaatttaatttttttattttaatgtattttataaagcatacaaactatttattgagaaatctgttacttaaaagtgttatgtagtgttttttttttaattttttttcgtaaatgctcttttttgtggtgtctacatctgctgtgtttaaaataaatatataaatgcatgtattttttgagcaatgcattattgtccagaatagaataagcctgtttaatttcacttttacttacactaaaattgattgtctgtaggtctg

SEQ ID NO: 36781 - DNA, 3868 bp, Cannabis sativa
gataaatataataccaacagaaagacctcaaggttcgagaactaggagcaggagacaactcaggaaaatccccaaaacactcaagaggaacaacctagagaaactggggatgttctagaagatgaacaagaaaagaatctggcaccttgacaagaggtacctcggagaccccagggattcacaaccaggggaatgaaaacaatgaactgccagaatcttctcaaaggaatgagaactaatgcagcccaaaattagggaataggagatcccttgtaataatgagagaaatcctaggacacaacctaggacaagtgggttactctcgaggcacccctagcgtccttctcgaattggaagggaggaggcatacacataccctagcggaggatgtatatctaacccttcccaaaggagaaggcctatgtaggacgaggaaagttctagcttgggatgctcaagatcacgagatcacaatcgatctacgcaaggaggggataaacgtcgacgtagtgatgatccacaaagtatgagtaatacgtggagcagtcaatccgagagttactcagatacgaggtcgatgagcaaccctgaacgaagatagccaggtcttcgtgaatgtttaaatcggaaagaacctgatttgcgcgagcgcttaaatcataatgcacttgatttacgccaataactcaatgccaatcgaaagcaagaggatcgaaaccaattactaatcagtgagttggaaaataaattcaagagatagcaagatgcgcaatatgggaaactgcctggttatgaatcagatgaagagctcgagcctttccatccattcattatgaattcaaaattttcccaaggattaaaaacctcaagtcccactgtacgatgggacttcagacccggtcgctcacctcaataattcaatactataatgcgagacaacaatgtatcgaataatttatgttgtattttatttcgcacctcattgacttgagctgcgagtagctgattcaatatattcacccatcactcaattacttcttgggaatagctgtctaaggatttcaagaaactatttcgggtagcaagagacatgtgacctgaagcgtcttcccttactaatgtaaatcaacagctaggcaagtcacttcaggcctacttaagtcatttcagtacaactgctgctagagttaaaaacttgaataatagtattcagcttactgctcttcaagtagggattacaactgacctctcaacacttggggtgagatgtgggatgacttacagggtcgccctgtgaaaaacattagtgagttcaatgaaagaggtcaagtgtttgtacggaaagaggaagtgaggaacgagatgaaatcatcaaatactagcttgggaaataaaccagcactgtctcagcaagcaccatctcgacaaaggatgacaatccaagtggctctaacactaagagaaaagatgactctagagaatcaactaaagataagaaaaaataaaagaagcacaataagtatgtgccaatttatactatttataacgagcttaatgaaaattgggaaagcattttccttgcaaatgagcacattgttgcattttgcaagcctgagcccatgagatatgcgagacactagaggaacgcaacgaaattcggtagatttcacatggacatagggcatacaacgaaagaatgtagtcagttgaaagatgagatagagagccttatctcacgggataatttttaacagtatgtaaggcgacaaggtaatggacaaaacaagccaaatatgcccaataacccacaacctcctcctgtagaagaagaggaaattttggtcatctcgggagggtcgcatcttgctggacaaagcagtaatgcccaaaaaagatatgtcaaggaaataaaaaatgagcagtcagtttttgctccagaatcatgtaagaaagtcaagaatgaagaacctccaattgtgtttttggaggaagacacaaagcacgtgaggtgtccacacattgacgaactcgtaattacaatccagctcaccaacaaaagaataaaaagcgtgttggtggataatggaagctcagtgaatatcctttataaggatacactgaagaaaatgggattgcaaaatgcaaaattgaaaccttgcatggtgaatctgtgcagatttgccggagataatgtcatcagttaaggcattattgaactcccatcgaccgtaggcgagccacctttatccacaaccttaatggaagattttctaattgttgacctaccatcgccctataatatacttttgggtcgtcctgcactaattggactaggggcagttagttcaattaaacatctatctttaaaattttaaacaccgacaggagtaggtgttgtgcgaggtgaccaactactggctcgtgaatgctattgtatataaatacaaaataaaaaagccagccatcagttaatgggagtcatagcggaggaaggcgagaaacaagatgaggatctagatccttgaattcaagacgaaaggaactagttgaaaccaatcgaggaattggaggaagtttttttagatctagaaaaacccacgaagtgtgtatttattgggaaaaatctagatgaaaaactaaaatagcagttaataagttttctgaaggcaaaccaagatcagtttgcctagagccattcagatatgatagggattgaccctaaagttatttgccaccacttgaatatcgagcctaattacccaactaagagataaaaaaggcgaccattggattctaaaagacaaggaacactcaaagaagaagtagacaagttactgactaacaacttgatacgtgaggcattgtaccccttgtggatatctaatcatgtacttatcgcaaaacaaaatggaacttcgagaacttgtatcgacttttcagatttaaacaaagcatgtccaaaggattgctttccactaccaaggatcgactagttggtggacactactggtggacacgagctgatgacattcatggacgcatattatggatataaccagatcaagatgcatgtccctaatcaagagcatacaagtttcgtaaccaacatgagactttcttgttataatgtcatgcctttttgtttgaagaatgctgggacaacgtatcagcgactagtaaatgaaatgtttgaaaagcaaatagggaggaacatggaagtctacatcgatgatatgttggtaaagttggtaaagagtgaagatcaaacaaaagacctcgtagagtgctttgagatactcagaaagtaaaacatgaaactcaacccaaagaagtgttccttttgtctccttagggaagtttttaggattcatagtcaatgtgaggggcattgaagggaatcctaaaaaaaattaaggcttttttagaaatgccatcgcccacaaagccgaaggaagtccaagccttaacaagaagaatggcagctctaaacagattcatcttgaaatcaaccgacaagtgcttaccattcttcaatgtgttgcgaggcaataaagagtttgaatggacacacgagtgcgaggaagccttcaaaaacataaagaaacatctatcaacacctccagttttggctaaaccagtaactagagagactttactcctctacttggctgtcttagagaatgcgatttgtgcagtattagagcgagaagagggaaggcaccagcaactagtttactatgtaagtaaaaggttactaggagcagagtcgagatatctccctcttgaaaaacttgccttatgcctaatccatgcatctcacaaactaaggccttagttccaagcacaccccataaaggtgttaaccgat

SEQ ID NO: 36782 - DNA, 2718 bp, Cannabis sativa
  modified_base (1377)..(1384): a, c, t, g, unknown or other
ctctctctctctctctcttaatgtaaaagaaacagagaaattaaacttgttcaaagtgtagatagctagtgtgctaacacaacggaagactaaagtaaacaataaaacataggaaagaagaagaatattaacgctatatattgatagctgaatttcaaaaatgtaaaaaaagaaggcattttgatcatataaaaagttctttttttacttttagaacacacaacacaacacaatgcactttgatcactccaacgagccttcctgtacactacaaaatgttcttatattagttaccgttgttatagatacataattatttaattactaataataatttagtagtactactatatatgctctgctgtaaaatggccaaaaaatttctataaaatctgatgagctaatctgaatacgaacgaaaaaaccaaacaatatataggaaatattcttataattacaaaaagacattctcaatatatatacgaatatgtgtatatgtatattcaattaatattattaaagtgtgaaaactcaaacaattattgagaaatattattgatttttttctcgatatggcattatcaaatcgtggaacggtgaaggaacaagccaacttccaactactgttcttaaatagtgttccataatattatatatatatgggtcgtaaatatcatgaatcttcttgtgaaagtgtgaagagaacttttcagttacaaacaaatacagtcaaaagagtatattacgatcgcaactgtgatgtatactctattaatctttcaattactacctaaaaataaatatgatacaataacatttacaataaaaaccatttttctccttaggaaaatctataaaatggaaaaataatattttttactgtattatataagaagaagaaaaaaaatcacaatgtacaaatatttgtaaacttatcaaaatacggatataattttgttatatatataattcagtaaaggtttattacaattttttatctagtcactttatattgtttacaaaattgtaaatataatatagagttttaagcttgtaaaattttacgaatttgaaaacgtcattttttttttttttttgaacaaacgaatgtattattttacaaatttgtaaacttttgtaattagaaaaataaactccataaaattttacccgtttttgtatatttgtaattttgtcaaaagtttgtaatatttatattgggctggcctatgaacatttgagctttataacgaggggtttttatactacatactgaaatttttaatttttttaacttttttttgttgtgtgggtagaattttttcaaaaatactgtattatttttttctaaaaatactgtgtaagttttatattgtnnnnnnnnttaagtttttactgttgttccacagttgttttctaattgttctgctttgttattttacggttattttataaaaagacagtatttttgtaaaaaattccgtataacagtagtaaaattataaacttttgtccaaaatctagtgtttttgtaaaaaccccttatatatagggataattaaataaaacactatttttttgtgaaatttttatatttttatatttaaagatatttttttatattttttacagtgttctataaaaacaacaagaaaattatataaaaaaaataataagaaaataacatcaaaataataacaaaaaataacatattgttatacaaataacaacaaattaagaagagtgtaacataaaaatacatcaaaagaccgtaaaatcataaaaatcgtaaaaatatttaaaattgatccgtaaaactctatttgtgtaattttctttttgttatttttgtgttgttgaaaaataattccttatatatttaaaattgatcctgtatttgtgtaattttttatttatttatttattttttttgttatttttgtattgttgaaaagtaattccttatatatatataatatatttataatatttatacataaaattgacacttttttaaacttttagagtagcgttacccactaattcgtaggatcggcctatgcctactatacatgaataagtaagaaagaaaagttagtgttcaagcaaaaacaaaaaaagttagtggatcttaaaccatttttagagactgttttaattaggtacgcttatactgtttttattagaagactgaacatgcacctatgatagcacttaatggtcttgtgggcagataggaataggataacctttcctacaaattattagaagaatgaacatggaaaattgattagattttgactggagggttttttttttattattatttttaatgaaagacttttagaggttgattttttgtaaaataaccatgggcccaactcctttggcaaatatatataggtacatctcgacaggaataggatcgatccatcagatcagattggttgctgcattatgaatggcttgtactaaattgtgtttgtccacctcaaaaaaaggctgaaatattcactctttaatctttatataacgatttgaaatatataacatttgtgacactatacacttaagactcgtttggtatgctgtatggtcgtttgtattaaataataaataacattatgtttggataaagtaatatattgtattaaggctaattaacaatttttccccccgaattttgacatgtactcatgccccctgaacttttttggc

SEQ ID NO: 36783 - DNA, 5531 bp, Cannabis sativa
tcactgttttcgtttgtatataacatttagtggacattatcaaccagtgtacggtttactttgttctttgaaatgactactttcagtccttacttaagtgtcataacatatttttgttattgttgagggccgaattgtaaaatccaaatttttactcactcattttgaaactcagttgactgagtgaaaagtagtcttttattaaaaacaaaataaaaatgtagtagactatgaatttcctagataaacaagatttgagaaaatgatttgcagtatgcaccttggaaaaaaatgataagctatttagagtattcaataatggaagagctgatataacaaatgtttctgtttctaaattttatttgcactatttaattgattatttggtcttgaaagcccatacgcggttgtctctaagtacacacaatacatctcccttacccttctgtttttgtgacattcattcacttccctatcaaaagttccatgcttctttgccttgatatttcgtactaagcgaataaaccaatatgcatatgattgataataatgtctctgtggactcttgtcattggttttgcaaactaacagctggtatgttggaaaaaataacagagcattggagccgatgtaaatcagaaactatttaggggcttcgcaacaacagtagcagtaagggagggccaccttgaaattcttgaaatcttactgaaggctggggcttctcagccagcttgtgaggaagctctattagagacaagctgtcatggacgtgctaagtttgctgagctgctaatggcttcggatctaattaggccccatgttgctgtgcatgccatggtcacagcatgctgcagggggtttgtcgatttggtggaagcgctcatcaaggtaaaaactttatatttacttatagtgaacatagcaactgtttacgtgctaccacaggaaagttgactttgtcataagtataacctaacagacggataatattaattatattagtagagtttcaccccctactcctttttattaatgatgaaatgcaccctgaattggatgtcagggtagataaatattatcagtattactctgtttcaggatggttgtttggatgttaaatgcttttgatgccagagatcttctcagtttacaactttaaactttttcacagcttttactgaaattgcagagacctttatttactccagaaacttttaattgatataagtgaatgatgaggaaaaacactttaatatattgctgtctgtgattatatgactcataactaacctaatgctgcagcatttagaggcagatcttaatctggcagggacccaaattaacattattgttcttgcttgattgcagtgtggtgtagatgcaagtgcagcagatagagtgttgctccaatcatctaaaccttccttgcacgccaatgttgactgtacagcgctagttgccgcagtcgttagtaggcagatctccattgttcgtttgctgctacaggtagccttttcgcattattaatcaattattgtagacaattacgatgcaccatactacgtatatggacaagttaagtggggtccccgctctacttgtcacttagaagtcttccgtgttttctgttttttgtttattgatcgtacaagcgtctcataagttggactctgttagtttggttatacagtatagaaccccataagtaaaaaatttaggaatttaagatccaattgtttgtcatatagcatatgctaaattgggatcaaatactcctaattagctttgtgaacgatgagttctttcaactacattttttttttcgaactccacaccggatgggagaagatctttcctttaattgatatccatattcctgtccatgcaaatctgacacccaataaacgggtaggtcgttccctctatcatgacgtctcaattactgtgacagctggaagtgaaactttggataacccgtggtgtgggttctgtgtttgcacaaatctgaacagaaaatgtaccaatttctttatttgcagtaggacatttagtcgtgcacgacaaagtttcactgattaatttagttaaatatattattttccctcaattttaaagccacgtcactgaaatattatttggctcttcttccgaaatgaaacaggctggtgctaagacagacatcgaagtaccgttgggagcatggtcttgggacacagctacaggagaagagtttcgtgttggagctggacttgcagagccttatcctgttacctggtgtgccgttgagtacttcgaaagtagtggtgccatcttgcgaatgcttttacaacatctctccctccataccccacactgtgaaagaaccctccttcaccatgccatcttgtgtggcaacgcaggagctgtaagcgtgctcttaagttgtggagccgatgtagaatcccctgttaaaacaaccgggggtaccatatttcgtgcagtacacatggctgcacgtctaggattctctacaattcttcaatgccttgtagattctggttgtgatataaactccaagactggcaatggtgacacagctttgatgatttgtgcaagatataaacaagatgcatgtttgagagtattagccatggctggtgctgattttggactggttaacgtcgaaggtcagtctgtgagttcaattgctgagtcaaataggtggcttcttggttttcagcaagcagtaatggatgtgataaaagcgggaaagttacccagctccagcaatctccctgttttctcatccttgatctttgcagctcaagctggtaatattgaggccttggaagctctgattagttggggaggatttaatgttgattatcaagatgacaatggcttttcagcagtaatgattactgctatgaagggtcatgtggaagcatttcgcttcctggtctatgcaggtgctgatgtaaagctgtctaacaaatttggtgagactgcaattacactatcagaatcgaaccaaaatcacgacctatttgagaaagttatgctcgagtttgcactcgaaaagggcaatcggaatgctggagggttcaatgctttgcattgtgcagctcgtcgtggtgatttggatgctgtcaagctgttgacaagcaggggttatgatgtgaatgtcccggatggggatggttacaccccactcatgttagctgcaagagaaggccatggtagcatttgtcaattgttgatctctcatggagccaagatcaattttaagaatggcaagggtgaaactgcactgtcactcgctaggaaaaatggcagtatggaaaatgaagcagagcatgtattgctggacgaaattgctcgcaacttggtgatggatggtgctcaagttcagaagcacacaaagggtgggaaggggagtcctcaccagaaggagattaaaatggcgaggaatgctggagtactaagctggggaaaatcaagccggagaaacgtgatatgccaagaggcaaacttggggccaagtcctaccttccgtaagaacagaaagaataaaggcgatgcagacgaacctggactgtttagagtggttactaaaggtaacaaagaggtgcattttgtatgtggcgggggctttgaatcggcacaactctgggttaggggtattaagcttatgacaagagaagctatttttgcttagatgatggaggtgaaaggtgaagatttttcaactaagtaggatgtatagtctgtttagatgcttagaagagtactttttcttgaagtactgatctttgtttgcttgtaaaggttttgatccttgaatagttttctagtttgtaaatcgctgtcacctaggcgaaaaggggatttctttattgggtagctgacattaccgtcataaaaaaaaaggaccgataaagaaaaaaaaaaggcttaaaatggtgggattgtaaccagctaataacaacaaaaataccgttgagcaaaataacagaaaaaaaaaaaaaaactcatgagccatagggaaaattatatattggattgtcacaaagaagaatacacaaacgccaagtgctctgtataataatgggtggcattacaatacaagaaaagtaccattatgtcattgtaaaacactcaaaattgtagaactttaaaactcttattcaccttaagctcatttatggaatcagtaagctaatttccaatatgggaaacatttcaacggaaaacttgggtaaacaacatgtgacagatcaaagaatccagtcagtaaaaagggttgattctttttaacaatgatgtggtagggctatttctgcaacaagaaaacaaatgacaccacaccactgccaccttagcttgtgatctccttttcctttgccttagataggtcctctgcagtcttaatgaactttttggtcaactcttcaacctgggaaaaaagtcaaaaatcagaaaagacaagggaggatagcctaacttccatacaatttttagtaagcaatctgtttatggctcacctctttctccaatctttttaaatcatctttggggtaacttgattgcaatttctttattgtatccattgcctgaaagagcagaatgaccaatatgcatttacagcaaacatagaagcattccgaaaaattgcagcagacatgaaataatcttttatgcagcactaagaagaaactaattgagccataaattatgaggaagtacaaagtaaaaacactgctgtattttaataactttggcttggatgttcataaagattatgaggaatttgtaaaagggagatcaaaccaatagaaactaaagatttattactctaccttttgacgagcccttcttatactttgtcgggcatcttcacaagacttcataaccactttacacacagcctgaagaaatagtgagaaaattcaaaaaatgagggagaaaagttaacaaaaaaagttgagaggaatatggtgttgtcagttgtgttacctgaatatgctcttttgtcaatctggtcataaaaaaatgaagaaaaagagcacttaatcaattgagtacacatgtagcttaaatgaaacaagtactacaaaattgcaccagctaaaaaaagagctatgtaactaatgacatgatcagatcaactaaggccaaacgagtgcttacggaggaataactgcaatcagccgctcaccatccaccctaggatttaggcccaagggagacgaaacaatggcgctctccatgcttttcagagcctgtagcaagtagtcaatcaacaatgacgttaactataggtgcctagtgtttcatattgctataggtgcaattaagtatcgagtcccccacatgctcaaacatattcaaaagagcttagtttcttacagtgggatcaaaaggatttatcgacaaggttttagagtctaaaactgaaacaacagctatctgattcaaaggcaacttcacatcaccagtgtccactataatgtggtcgagcattcctgcattgccattatgcaaatgat

SEQ ID NO: 36784 - DNA, 4912 bp, Cannabis sativa
actctttcattctttgattaatcacataaatctgcttctatcattcctacctaggatttgtaattacaatatacttatgtgtacatacatgatcacattcttcaataatttctgaggattttcataatttgtttccgttgattcaggaacggagtcttcactctggaacctcgatgtcttatagaggttcagatgatttgcctagaaagtttgggcgcggcggggaccgtagaggcagagacttaccgtatcgaaatggaaggcaatcagagtctgaggaatcggatgaggaattgaaaggtctgaactatgaggagtataggaggcttaagaggcaaaagatgaggaagatgttgaagaaatgtatttggaatgttacacctagtcctcctcggaatgagaacgaggattcggaatttgaggagaaggctgaggaaatttcggataagcatcctggggaaatgagcgattcaggcgagaaggagagaccgaagtctgattctgagcgtaaatctgagtcggaatctgatgattcgcgattgaagaaaaagaggaagagtttgggtaaaaggcgtaaaagtagaagatcatcttatagtagtagtgatagtgagagtgagagtgaatctgatgaggaagaaggcgatagaaggagaaggaaatcaagaagtaagaggagtaggaaacgtaagagcagtaggagaagtagtaagagaaaaagatcccggagaaagagtaggcgtagtagtaattcggatgagagtgagagcgatgattctggttctgaatcgagtagcttttcagatgaccacacgaagttgaagaagggaaagaagtcgtctaagtcctcgcgttctaagcggattaagaagaaaagaagctctgatacagagagtggaagttcccatcattcagaggagaatttggattctgaaattgatgccaatagtaaaccaaaggtggaggagttagaggaagaaacagatatggaggccctgaaattcaaggaattgattgaagcgcagaagaagcctgctgcattagataacgaacctatggttgggccagcgccattgccaagagctgaagggcatatcagctatggtggtgcacttagacctggtgaaggtgatgccattgctcagtatgttcagcaagggaagcgtattcctcgtagaggagaagtgggtctttctgctgaggaaatttcgaagtttgaggatcttgggtatgtgatgagtggaagcaggcatcaaagaatgaatgccattcgtataagaaaggaaaatcaagtttatagtgctgaggataaacgagccctggctatgtttaactatgaggagaaggcaaagcgtgaacacaaagtcatggctgatttgcagcggttagttcagcgccacattgggcaagacgttggtcctacccacgatccttttggtttgaagccatctgaagcttccgacgattgacttcatcatgttattgttatctaaactggtattttgttcgacctctctttttatttgaatgtattttaggtgatattgaacgttgcaactacttttgtaaaattcttagcttgaaatattttgtgcatcagctataaaattatgacaaacttggtgtttcgattataatgttgcgataacttatctaactgtgctaaggaatgagtttgtagctggtggtgaatttgtatgaaattatgataactaaactgagaaaattttgttcctcaagccttacagcccaagattaatttgtaggaaagttgttgtgtttgtcaggcctgttttgtcatttaaccttgctgagtaagaatttgtacttgatctgtaagatttacaaatttggttacacttattacaccctgtacttgtctgttaaatattttttctttgttgaaaaatttaagctagtaaagagttatgaccttattgaaagatgtggaaaattatatttcccttagatggtgggtgggatcctttcaaaagaaaaatagagattcatgcttagattagaaaaatgtatttatttaggctcatttagagaaatgctaaaggtcactcgttttactttataatgattatagaaaaccactaaccacttataaggcgccacctcattggtgttgaacattataatacctaagagatgctctaatagcaatgctcttttattttggttagtagtagtagtttcatttcgcacccaaaagagggtcaggactcaggggtgtggattgctcccacaagatcttacgtttgagtcattcacagttcccttaggtgaattgtttatttgacttttaactaagcttataggtcataatcgtgctctaataataatgccatctttctgaagcaggctatgtaagattttctgtccttaatttggtgtttttggtttaagatatctgatggtaggtagggacaccgacaattaaaagaagcgggactgattttcagaccatagtttttgctttcaattcctgaaaatcacgagcgatgatgcagttagttggtgccctcctccctccaaaggattacatttttatcaactgtgatgccaagttgcgataacttgggggaaagtggggtagtttagcttcaaaaactggttcctttctttggaggctcttgctcttgcgatcagggaaaaaggttattttcaaactacagcaatgagtcgaatgacatctcaaaggtcaaatgcactaattctagaactcttgtttgagaattggtttcaaatgatattaagatagatagatcctttctttttgtaatttgtcataagatttttcattcccctaatatggtggctcacacttgaaatgtctatagtcaaaaattgtattatgaaacacaaaacaatgtttgttgaaacatgaaaattgggggtgttagtttggaccttagaatagcaggttggttttggctcactcataaaggactcctataattggattagatggaattaatgaattcattcattggcttaagaagaattattatttctcttatgaatttctttcttattaatctcagtctcatgcatatcaagttggtatggattgtgaatcaattcttctcttgtgatgactagcaaagtttcagaagtcttcttttcgatcctagtaaatgaaaatgtgacacttcttttaaaagaaagaactacctacttgacaaccaaaattccccatttcacaattacaccatgtttgatacataaaggaaataggggagagtaagaaaatataggtaagaattaaaaagataaaaataaatgtttattttctaaattgatttattgtaagattatacatacattgtcttaaaaaaatcaatctacctatatctatatataaactagagtcttttcaaggtggttattattatattagtgattgattaatttattcttgctattagttgtaatcttttattttatcaaaatattaaaaatttgtaaattattctataaaaaaatgtacatatgagtagcttcactttttttttgtaagatgtgtaataataattaagacaaaattattttaaattttaatattttctaaatatattttgtaacatgagtatcaaatttactatttttccttttcttttgctcttaataacacacaaaaaagttaatattatagagtcttagtttttctaattattttaaacttaataaataataaattaaatacatatatattatttgaataaatcaaattgtaattcaatatatataagaattaaaaccattagtttttctaaatatagtattgctaaggggtcttgtttttcgtcagatcgaatttatttggagtctaatgctccctcttctttgcgtaatattgtaattgggaatgctatttgattatcaatgatataactttttactcaaaaaaaaaaaaatcatttgtatttcacttgtagttaatattacattcaaaattgatattattaccatatctaacttataattaactatcatttctaatatatttgttgtgtatataaaacaaatcaaataatgagttaactacttaattttatacctaaatcaatctatttttttttttaaaaaaaagagatatacaaaataaaatctattagaaaaaatagatagaattatctaaccaaaattaaattccaagtgtgtcgtaaaaggttatagtgaagaagttattagaaattgaagaaatagttttgagattttttatttttttgaaataatttatttaaatatcagctttaaaaattaagtttacgacatagaaaatatcataaaataattttaaaactaaaatatatcataaaagtagccaaatctaaaaatatcatatttttatatcaaagttttaaaaaattatattgaatgtaattttatattctttagcaatggaccttatgctattaaataatagaacaagtaaatttttttgaaagggcccattgaataaggagcttacttttttttttctcaaacaatcaccgctcaataacccgcttaaaccaaatcaaaaaatccgataaaaactataaaatgaaaaatcggatgaaaataactcacccaattagtatattgggcaggttaaagatgccaatacacacaataaacctcaactaactcgattaaggtttttttttgttgttattatatgcaatataatttatgtacataattaaaaatatgtatatataaaaagttcaaattatatttgtgtgatagtggtttatttcaagttcaactttgaatttaaactatatttgtctctttatcaaattaattaaaatataaaattaaatttgaaaaataataaaaaaaaattgtagttagtttaggtggattaacgtgaccaaaccggcaaacttaggattttttttcttctatatttgcactt

SEQ ID NO: 36785 - DNA, 6510 bp, Cannabis sativa
  modified_base (2662)..(2680): a, c, t, g, unknown or other
  modified_base (2980)..(2983): a, c, t, g, unknown or other
  modified_base (3040)..(3041): a, c, t, g, unknown or other
  modified_base (3115)..(3141): a, c, t, g, unknown or other
  modified_base (3224)..(3226): a, c, t, g, unknown or other
  modified_base (3748)..(3751): a, c, t, g, unknown or other
aattatgattggatatccgattctattggatcagttgggattggatcggtcggttgggattggattggatgactttctgcacacccctatcttgtggggcggcccttgatcggcctttacatacctctttatgtgcggattgttcttcctaatcaaaaattcaatctattcttgtagatttttccacttgttggtgtaatggccaaaatctttattaaagcgacagtatttagaatgatccttcttgcttgcatccttcttcattagtgggggtcttttgtacagcgctactgacttcgtggttgtaaggacgatttcaatgtctttagtgagaatagtgaaggatgtaaactttggagctttatcttgtaggtgctaagttttggggttattaaaatttccttttttttccattttcttgattattcccaccattcgaccttttcccgccgtcgctactccagcctggttcgaaactggaccacttaaggtcacgttgggatttttcttctgatcagtggaacctactctaggagtagcattcaataccacctcttccaacttaatgaatccatgtgcccagtccaaaacttatgccatggagttcaccgttagcctcttgatgtctttccataaatctcccaatggcatgattcctctaagcacaacaacaagtcttcctttcttagtcaatccctttactcttgtggcttcggtcatgaactgacttatgtaatctttgaatggctcattcaagagctgcttaactttgaccaagtgtacagtaggttgtcgggaagacaagaattgtgcgtggaactcttatatgaaagaatcccatgagtcaaatttcctggtgttagtttgaaataccattgttgagtagtttttgccattgttgctggaaggaccctgcaacgtacgtcgacatacatggattgcagatccctttgcaactcaaagtttcttatatgggataggggatcttattgtccaatatatgccttttaggttggcattttaaatttgggcagaagagggagcacctttatttgagcgatatagggtaaacctcttgctcggtcgagttccaggtcgatgagtttaggacagtcaaactttaaactatgcttttaagatgattcagttgggattgcacccccgaatcaacttgtattgcttgttgcccaacttgagtcacttattgtccctcttgagcttcaatcatcgtgtagttatccacattaatgggttgtgcatttggaggaactaccccagtcctctactttctccgttgattcagtgtgtgtctgagattgacaggttgagttcctatcctctcaaagatagattgttctagaggtcaccctgcatttttggggttggctagtggaatctccctctaagcacgctgatctctttgtctttgagcgtgggttgcactgtttgctccatcatcattatcactcgaatatgattgactgcgagcagttgtaattagaccctactgtggagtcatatacggaacatactaaaaatactgaacctgcccattttaatcataaatggctataaggtcttgaaacgttgcatttggctgattgggtgttcccacttaggggcggaagttctgactatgttgcccatgatttttccctggtaactcctaatcgtctaccgtttggcccacatttgtatgtggcctaggattggaggcccaacgcgtaaggggttttgggtgtaagtcattacaacttttggcatgtggtttttcctaagcaaaacatacagttcctttctacagaggggatctcaaacaagagtaatgtcttcctgcaactggtgtttggtctgttgattgaacttccttatcaactctgtggttgtgcgtgaccagtgattgatcacttcctactgagcttttagactctctgcttatttttccatccattcttggaaaggccgtttttgttgcacaaatgcctcattcatagttacccaggtatcttcttaattatgatgaagtgtattagtgtggctttgaatttgagccactacttcactcaaattttgcacctcggtgtcatcatcgattcaccggagttccacttattggcagctctttggagccaaaactattttccccaacaccattggtactagtgttttgggtgctcggatcaatcataggagagtttctcatattagcaggattctaggcatttggatcagtttccattgcatctacaagattagtggcttgagttcttcgagtttgtacatccatttccactttttcttgaataaaccaatccgattgtgttcttgagttcttggctctcaatgaaagtactaaaatgttgacctcgctttgggtcagcgacactgggcccttaaagcgacaagaaatcaatatttacgaaatatataaataatgatgtgttaaattaagaacacgatattttttagaggctcaagcctatatccacttgaaagtaagatcatctatatttaaagatatggatgtatattcaagggtggatatgagttatcgttaaattctttagacgatcactctagattttaccttgtgcaaagaaatttgaaatgtttgaaaaacttcgtgaatttctagcaatgttgaaaaacattaaggtaagtnnnnnnnnnnnnnnnnnnntgataggggtggagaaatatttagatatgcaattcaaagatcattaagttgaattttgaattatattcaaacttacctccccagaaattaagttttcacattgatgatagtataaggtctatgattagttactagccgttgcctaagtccttctaaaatttcagaatgatggaatggttgtgtactttgtgtaaaccattactagattcatggatgtcctaatcgtgaacttcagaaaggctagaattgttaactaaggtttgcatatttgatagttattctaagtgattaggggtggannnncctatggtcattaagataaaaaaatatttgtgtcaacaaatactacttttctaagannatgactaagtctgaaaaacaaagtagcaaagtagaggagataattttttttttttgattccaaagtgttctatnnnnnnnnnnnnnnnnnnnnnnnnnnnctgcctctgttgtcttgacaaaaccgatgaggtaaataccattagtgttcctagacagatagtcacggtaccttgtcgtagtnnnagggtttcaaggaactcaccctgttatgacttgggagatacttgtgataaaatctattgttagtttaaacaagtaatggatagttagaataaggaactaagaagcaaagccaagagaactgtagttaaccattcatatggagtaaccaaaagttttatattacaaagacaagaaaggaaattttattaataagtctattcaatggacttaagaaaactcactgtttctagtattatagatttgagattatctaaacctatgacttgtggtatgcctggtaatttacttactatagtgcaagcgacttactttagtaagatgctggtgtattttttttctaatggctacatctatagaagcttctcgaattatcatcatgaggttcatattttatttttctatagcttttattttttcagtgttgaattatcatcatgaggctcaagtttggttaacaaaaatctgcgttaacagtttggtgctttcattgagagccgctatttataattgcatagtggcagnnnnttacaaagctgaccaaaatatgtttacagccattatccctaaaatcgtgggatctgattacatatcacaaaatgtaaatgcagtgtatgattttgaaaatcatatagctgtaattttcccgcttttactgggtcaaaaatatcgtgtattaaacacgtctataattgtctaatctggagatgtctcgacaaaaacttgattgtagtgatcccaatagcgagctgggaccattcttctttccgaggtcgacaagatatgtcttacgtcgatcgcgggtatacagaaattttctgacttgccaggattatgagcctcgctcttgttagttggatgaagctataggaagtcttctcatagcgagatggtcatctcgcatacttgttctttgagccaatccgatttttatacttagtttgcttattgcaagctaaggtatgtgtcacttttctctagtgcctcgctattcacctttagcgacatatggtttctcgctaatacactaagtgccagtttgtacattgattcatcgcctaagactttatagttgacgagttacaaatatactctgatacttacgtgattaatgagttattccataaaaagatattgcaccaattcatattctctttatcttgacatgtgtcctccagccaaatttcgggtataacataaataacaaagaaaaaaaaagtaagagagttcttgaaattatttcaatctgatgaatatatatttaaatttaattataattattaattatttttttaaaatatttttttttttgaaatgattttaattaagtatatatttaattataattttttttaaaaaaaaaaaaatcctttaataataacctattaacgacctgttataacacatgttataaaagaaatacttaaccatcataatcactttgttaatgtaaaacttgaataatcacattgttcaaataaataaataaaagagttgctcaaaaaaaataaataaataaataaaagagtagtcacccataaatttaatatacttttcacactaatttatctacaattttacatcctaattaactatacttcattgaagttccataaattaagataaagaatacatattatatatagtgaatgtcaacccttaatttctcacatctttttatacttataatgatgaataaattaatttatattttgagtttggaagtggggacatatatttgataatttattgttaacatgatccctatataggttaattaatgagcttagtatatattatctcaagttaaagcctttcgttattttgcaatcaatagacccaaagaaacgattaaaattgatgattttgtgaataaagaaaaatgtcttattatcagcattggataatataatacaatccgcaactatatataaatatatacactgtctatattggacattgaatatattagagttagaatatattttttctatttcacactttgacactactttttgtttctttcacttgtgccaacttgatcgttatatttaattagacacaaatagaaaaacaacaaacacatatagatgcacacatatttcaagctgagagcttttgatcatcacctatatacatatatatatatatatatatttatatatgtaaataggggaaaaagaaaatacattgctgcatgcctcaaaagaagtaaaattaacaaggagtgatgcacatgcatactcttcttctaattaagtatataataataacaaaagtagaaaaagtacaaattaaattaatgaaaaagaaaaaaaaaaagtaattgaacaagaagaagagcctaataaaacaaagaaagaaagttaaaaatggtgagaaaaaaacgttgtagagatagatggatcgatcgacaatgatgatgaagaagacctagcaagaagaggaggtgctgcaggtatatagtttggtgttgcaggttaactaaaagagacgtagtacatattatatcatattattattatataataatatatacattggccaagaattctcttccctaacctaactagacgaggggtcagtgtagtggtctctacttttctaatatgatactaaaagtcttcattttcacctaactttcctaaccttgcaatgtcctctttcccttcttcttcttcttcttcaaattaatttgtcatcaaaacatgaaattgttactccgattctcgttccctgaattcaaagaaggcctcggcggcccagcacccgccacttgggagcccgatactcccgccatcagaaaatcctctgtgctcacacccatgttattagtgtgacccatcattggtctactaccagagttcagtctctgaacaaacgcatcgtccccggcgccggtgctcagtgagaacgggtactgctgctgataaagattctgcgtcggcggctgcggctgcggcggcggctgaggatggtaattgtaaccggccaaagctgggaccatgcctgcactagggtttacaaagttttgacgggtaccaccgccgccaagaccgaaaacgaaacccggaccaccagggtgggccccggagttggcgaagggggcggtgggaccaccggtgaattgttggaccatggctcggaagtttgtggtgtcggtgttgagaagcgtcgttggggttcttcgtgaagccctggaacgacgtcgtactggtttggaaactcggccaccttcgggactgaaacggttggctccagccgcagccgcagccgccgctgtgggg

SEQ ID NO: 36786 - DNA, 6424 bp, Cannabis sativa
tttttttttttttgagatatttaatcattaaataaataaaaataaataaataaccaaagaagaagaagccgctcctaaataaaaaataattttatcaacaatttactaaaggttatttctactgcctccgatagttcttgcagcaaaggtccaaagccagcatcacttgttaataatgcttccttttagcccaaaccatgacaagagtgaaacccatcaatgacattattacagtctgcaaataagaggaaacaaataccttcaaatataacaatccataatatggactcagaattgtaagttgtattacaaaattaagttgagttgtttcaacaccaaataaccgtttcttcattcttatttttaatttttttttctatttccaaattgaaccatttaaggtaccaacccctcttaccacaatatgaaacaacttttaagtaatatcagatcatacactacagaaagaccaaagtataaacttactgagattgctggaggcacaccaactagtggatcctgaaaaaacctattagcaagagcaaggcccagaagactgctttgcattcctgaaacaatataaaacaagaattttaaaatcaaatatggattgtttaatattctactacaaacagaataaaagacaaaagaaaaagagaaaaaacctgtctcgtaggacagtgttctttgaagcgcttttacatcagattcctcgtgaaagaccactccggagagcatatagccaattataaatgccgataaatgaaaggcaatgatgagcaacaaaacagttaatccaaaaggagacagtacagactctatgttaagagcaagtggtgctcccacacagagagctgtcacaaatactgatagcggaggtaaaattggacgaatagcatcgcagagtcgaggaaagaacctaaacatcaatcagataacaagttaagacctaacaaagagaatgttggataaagaaatatatgtttatatgtaactattgtggtgaaaaagtatcacctattcagaagcaagcctgaaacaattggagtaataacaatttgcagtatactagaaatcattcctttaacatcaacaggcaatctctttccaataagcaagaatgacagcaatggtgtgacaactactgctgtagccgttgataacgatgtcatgacaatgcttagaggagccattttggggtcagtcagaaaagtagcatagttggagagttgtgcaccactaacacaggataccaacataatcccagcacctgaaacagatttagaagagagtttagagccagcgcaccacaaatacttataagaccaagtcggttgatcctaacctataggagttggtagaccaaagactagaaccgagattaagccaaaaaaatatccaagaagtggcttgattacgaattgaccaacataaccagcaaaaataggtaatggtctcttaaacgcttgaagaaaatccttttcactggaattaactcctactgcaaacatcaaaaagcctaaagcaggtgcatagtacctgaaaatataagcacaagacattcaatactaattcttcatttctcaaatgataaaactataagaaaattccacaaccttgtggtaaaccatgtaaaggaaggtggatagattaaagccaggagtgtactagctaggacaacatgaggtagaaacgaatttgatttcttcagaatctgcaggattgaaaactccttttgctgaaccatctgaaacaagagatcatttatttaaactacaatcagtgagactcaaaatcatttcgaatcgttataataataagttggcatgaagttcagtagcacaaaattaacaacaccagcttcaacatataaactccaacaagtgtatttgaaaataacaagactttggaggtcaactgtagataatggttaaatattaaaagttgtattacaatcgaatccaacatacatttttaaagtctgttttactatttaattcttgttagaacagaatatttttccattgtaagacaaacccactttcataaaaaggggtgcctgccatgccatcccaccaagagaactttggagcactgaacctccaaattaaactattattctactccaacccaatgaatgaactcaattcaacttaaaaagcaacgcagataataaataactatactaaaccatttagtgggaaagcattcaacaatgaaaaaggtaaaatgtgctctcatttgggaataagatatgaaaccaataagaaattgccattaaaactgaaaataaataaataaaaaattatcagaacctctgtcttttcgtaggaacaatcttgatcggagtccaattcgatagaagcaggaaacttttccggttgacatctgcgcactatatatatgcatatatacccagaaaggaaaattaacccattaccaaaaacaaagggcagtttctgaaaaatgaaaactttagagttgaattgaagaactaacaaggagagaatgactcaaaccgagtggaaagacccaaagacagagagtccgagggagaagacgatattgggagctggggttttggcggaatacgatggagactgtgaacaggaaagcgtgagtactggggacaatggatctgcaaccgccacgggttttgagtagatttcaaattcaaaagcattttgattagcaaatttcactctgtctctcaagaagttgacttttacaatcaaaatttgtatcagcttcaccttcacttcagatgttaaaattattattattggcaaagaataagtaaaaatatatataatttattattaaaaaaaggtttgcacaaatagaatggtaggataggtaaaatgatcagttgtatgctggttggcaatgtatgttggtaaatatgttacttcaaagccttctttcggtctggattttgatgagctatttactaaaaaaagttggttctcaagagaattagtgcctttgttgaaattccaactggtgatgaaattaggggagtgtatttaatcttcattccctaaaggcctggatggccttttgagatgttttgaagtattggaatatggtgggaagcaatttatgtgctgcggttaaggaagcttttctaaaaggggttgttaatcctaaactcaattttacatttatttgtcttatccaaaaaattgagttttctttgagtatggatcaattcaggcctataagtgtttgtaacttttttataggttgttgcaaacattctctccaatagattggaatcgcttatggatggtctagtgtcacccttgcaatcggcattcattcttggttgttggattgttgaatcctccattcttacccaagaaatcatccataaaatccaacataagaggaggtctgaaggtcttatggccttaaaacttgacatgcataaggctttcgacaaaatgaaatggagttttctcgagaaggtccttcttgctactagttttagtaagaaaattgctatctttcgatggcttgtgtgagaagtatttcatattcggtgcttttaaatggcaaccctcttaaaaaatttatccctcaaagaagcctttgtcaaggggacctcctctcccctttcttattcttactttgtcaggatgtgttgtgcaagatcattcttagagctgaagagaaaggtttcatccatagtatcaagattgcgagatctgtcccttcaatctctcatttagtgttcgcggatgatactattttcccgtgctaagaagaaacaagaatcttgattgattgcttatctctgtacgaaaaatagtctgggcagtcatgtagttcttcaaatctagtgttcttatttccaaaaacttgagcagtgggaagaagaacgcaattcaaaagatcctgaattttgagcaagttcggggtgaggaaagacacctggaaaatcctttcgtcttcaaacgtaagaaaaaagaagattatctcagattaaagaataacacgataaaaagattagagggttggaagatgatactcctctcttacgtggaaagattaactttgattaagttagcagcctcatctatgctggtttacgcaatgtctaccaataagattcctctgtcaagttgccaagagatggatgcaattttgagaaagtattggtggttgggtaatatagagaatgatagatttatggccctaagagcttgggatcagatctgccaacccaagtctttagggggcttaagaataagaatatttgagaatatgaatagagccttacctgcaaagctatcttggagtctagcaaacagagaagagaagccttgggccacttgcttattggggaagtactataaacatgagaacttttggagagtggagcaaaagagtaacgattcttatcagtggaagtgcatcctggaagtgaaggaaattttagcaaaaggttcagtcattctcgttgttggtagagataccgttgatttttagaatcaaccttggattccatggatggacctttgagaatttaaggagacaaagttcgaacttaagagtaagcgctttatggtcaagaccttactgatatctccataggcaacgattggaataaagaaatggtggtttagatctttggtgaagaggtggggaatagaatattgaatatctcgagaattattctaccttttaaggaccagctcttttggaaatacaagcaatatggctaattttcagtcaaagatgcttactttgaggatcaagcttggaggtttgcccccaagagagatatgtggaagtgggtatgggatactagtacccatcccaaaatctctatcttcctttggagagccctcaatgaggccatccccacaaaaaatagattaccttttgtctcgaataaggtctgctgtttgtgtggcaattttgaagaatatggcttccatctgtttagagattgtagcttctccaaagcgttgtggttagctggtctctttcccatgcaaattgagaaaatactaggggacttaatgattcaattcatggaaaacttaatttttaaaagtcgcgggatcaataggagagacctcattatgttcgtaggctacctctttgctgaagtttggcaccaaaaaaatttacttatcttgagagaaacttgtgcgaacccctcacgaggtgtagacaagattgcagtagcttgcaaagaattttttgatgtgtttgaaatgaattttttgatgcaatcctctcatggtccaattttgagtgacaaagatgtttctttatgtccaagggagaaagaagtcaataatgttatgttcactaatgcttcttggatcaaatagggattttggttggtgggctttcaaatcccagaggatcaatacaacatctattttggaagctaaactgaggacaaatttcttggctcttacttggatagaggataaaggatggaagagcattcaaattcgaaggtgatagtccaagctctatctgagaacagaggctctctagattggaaggtttttaatttctttcttttagtagttaatttaatttagaagtttatggtttgtaagttcttttatattaatcgtagtcttaactcctttgcggatggtgtactaagtgtgctagagttgctagccaaccaactattttgtgtcaggggagggatgtctctttgtgattcccatctatctttcttaatcaatgaactcgaggttctttcaaaagaaaatatgttgcttagatattattttattactaattttccatttttttcattgtaggaaggggtagagatagagccattaaaatacttaaaactatatttatttacccgtatttgtaaacctatttaccaattacaacatgttaagtacctcaatgatgcagctagggctacacaacacgacaacacaattcgaaaataatatgaaataaatggctttaggtgacacatttaatttttgtgtcaaatttgggtcgacacatttaacatgtttaataaatgtgtcatttttggatcaacacgcttaacccaaaaataatacgattataacatttataagcatacatataagtatttttattttattatatcatgtaaaataaaataaaaactcttaaaataaacccctcataaaaatatttattaaattaattaattgagttaagaagatgatattatctcagaaaatgtgaggaccatgggcttatgtatccaagctcctaataagtagattcgaaatttatcgagtaaattttctatcttattaatgttggaattttacgccttaaataaaactcatttcaatattttttgatttgttatcaataaaatattagaagtcatttatgtttacatatttttttcatgtttatggtttaatgtatacaatttttgttaaatcca

SEQ ID NO: 36787 - DNA, 8552 bp, Cannabis sativa
  modified_base (966)..(966): a, c, t, g, unknown or other
  modified_base (7690)..(7713): a, c, t, g, unknown or other
atctaatatggatgaaagttcacgtgtcataatttattatatgttaaaatttgagagacataatttgatagatattaaaatttggagcatgatttagtacataaataattactgaattagtaaaattgaataaaattaaataaaattctttaaattcaacaatcaatagttcaaaaaaaatttaacggcaaaaaaaattcacaaacataatttagtacatattaagattgaatgaaaaaaaaaaaaaaaaaattctaatttttttttttttttccggtaaagaatgacacatataatatattccatattaaatccttatataatttaggctcaatgaggcgtcttcactaaattaatcaattatacattttaaaatgttgtcctcttcacttgtaatcttacagttaggtatatgtcaaatttagaaacgagtttaatatgatcatataagtatataatctactatactatagtattcttcaatttttatacgcaaaagagtatcctaaactagaaaccttagcttaaaaggatcaattatattatgattaaaatggtcaaatcgccaaaaataagttatttaactcaaagaacaagttatcttcaatattgagagtcaaacttgttgtgattgttgtctttgaagacttggctatattttatctgaccaaagtagtatttttttttttatatatatataaaaattagatatatagaaatgagagaaaaaagtttcaaaacttggctatagaaggattcaatattaccaagaaatatggtactggtgaaagtagggatggacacggaacgaaaaattaacggggagtgctctcccattctcattttcgttaaaagatttaatctcaattcccgcttatttttcatcaatggggcaagaaatctcttaataaaaaaataaagtttataataaaaatttaaatatataaaaatattaaattacataanaattaaaatattacacattaaatagtatttaataaactaattattattcaaaacataacttaaatttataaaaataatactaatatactaaaaaatataaatataaagtataaattataaaatattattagatatttaaaataaaatactaaacgttctttattaaaacgggaaatgtcattcccgtctccgtttcatttaacattcggagataaaaagtaatctctgtccctgtccccattcctcttcctatttaaacgggaaatccccgccctattaggtgcaagtccctacgggacccatcccatgtacatccctaggtggaggccaaggatccaaaacaaactgttgggtaagaataatattaagattctatattatatatatttatatataatatattttcttttttttttttcttttttaaagttatgagtcaaaattcaactgctgcgtttcatctattagagacaacagcctcaatgaatatccatctatctactattattcttctggctgattataaaggaaaagttttactcaaagggtgttcttctgttcataataatagttcaagagatgtctcagaatcagagttgcttaagtttgaaaaaccaaagttgaaacaagttaaggacttatcaccatcatcatcatctaagagaaatatattgggatatatttcttttaaacaaggagatcataagaagaacaacatacctgtggttcagtgggtaatgagtctccctaataggtctcaacttgattactgtaccatcaaagacaaagaagccaatgaaaaatcagtgaaatcaaggccaggttggcctcttcttctaataccagttcctccaacaactttagattcgaatttaacagaattcgacacttcgaatacagcaaatgagttggagcttcttagtacagcaaagtcattagattgcaggatattcacatatgaagaattgaaggttgcaacctgttcattttcttcaggtaagtaataactttatgattaccttatctgtttttctttttctttttaagtaagtcttttattagatcatagcaattgattggtctgttgaaacagaaaatcttattggagaaggagggtgtagcagtgtgtatagagggcttcttcaaggtgataaatcagtagcaataaaggttttgaagccatacaatgaagcttggactgatttttcattagaagtaaacatagtcaccttattaaaccacaaacacattgctcctcttattggtatatgtttggagaatgaccttcttatatcagtctatgactattaccccaagggaaacttggaaatttacttgcatggtaaagtttagctgtaatcacacttggttttgtatggtgtttttaataaattgaaaactgcatcaaattatttaagtgtttggattttgtattatatatgcaggtgacaatagtggtaaatcaattgtgtcgtgggaattgagatttgatatggctattgcagtggctgaggctctaaactacctgcacaataactctccacagcctattattcacagagatataaagccatctaacattcttctcacaaatgatcttcagccaaaggtattcaattcttcaccataaaaatcataatatgggttttgtactttgtgtaattagctagctagaactaccaacttatgcatccctcttaaataaaaaaaatctcctattgtagttgtcagatttcggtttggctacaaagggttctacagatctggcttattcagaagagagtgatatggttgggacattcggctacatggctccagagtacttcatgtatggaaggctcagctacaaggttgatgtttatgcttttggtgttgtccttcttgaattattatctgggaaaagaccaattgttgaaaacgttactaaagggcaagagagcttggtcaactgggtatgaatgaagaactcctctctattatgcttgcaccatactcttttctttattgacttgatgtttaatgtatccaggcaagaaaattgttagagaaagaggattataaagcattggtggatccaaagttaaaagagaatattgaaactgctcaaatgaaaagaatggctttagcagctaagctgtgtgtttctcagtcagctcgagctcgtccaaaaatgagtcaggtacgtaaaataaaagctaaaaaagtaacctttgtgtcctagttgctaaacaacactttttgttgttgtcagatactagagttgttgaatggggagaaggatgctgacatgtttatcgaatccagtatttgtgtttctaacgagggttatgaagatgatgatgataaagactattttatggattctggtagtaaagatcctctggattttgagattcttgataaagatagtggaagtatatcatcaccgagttgccaagacagtgacacaacatctctaagtagtgccgaaaacggccagacacagcgctttaagtttagagatttcttaaacaaacgacttgagtaaataatgtcatgctcttgtacataataaacatttcaatggaaaatttttgtatgacgttattgcagcagaagttagatgattgaattaaattctttaataatttgtatacatagtacaaactggagctcgttgtaaaatatgtacagactttatagctctttgtaatgtgaaatttccatactacagttctttggttcagaagacactaaaccaaatgaaaagttagttaaatatcaaaagggtaaactacaaataataaataacaaaaaatatatcaaaagggtacggtgtaaggcaatccaaaaatgtcagcttccggcaagtagttagcttgtggccacaaattagaggtcctagaacatgacacaacattggcggctttatgtattgtagcatcttgcttgttttcttgctttgacccaagaagccaatcgtcttcgtcagaatcacaatgctctgcttcaagccttggaagaagccaaggctttaacaaatctccataaaactgatccaagctttgactaccatcaataaacaagctggtcttcgaggtcctcctggattttctgctctctcggcgagcagccaatggcagctcttgttctggtttaaggtcgagtttattagcttcattactcttggattcattgctctcttgtgtggcagccaatggcaactctagagattgtttaaggcagagcttctgagtttcaggcctcttgctttgcctgctgctatcttgtggaggcaacggcaattcttggcattgtttaagaatgagcccgtgcctcttcgtttcatttctcccctccagtgtagccagtggcaattcttggcaaggtttaaggatatgtttaccaacttctgttttcgtcaatacactaggtatacaaccactgcctgaactctttaatacatgaacctcagatgcagtcttgcgtagcctgatacgaataatttttcctacaataaaatcaattgaacaggtagattgttattagtgtcacaaaaatttaataaaatcttgtcacacagatcagaaaaggaactcactttcactgtcgccatcattagacaatgactcgtgcaatcgcctcttcttggggttgctttgagtgctatcagacacaaagctaacacttccagaacaggtgggttgctcgtgttcttgagttaaatcactcgattctaatagatcagattcatccacaacagtctttctcttcttctgtagaggatatttctcctctgcagctgccttagaatggttaccaccatacaagtcattctttctcttcttctgttgaggatgcttctcctctacagctgccttagaaaggttcccgccatataagttattttccctcttcttctcttgagaatagttctcttccttccttttcacttttccatcagcgtcacttttttctgtctctgtacttctgatacgttctttccgtaactttttctgcaatttatgttctttcctcttcaactttgcttcctccttatcttttcggagctattgaagcaccagaacaacccataagacacgtgtagagtagaacaaagaatcatgcaaatccacaaatcccagtacaagaggatattcatcatccgaaattttatgtactaaaagggatacacgctatcgcagtttgcccaaatcaacacatgcaattctaattcacaccaaacatactatagcaatatccacaaatcccagtacaagaagatattcatcatccgaaattttatgtactaaaagggatacacgctataacagtttccccaaatcaacacatgcaattctaattcacatcaaacatactatagcaatatccattaaaagaaggaaactctcagcttagatttaaaacaaaaaagttatcatatatgttactaaactttattcagtgttatttaacatcatgacaattaacataaaacatcgacctaaaatctttggaatcgatgtttgacaatagactaatctcgtaattccatgaaatcgaaagaaaaaaatttaatttggggtcatttgacataacgcacgaaacaattcccatgacaaaaaaagaatgaagctcttaactttcatcagttaaaataaccaaggaacggaagataaatgaaaaaacatcttgcccttatgtgactacaaatcaatggtacagaaaataccaaataatgcaatgaaacaagatctggaaagggcctaactcaatacttcagacaaacaattcttttcttaagaagattaatcatccaacaattttaggtctttttaaactattggttatcagtttcagccaaaacccacataacattaaacgatatatttcccaaatccgggtcagatgaatcattgctactaaaccttattaatactttcaacctaaaacccaaaagatagacaacaaactaaggtatattgacgcacaaacgaactgttgggttaaaagagaggccttgtgattaatgataacttcgtagaaagtagttgagcataaagcaaaacccagatttgctcaacaaaccttaatcaactcgtccaaggcctctcctttgttcgcatatgtaggtggaggaaagggaaaacaccgagacattcttctgtatagtacaagaacaaacgaatcaagattctgttccgatctaaacagggtgatgacgaaatgttagggtttcgacggcgaacacgctttacttttaacctaataatgtctttaggtctttatatatatatatatgtctagatcaccgacttctttttaactttaagtcggctattcttttctatataccgataatgcccttgctatagggccaactggcaattgcctcctagcaaaacgcgggaacataatacggaaacgacaagtcgtcattttgcttgcgtataaaacgctacgacgtttaaagattaccgaaacgccctcccatctttaccaaaacacgctcaacagctctcatgctctaaagtctaaataagtgtgtgtcgtgaccgtccgtccgacttagcgaaaagctcgcaataaagtaataggtaactactattttggatgtgtgttttgcaaaagttattgatttaattttatatttttgttaaatgataaaataaatcctgtattttttaaaataataaaaataagacgttgagtttaatttcttacaaccttttttaatataactaatttaaagacaattgctaatacgaacagatatataaaatgtaaacaattttgtcataacacttttagatcagttattattaaattgtattttgacaaaaaaatcatttcagggtcttatttgtaccattttagaaaatacaggaactattttgtcatttaacaaaacagaaggtccaattggtaacttttgtaaaacacaaaatctaaaatagtatttatcctaaaataaagggatttttacaaaatatatatactatattttagttaaaagtttacaattttactgtcacatgaaattttttataaaaatattgtctttttataaaacaatcgtaaaacatcaaaacattactattaaaactgcagtggaacaactaaaaaataatcgtgaaacaactgtaaaaacttaacatagtacacagtataacacttatacagtaattttaaaaaaaaaattctaccccacaataaaaaatataaaagtaaaaattttaatatgtgctttaaaaaaacctaaaataaatcattttgtcctggtccataaaacaatatgagtcgtactgtgttgtgttaaatccatattttcgtgtcgtactttgagttttttataaatgggtcaacttatttttttatatgggctcgaattcaaactttatttttccactatgtttttacaattaatgaattaatcagtaaattatatttttttttatatagtttctattgttttatacaatttttcaacaatactttatacataattaattagaaggattagaatttgaatatttattattattattagtaaatacattttaaaatagttttttttttgtatttttacagaaatctacataacaaccaacggagcaacttaaatcgcaactaaaattcacatggcaacccacatagaaactaccgaaacaacccaaatagtaaatttaaaaaaaaaaaatatggtatgtaggttaattctcattactattattattattattannnnnnnnnnnnnnnnnnnnnnnnttattattattattattataaaagctaaaaaaggtatcctaagtaatttaaatcatcgagttcattgatattcttgatatagtaaatgctatcacacgtacaattatacttaattcaatggaattatttgatctcaatgggatcttacgtctttcactaaaagtttttatgaatttccaaaatgtgatgactagaagagctagttataatagtgatatgcataaaagagctagctcattatcatcatacttcattattattattagtactagctaacgtaaccgtaaccgcgtgttgcgcggtcctttcaataattgacaaaaaaatatataattttattaatttataattaattttatataattaaagttaaaaacttataccataaatagcaagataaaatataaattataatcttctattatttgacaattttttttaaataaagttttattttcaattttaaaagattaatttaaattttaaagttttgacaaaatattaaaaaaattcaagaatctttcttgcattcatccaaaaatgtacaattaattaagcaatactaagttaattatattttgcggcataaaccgccaattatttagattgatgccgatagtctaataaataccattaaataaaaatttgcgacataaaaagctctcaatttttgaaattatattagtattgtttctaattgatatgccaattcattctaaaaataatcccatgtgatgatgctttagtgttcaaaccatgactttagacttcgatgatagaatctaacccaatatccaacaatgggtccctccgatttcatcagataattgttgtagaag

SEQ ID NO: 36788 - DNA, 3967 bp, Cannabis sativa
ctcatggtttaatattttctaacattgaagctttttatttcttttaaatttttaaaaaaattctttgcgaaatatgcaggttcggatggtcactggtgataaccttcaaacggccatagcaattgcattggaatgtggtatacttggttcagatgcagatgctacagagccaaatgtcattgaaggaaaagtattccgtacatatactgacaaagaaagagaagaaatagctgataagattacagtatgatttagctttctgcttgcccctccatataattgtttgttttagaaccaatctagttgtattggccagtttcaattgatgcttttcaactccaattttaggttatgggacgttcttctcctagtgacaagcttttgcttgtgcaagcattaaagagaaagggacgtgttgttgctgtgactggagatggaacaaatgatgctcctgcactccatgaggtcagtatctattctcattgtttttagctggtttattatgtatggcgtctacactttggccacaattaatactctgttacaggttgtaataagaataaaaggaattctccattgatatctttgattacatggtgaaaaccatttgttggtgggccggacattattagtggcattggcaagggcaatcacaattgttgatagccttcttattctctctctctttttcctgaaattttggtggcatagttatatggtgttttaatattgtagtacaatctggtggcttgtcttgattttttttcttcctctgtggagcttaggctgatattggtcttgctatgggtatccaaggaactgaagtcgctaaagagagttcagatattattattttggatgacaattttgcttcagttgtgaaggttagtcgtactgcccacccactcttctgttttttattttttattttattattctagtctgtttaagacgctgatttgtctctctctccctctcttctggatgtaggttgttagatggggccgatctgtatatgcaaatattcagaaatttattcagttccagctcacagtaaatgttgcagcacttattatcaatgttgtggcggccgtatcttctggtgatgttccgcttaatgcagtgcaggttggtgtcctgggtctgtttgtttcttctgcggtgccatttagataggtttaattatttattttttgtttgctgcagcttctttgggttaatcttatcatggatactcttggtgcactagcattggctactgaaccccctactgatcacctgatgcatagacccccagttggccgaaagtaagttttctctataagttgctttagtgtgttttttttttttggtcagaagtgttgttttagttagtttctaatataaaactcaaatttagaacttttgaaatataatcgtctagtttagattcttttggggtgttattttctcagaagaagtgtggatggttggaatagtgagctatggttatctgatgcaaggttaattggaatatatgaaacgttgtataatctgctgttgaaattcgacagtctcttcctgaaaacctgaactttccttttattgaccttttgagttctctatttgactttgactggatgttgagaaacacgtcatatctggtgggactgctcgttcactgtctgctaaataactatgcctttttatttttccagagaaccacttataacaaatatcatgtggagaaacttgctgctccaggtaggtttgattttcaattccttttccagccttttagtgtgtggaaaattcattgacatttttgtttggctgccaaatttcaggctctttatcaagtcactgtcctgcttatcctcaatttccgtggtaaaagtttattgaacttggaacacgataacgcggcacacgctactatattaaagaataccctgatattcaatgcctttgttctttgccaagtaagtcctcaactccctggtagtggttaaaaatggaaattgctaacatatttgttagatctgtgtgatttagtcttggaatatgtcatttcatttgaagcagaagcagaaaatttaagaactagaaataccaggaaagtggaaggatttagatagatgatatccatattttatctgaaaagaagaaaaaaggcttgagaatattaagaattgtcgccaagtcaagaatgtgctcctctggttaagaagcccatcctagagtgcctttcccgtatatttttatatctggagttaacaaatatggatccctccgttttgtttcagtgcttccaattaaaaaatactactaatacagaagccaataactaacttgatcatgaaatttgacatgtcatggtgccttaatgctaacattacattggtattatgaaattttcgttgtacacaaatcactggttttgatgcttcacttatttggaactgattgcaatgcgaaataaatctccttttcatgtcttgaataacaaagtcctaatactcatctcaaggtttttggatgcctagcatatgcatcaacactcttttaagtcatgggaataaatgttctatttcttttattcatttttcatgggagtaaccacttcgtctctggcagatatttaacgagttcaatgcccgaaagccggatgaatacaacatatttgcaggaattactaaaaactacttattcatgggaataattgcaataacactagctcttcaggtgatatgatagtgaaacttagtctacttgtttgttgcgtgttgttcgacatattagccacttataatttactttcttgtgtccctttagattgttattattgaatttcttgggaagtttacaacaacagtcaggctgaattggaagcattggttgatttctgtcatcattggtttcatcaggttaattattttcaattagtattctccatgtttttcaagagttgaactacaattacgttgacgatgatatattactattctaatctctatctaattttgctgcttttcttttattcagttggcctcttgctgtcgttggaaagatgatacctgttcccaaaactcccttaagtactttcattacaagaaagtttcgacggcgaagaaattcaagaagtggtttgttttctgtttcatctttcaccttgtttggcaaagtgtttcttttcaaaagtttatatgccatatagtgattaatctttccttttctttttcctctcctcttttcagattagtgtgcagcagggaaaacaaaagcatgttctacgtaattttgtgtgattagtggagttcctcgtttgatgtgttgctattactttacattctgctttttctttattgtgttttatctttttctggtcattttgcgtacacatttgttttgtaatcctcggtttacgttagtgagtgccgagtgtggatatgtaggaactaatcatctctcaacactgaaaagcgtgatatgtttcgatcttacctattgttactacgaattaaatttcaccaaaattgccttccaaaatctattatctcttattttgtgagggaactcaagacttttcttattattattattattattttttacaattggaggtattctatttcttagagcacgctatttgtcaaaataattcactacaaattgtacctttttttttttaatgtttttttaattttacatcatacaacaaatttttgaaatatattttactcattttaatatacaaaaatacacgttaacgtatgtaacaataaaattaaaacttaaaataattgttattgataaattttattgaagttgcaaaacatcaattgtgactgttcttaattgagttaattgtgaatttttatattcttaaaaatacaataaggcttcccacaaatttatacaaaataattttttttgggttgagatgcaaaatgaccataaatttggtaactaagttagtaaatgtcca

SEQ ID NO: 36789 - DNA, 5377 bp, Cannabis sativa
  modified_base (99)..(112): a, c, t, g, unknown or other
  modified_base (5319)..(5334): a, c, t, g, unknown or other
gcttggctcacgggtgctctactgtgcaagaaagggtaaatctgtctctgatcagccatgagtgggagagctgagtgatgtatgtacatgttcgggccnnnnnnnnnnnnnngggttggggtctaccagtgatgaaatttcgtaactctgttttagagcttaggtcggctattgggaaagacttgtaatattttgtaaaatatttttgggatgccaaaacttgtaattttggttgtaaggttaaagttattacaagttttattttcattctgatttcgtttaaagtttagtttcccgcgcttattttgattagtaatcctgtttatggaattagggttctttaatcaccattaagtggcgtgcttaattgttagggtgttacaattattaggagtgcatggacaaactacaggggttccagaaaaaactttgtttgggaggaatatatcatggagtactgcacaggtgttcatcaggcattgttttagcaagtttttaaagttttaactataattacaagtttattatagtttgttaactgcttcgctgttctccataattacaagaccaattctatcctagatggggggtaatgagttcatttacttcattatgcatcttctcacacagaggcacagggtggttgttaaagtcgacattgagttgtgggaaattaacgtgtacgaatgtgattttagcattgtaattggaaggacatagaagccatcctgaagccctgggaagatctgttgcctttgttactctatgcattcagagaattctgaaataattaccaaatcatggccttagatatgaataaaatcagccagcttccgaggatgcatttatctcgagtcacccacgacttacctccgaaggcagaaaaaggtacatatcttaaaaaaagtactataataataaaatctacattacattctactaattccatatttttatgttgcatttagtggtgattgtggcacttatgccattgtatacgtggagcatctgatgatgcaatgtccaataggtgatgtgacgtaggatcggatgaggatgtttcgtgaacggtggtgcatcgatctctattaccaaaatgtcgattgatatatatatctgtgtataattgaaaatacgctatatattttgtgtagtctttatatattttgtataatttacttattttctttttttcaattttcatctttttaaacaattagtgtaaccatttattgtcatagtatatatattttgtataattttacttaacttccttttttcattaatttaagactttatcgatggtatgttgatatgttgtagatatattatcgacattaattgtttagtgtatttttcctcacaaataatgtgttgttatcccaagcaaagtgtttgtcgatgatatatcgacatttatcgatattttgtcgatgttgttgattgcatgacaaagactaattttctaaagaaaaagcattcatgtcgatgtaatgtcgacataatgttgatagtttctcgacctcttctcgatagttaaacaattactgcaaccatttattatcaaagtttatatattttgtataattttacttatttttctttttcattaacttacgactttatcgatggtatgtcgatatgttgtcgatatattgtcaacattaattacttagttgattatttatttgacaaataatgtgttgttctcacaaacagagagttattaatgatacatcgactgttttttgacatttttgtcgatgatgttgattacatgaaaaagactaattttccaaaaatgaaagtattcatgtcgacgtaatgtcgacatgatgtcgatagtttatcgacttcttttcgattattaggctgaattattttttccaaaaaaatgtagatttttccgacagtaattcgacatgatgtcgataatttttataaaaacaaaaaaaaaaatcctctttctcatcaaataagtagagtaccaacctgattttaaagcagaaatcagaaaaaaaaaatatttagttttgaataacaaatacataacatgttattacaactaatagcacactacgcctcaaatacgggttttgcatgttgctctattgtggcatgaaccaccacagttgtcgaatttttgaggtattatgacttttttatcaccagacgggaaacgattctcccgtcttcttccagcctatcatgacttttttatcatcagacgggaaacgattctcccgtcttcttccaaccttacttttccttggacgacctattggtttcttctccacagataccctaactttcatgttcttgatgtgttcaaggagaacccaatcatcctcgtcaccagcaagattgatggtatcatcgtaaatcttcctccacatatctttcgaataataaggtgagaaaagcgtgtacacactcgtatttgttttcaatgctgcgacacatgcatgagtacaagagagtttcaacaaggtaaacacgtcgtaggtgcatgtcctttcaactaggttcacatcaccacctctttcaccgttaggtcccctaccaacgttatacaaattggctccatttcgttggacgtgcctgaaccttccatcattatgatgttttgccaactttttttcaaagagcgtggctaaagggattgtacgtttgactgcatttttaaggcgattagcgagccaagattgcagtgtaaacttgataaattaaaccaaagtagttattggatatttcttgaactcttatgtgacactgttgaagctttcagcagcgttgttggtcatgatgttgtatcgatcgtccaaacaataagggtgatcccacttctcaaatcttatactcttcacatatgtagcaatggcaggattcatctttctaagattctcaaattttctatcaccttcagtttttgaccatgagtaagcaacataatatatttggttgtgaagagcatcaatcttgaacttagagttcacgttcataacaatgtgattatagtatgcacagtggactgcttcggggaaaacaaggtcaatagcatggtcaatgctttgatgtctctctgacacaattactaagttctcaaccaccccaattgcttccctcaacttctgtaagaaatatgtctaagagtcattattctcactgtaaatgataccaaaagcaatcgaaaataattggttgttggcatcgtatggcacaacaactaacattataccgccatacttcgtctttaaaaatgtgccgtcgatactcagaacaggacgatagaaagtaaatccccttctacatgcaccgagtgatataaaaaagtacttgaatcgctcatcctctaaatacaagtcaataatggtacttggattcttctgttccaacatgtactagtatccatatagcttaatgtctgaaaactctggcgtacccctcacatacgtaagtgccttctccctgcacctttacaccttcacataactcatctggatactataggcgtcaaacatgtccctttatatgtctttacccttgtacttagttccatcttgggtgtacttccccttaataaggtggccaaccacccatggtgctgcttgacggtgatttgaatgtctcgcattcaggttacatatgtatttgttgtgaaatacagtaacctcaaagctgttaaaatgcatcttcttcctccccctcaatctccatttacaatctggatccttgcatgtaacgtacaacacatcgagggctgacctcttcaccatccactcaaaattgtcattaattacaaacctagtcactacttgtctcaattcttccttcttatccaagttgtatctcccttgaaaccttactttgtaaacaagtagtaagcttatgattttccattatattttcctttgtcgacataggagctttgaacttggtacaaacttcaaatgacgataaagttgacaagggtgcatgatgaggaggagcatgttcttcagatctaccttgtcgactactactagttccaggtgtattacaattttcattacggagttgtcgttctcgctgtgtaccatggtttctcagtgcacactctaacctcaaggaaggtacctctacggcttcatcgactaccaaatcatgttcatcattcatagcatcgttattgtagaacagagtattgaactcctcaaactgatcaactcctgccgcttcttgctgtttatctacattggtaggaacctcctcattcacaccaatcataacatctatttcaggaacgaaagaccttaccacactctgagggagaggattagtaggcggggtaggctctaaattcttaacttttctcatcttagtcataaataatggcataaaatctgtgtttgacattgttgcctcatctctaagaacgttctaagttggcattctttcttagtaacctttggcaaaaccgtttgtcctttcatgtacaaggaacaaatcttttaatttcaaattatacgccaaaggatcaacctccaactcttcatataaaatctggtacaattgttgtatggttgtgttaactatcaatgtcaaactgccttcgactttataaacccaattaaaaccctcaacacaccaaacaccatcgtacgatacaataagaaacacagtcgatcctgtaattttaaacaaataaaggtaagttagggataaataccgaaaaattataaaaaactaaaaacggtagaaatttaacatgatcgaaaaactgtcgacatcccatttataagaactgtcatgatttctagcagtggcatcgtcgagacagaaaatcacatatcatcgatatcatatcgataaattaagcagtggaatttttgtggcctatcgataaacaatcgacaacatgttgatctaatatcaataaatggacattgcatgtcatacccgtgtacaattagacatttaatgataattaatttttcccaccttcccaacttttactctataaaactgacaagaccgtcgataaactgtcgacatatcatcaatatcatattgacaaaggtgtcaataaaaattatacctttcgaaaaactattgacaaagtatcgacattatatcgataaatgcacattgcatgacatatacgtgtacaattggacatttaatgctaattaatttttcccacctttccaacttctgctctataaaattatcgaggaagtcgacatatcatcgatataatatcaataaagtgtggccttaattttttcctatccataaattattgataatgtatcgatatgtaacaccctaactaacatnnnnnnnnnnnnnnnnttttaaacatactgtgcagcttgttgctaatcaacgaggttta

SEQ ID NO: 36790 - DNA, 4325 bp, Cannabis sativa
tgatcttagaatagtatggtacttttcaaacttattctgaacccatttctattatcgtttttaagatttgttttatgagtcatagcgaaaggacatctattatacatagttttctttgaagtttgtagaaaaaacttcctttaccctctaaattattatacatatttttcttacattcttcagatgaatctaatataacatttatcagtcatacatattgaatttttctttgaaagggtattttgcctgcaacaccaagtcatccctttaccctctgtttggatcttggattataggattgggaataggtggattccaaaggatctcattttatcatgtttggattcaaacaaaaaattgagaattctttctcttgaagatttaaaagtttaatgtattatatttttataacatttgggaacaattatacacatattcaaaaacggaaaatgtatatatgtatattttttgaaaataaaagtcttctatcaaatttcaggaaatatattttccaacattttttctctactctttttacctcatagaattcttcctttgtaaattcaatatcaaaacatagccttaggatatgtgtatgttgttttaggcccatactatattctatataatttctattcttaatgggatttttatttggataatgcagctgattttgatctgactgggcaattggtatggcctggagctatgcttttgaatgattacattgcacataatgttaatctgctccaaggatgctctgttattgaattaggttctggtgttggtaagtagttactatattatcagtgcaatataaaatttattgcttgagatttttctcagtactgaattgtatgtgttgattaggctctagcagaagggaaatcgtttagctgatttaattatatcccgtgaattgcaataatagatgagcaaatttgtgaattttctccttcttggtgtttggaggaagatattttctcggtatgcataagatttttctgtattgtgtatcaatcagaacttttgctaatgcaacaataatattcatttatactacatttatcttcctttctaccttttaggtgttgttttcccttcttttatagctaaattgtaagttggaacttccacagtttgactgtctgtttaatttgtaggtattactggtatactaagtagcagattttgccataaatttgtgttaacagatcataacgatgaagtaatcaaggcaaggtcatgaaactataattcatttctgagatatttgtaatcttcatttataggatatttgtaatcttcaagcattttgactgtggatttgtgtgtctcagatcctcgagaaaaacgtagagctgcatgcatcttctcatgctggtgagagaaagttcttataataagatgcgtatttacagttcattacttcttacaatctttctttaatataattcttttcgcagaattattggttgagaaactagagtggggaaattctgagcagatttgcgatatcttagaaaagcattcgagtggatttgatcttattcttggagctgatatctatatccttgagtttcctgtctatcttgctcttgttagcttatagcaacataaacatatacagcaacaaatccttgaggacccttacaaagggtgccacatgccaagacattgatttagtaatgtgttttatttgttaaaagctatgctaaactatttaggtccatcatcctattctaggctttgcattgtaagtattagttttctgttctcacaagatgtaggttctataaggtctgctgttgatttcgttagtgcttattttacttaggtataataatactaatgattgcgatatttctgaaagaaacttctggtgtcgtgataaaagctaataccagaaggtaatttaccatcatttcctatattaattttctcatgcattaatatatcaaacaagatctttttttgggcccttcaagtttataatctctttttgttttttatttataaatgaactctatttctccatttatttattattacatttggatttaaacttatgcttgtaccttcaattgttatgatttattctcagttctagaattcccttttacttcatttcaattgttatgaaatctgaactaattagtaaatcaagcacgtacttcatcatgttctaatcttttagcattgctttgaccaaactggagaggaaagaaaaccttgacaatacataagctttcaacaatcgagcattcctttgcttttcagtacagtgaagaaactccttgaagttagaggccaaggagaatgcaaattcatactagcctacgtatcccgtgctaagaggtaagaactaacccgcctctttaatctttcttccttttttcatttatttagcttaaatttctataaaagtttcttttatgataactcatcccaagttttatgaacaaatagagcgttaagtttagcatttcttgaaagaggcatttgccatattttccatttagaaaaatggttctaaatctgcacgtattaactggagctacttacctgtaagaagctcacattggttcttatctataatgagatattataatagaaatctctttacccccaacgattaaactgtattttgagatgatcacactgtacatatactcgtttgcttttcttcccagttgtttgtttctttacataacatacttatgtttcttcctgtctagcatggatttagtggttccaaatgaagctaagcggtgcagcttgcagataaccgaagtagttggaactcggcgtgctgttagtaatttggaaggagttatttttgaggtgaccctttgaaaaaggtttaagccattttaatgtcaaaatatttagtttcctgccagttgaaaaggaagctgttttagtttcataaaattttggttatttgagaagttgctgatattgtcgaagtttggtattttgagaagtaaattcaaccagcaatgattaagtatttaacagtaagaggatattggtatgaaatggggtttgttgtcaaaaagtttttttttttttttttttaatttgcaaaaatgcaacacaaaagctccctctttatttttatatcgaagcaacgacaccaacctaaaaaataagtatttaataacaataagagtaaataatagcataaatacttaaaattttgagtttgtaaggcaaacataaatttaataattttttagtggcataaatatctaatattaataaaaaataatttacttcggttttatcattacatacttcgttagtgtcttacacatgacacatgtttttaaattattgggtgtgaaaacataagttatgtccaaatcttcttttaatatattcaaatagagcttttataaaattagacgaaaattacaattttataaatattaagtatttatacagttaaaaaaattatgaaaaatttacaatttagaacattaaaaaagcaattaaatttcaaaaatattgttgttttatttaataccctaatatatatctttttctataacgtttttaaaataattgttttttttttaatcaatatagcttctcaatctatgtttgcaatgagaacaacgacatcatcattgtccatgtccatcacatttcttcttgagtccattgactcattggtttaggtttagtgacctcatcttccgtcacagtcggacatctttagccgtcttcaacggccatcttgactatttcatcgacaaccttcaagaacgcacatgtctttgttttccaataggggtagttggccacttccaacatcgatggctcgatatagaaccttcttccctgaacattttcatcctagaaaataaatatcaactaaccagaacaattgagagctcctagagtcaagacccagagagtgttagtggtgacttgatcaaccagaattcaagaaatgtaactatgctaaagaggaaaataaattcaataagatcatttaacatagtaaccaagaaacgaggattgaagaaaaaattattctaaattttcaagctctaataccaaatgaaagacctatgttattatagttactgagtttaattaacaattgtgatttttcttgttgattcaattcgattatagtatttagacggtaaaagataaagttaaaacaatatgaacacagtcgaatttacaagcttccccctgacatttggaaacaaattccaacagagtattgcttgggttcctagaaccagggtaagtagcttcactataacaattgtgatttttcatgttgattcaattcgattatagta

SEQ ID NO: 36791 - DNA, 1908 bp, Cannabis sativa
ttaaaataattaaaaaataaaatgaatttcataatattttatataattttttaatttaaaattaaaaaaaaattatttatctaatttaatactacacaatataagatagtattaaattattgaggaattactctatatactattttcttaatttttaaaaaaaaaaatttacagtttgggttgctatgatagtttctatgtgtgtgggttgctatatgaattttagttgcgatataagttgctccgttaattccgttaattgctataagagtttctgtgtaaaattccgtaaaaataaaaatacaaaaaaaaatgttttaaaaaaaaatgttttaaagtgtaaaaaaaaaaaaaaaaacctaaattattttaatttcaatataatgcaataattatactcaatcttatgcaccaaataaatttatttatttatttttttctttctctttttcctaaatatttaatttaattttaaggtttaatgtttaatttgtagaaaataaaaggtttaattttttcactaataatatatattcttttttgacaaataataattatttaaatatttaaatgaggggaaattgggaaacgacaaaaaaggtgggacccattgcttcaacttcaccatcacaaataacaaggcatgcatttggacttggactttgttgacaaaatataataataataataataatttataatattattataaaaatagaagaatttgatggggttacaatctacaaccacatgattaatgattattatttatttattgaatattgattaggtatttgataattactattttggttttggctatcaatttttttcattttttaagccttaacctaaaattgtgtcttttagaggtgattgatggccaacttcattgataaggccttgccctctttgtttcttcttagaacaaaacatttcatatttgtgtttagtttcaatatgccattagtttttgtgttttagaaaatgataaaatgaagctttgttttgcaaaataaatcaaaataaataccaaatttaatctatgtcaaaattaattaaaatgaaatatgaattaggtatttttagaattataaaaatttagagtattttagttatattgattgaaagaatatttaaccgaaatcgagtttagaatctattttgtgaaacacggaatttgtttggggaattttcatttttatgattttttaaagtgtaagtttgcaaaaatatggtttttttctcaaaaaaatatttatggaaaaattttagaaaaaaatatggaaaatatgaaaaaaaaaaaacagcataatatactggttacccccacatgctaattggttatccttctattatccataagattacaaggttacccttacttaatttttccatattttttaacttttttttttttatcaattttcccataaaataatttttttgaaaaaaaaaatcatatttttgcacaaaaagtataaaaaccaatagaagttgtaattttttcaatttgttttaccttttcataaaaaaaatataaaggctagtcacatacaaataataaggatattttcataaatacttaaaaatgttaaaaaaaaaaatcaaaaatacacttatacgaaattttaaacattttcacagtttataagtttttatttataaaaaatacgaactattgatgctttaatgttatttttgtgctctaatttcgttatttctttattatttatttatttattgttatttgtatattattcttatgtcgttttgatgttatttttataagacactacaaaaatgcaattaaaaaaataaaaactataaagttgaaataaaaaagttttgtaaaaaacataaacaaaggtagcgtttggtaatacttttttaatcagttttctgttt

SEQ ID NO: 36792 - DNA, 2125 bp, Cannabis sativa
  modified_base (1724)..(1730): a, c, t, g, unknown or other
tggaacactaaaaatattatataagttaatttaatttttatatatatttttaaaaaataatatgcattagatgtatttttataatttttattaactaatttattatatttaattattttttaattttttttttaaaaaagaatgtacatttattaatttagtttctaaatttagtgctattttatattttaaccctttaaatattgttgtggtttaaagtgcaattacaatattaattgagtcaaatgtaatattaaatttactgtttttttttattttgctaaattgagtttttttaaaaaaaaaaaaaaatgggagatggtcttaatataatagtataatatattgtatctttttttttttgctgaaaatatattgtatggtatatggaaaaatcttggccggtggctaaaagaataaaagaataaagtcttaacaatttatgcaggggataaaaaaaaaagaaagaaatgaaaagtctataactctaattctacttcattttttcacatatgtcttactcttagcgggtggataaaaattatgaaagacacgacaaatttatatttgttgaaggaatagaatgggacagacaatttggctaattgccatacattttctcagcaaccatcttattgtcgcctttcatgtcatatgtcttataaataaaaatacaagccagtagtaataattaaacagaaagtctctctctcaccacacttcacctaaaatatttctaattaaaaattgtaggtttattttcagattaagaatacgttaatggaatcagcacggttgtttcaagtgaatcggtttgagccagagttggtcaaaccagcagaagcaacacctcgtgaggtaaaagaattatcagatattgatgaccaagaaagcttaaggttcattgttcctctaatattcttttacaagaacaagaataagccttcttcatcaaattcaaatatcatggaagaacatgatcatgatgatcctgtgaagcttatcaaagaagctgttggtagaacattggtgtattactatcccttagctggtaggcttaaggaaggtctcaacaggaagcttatggtagactgcaatggccaaggggtgtcctttgtggaagctactgcagatgttgactttgaccagcttgccaatgtgattcaaccctcatcccccttcttacatcactttctttttaatcttcctccacaatctcacaatatacttgattctcctttgatatttattcaggtacgtactttgtgtgtgttttttttagtttcttaataataataataatctatatctatatatctatccaaaaaaaaaagtatttgacagtgatatgtcagtctaaagttactttattaacctccatctaatctctccttaattctctcatatattatttttttatttgatttaaagtttaatatatattttttatttcgtttaaatttctttgtatctaattttttttattttttttttcttaagtaaataaacaaagattacacccgtgtatggtttctttctctaacttggattgtttctttataataaacaaatatcacaaccatatatatggaacacttcttaatgggtattaatcataaatggtcactaaacaaaattaactataaatattaattttaaaaatattaaaccatcaaattttgatctaataacgaataatgaaatcacaaatttgaatttctatnnnnnnnttaactacttaattaaaaaaacaaatgtatcaaaaaatatctctttttacactatatcaaaaatatgttcatactatacaaaaatatttaactcaaactcaatttttttttttatttttcttgctaaaaaacttttttttaattttttttatgccgatggaacaatcttagcccatatgatataaaaatgagagatttttttaattaaatcgaaaaattaaacatacaaactcaaaattttctaattttacccattcatgggtaatacccattaagagtgcacatatatatatgttacatatcctatatatataacatacgaatacattaatatgtatatacacaatatatattataaacacataatatatatcatatatgtacgtatatacaaa

SEQ ID NO: 36793 - DNA, 5711 bp, Cannabis sativa
tctaccaaatcatgcccctcaaactttgatgtgtactaaatcatgccgcctaaactttcgtccatgttagaattttcttactaaaattagacaaaaatccttaaatctaacaattcaataattcagagggaatttttaacgaccttaaaagttcagaggtcataatttaatacttgtcaaagttcggagaaaaaaaattccaaattagcctatatagtgatatgtcactaatgatagcgctaaaagttttatgcatgagtatactatatttacatacattttttgttgattatgtaatttattattaaatcaatatactaattagttagatatcattttaatttaaagactactaacatatataatcattataataaaataaagaaatttttactacatcacaaatttgaaaaacttttaaaaatacattaacacggattttttttttattttatcatttaaatttttttatttacaaaagtacgaacttcatagaacagttcaataatattctttttgaattattttgtaatttatttataagttatttatagtagtcatgaggtggattttcttatattttgttgttttatagtttatttatagttaatatatatatttgttgcgagattaatttctcgttattttttagttgtttcttacattttgctaaaaaaatcgtattttaatacttttgaaactttaaaattatatttttgtaaataaaaattttaaattctaaaattataaataaaatataacacaaaaatttttggaaataaaaatccaaaaataaatgctgtcttttataggccccttaatttgacccacatacgattattgatgaagtgagttcatgtccaaatttgaacaagttgtcataattgaaaacggttgtaatatgtaattacagtgtgcatcactgaaacaaagattagaatacgaagaaatggtattcacaaagttatttatagttgtaggatatatatattgcatttttacttttcatatgataaataataggcggattaattggctcatctttttggccgggataaaggttccattccatgtaataaaaatgggtcaacttcgttgacatcatacacggtgtagttcccaaggtacgtaataaaattgatacaataatatttgataaaaaacaaaaactattagaacataaaatgttgatcccaattttgaactaacgtactatccaaaagttctcgaacaagtgtatggtacaccacatgtgtgtgtcaatatctttgcgatacgttttttaactattttgcaacacgtactcattgtacttaattattagttatattttcacttcattcatgaattcattgtcccattcttgttataaatagaaatattaatttcagatctatatttactataaacaccatttatcccaaaaataaaaccagagaaaacaaagagtgattaatttgaagataaaatacagtttccttgccgacaaaaacctctttgtttttatcctcaatattggaaccgctcataaaaatccctcaaatcaaaattaattaataataataattacacaaggaatagtgaccacagtgagccatttattacatattacttttattaaagaacaaatttacgacgtcactggctctttaactattatcttattaaaaatttataatatataaataaataacacattactcatgagagttggagataaatattaatattgaatgtatatatttatgctgttgtacttgtaggtaggtataaatgagttgttattatacaactggcatatattaaaacttaccccaaagaagaaaccatataattataatagtgaatggcaccatcaatcaaaattatgttacgaacttacgtacaagtaaatgcaaatattatctacacatagatctatgcataagaaaaataaacatagttaaatattaaatatattaaccagaagtccataaaaagctatatattattttataaaacatcatacacatatatttatgtatatgtagttatactataatttacactttttttttcctgtttccctgtttccttcagtgagttataatgcatagtactgttacatcttttgactatgtcttcgtaggcttaaacacaaaagttctaattaagaacagcttagaacaagctatatccacaaaaacctaaaaactttgataatttactttctttattatttatttcttttgtatgacgaggaagatcaaaagagtgctgcactatcctctagcgacatgttaataaggtcctcatgcccttgagctgaaccatcatcaagtagccacttttcaagcaatgtgagaggagcttgtactggctcctcaattttggtattatgaggcttgctctcatcttggaagcacagagtacttgtggccctctccggtgtcaaatttgcagtctcgtcggccgacaaggattctgatgcggtggaggagttgaaactaaacaaagagtactcaaaatttgtattattagcagtggcctgattgttatgttgacggtgattgttatggtgattgtgatcaggtgtagtggtcccactttgagctccttcacttgaacttgaataagtagtattagtacaagtattattattattgggctggtaagcaaccgggttttggagcaaatcccgggtcgggttggagtttgtttgccccgattttggggaattcttcatccaactttcgagcaatcgggcaatgttctcagcgtttgatgcatatgatagtggttggtgtgatttagtagtgttcttatgatcatgatcttgatgatcacaactagtgtggaaacaagtggttgtagtaatggacggtttagattcccccaaattgtgattatgatgatcaattggtttgtcaagggagagagcttcacaaagagcttgttttgccatgtgaatatctgtttgaagccttctttcccactggcctttggagatttggtgcgaattgttatcagttgagaactcatcatggctttgaccatcatgcccagtgtgaagctttctgagcttctttttaagatgggtattccagtaatttttaatatcattatcagttctctgtggtagataagaagcaattgcagcccatctgaaaaaagtaaaacatgataaaaacttgcatcagcacatcattaaatccacaaaacagaaaaataaaacaactattactacatattagaacaacttcattgaatctacaaaatctacctatttagctttgtacatatattcaatcaaatctatatatgtatcgaaatgacaatttccataatccctctctctttcctccattatattatttttattattcaccagttttcgaaaaaaccaagtcacaaacttcgagggataagagaagtgagtgaaaaattatgtatatataacaaaaaaaaagtaggaattaaggaaaagaaaattaaatacctattgcctaaaagagcctgaaggtggattatcatcttttcctcatgatcagtgaagttaccacgtttaattccaggcctaagataattagtccatctaagcctacagctcttactgcatctcatcaaacctgaaaatccaaataaataaaattacttagctatgtactacttactagaaaaaaatatcaaccattattagtttgaaactaaatccacacaaataaacataaaaaaatacaattccaaaatgacccaaaagaaaaagatgtgaattactttatatatatatatatatgagaaaaaaagtataggtatacctgtgtgagtaggcactgatctccaattaccagggccgtgttcttgaatgtaagaaaccaaaatgatatcctcttcgggagtccaaggccctttcttcaccccaactttgtcacagcaaggtggtcttcccatttttgattctcgattttcttttatttatgagatggatgttactatcgtttggcgaaaatctattgatgatgaagctataagagagggagagagagagagaaagagagagagagattatagtctcaaagcaaagttatttataataatttccaagctataattgtaattacaatttaaagagaaccctgtttatagttgagtgagaaagataggtttccttttatatatgtattgttgtttgtaaatgtatggatgtgtgtgtacatatatagagggatgatatttgtaggaaggacaagcgtccaagacagggtttgccttgttgtccatcgttggtatatatagaaagagaaatggagttattgtatagtagtagtagtagtagtattgttattagtagtgagaaagagaagaaataagagagaaagagaccagcagggaaagctgtcgacgctgacccaaacgagggtagaaaggcttctctctcttacacacacattagtctctagaagagtcaaaatggacagctttgggcatttactctcatccttattacgaaaaagtcagctacacttagactcaatacacctcacatcctctctctctctctctctcttaccgtgtgtaattcattatccttatttctcttatgcttccaccgaaaaataataaagaaaagttagccctaattatatctttcctcttcagcaaaaaaagaaaaaaaaaaatactttcccatcttccacacttaaatggccatatatacatatatataattttaccccgacggtggaaaagtcgcatataattaaggaaatctccatagctagccaccttataagatgggctcggaatatattatatatattcataaaaaaaatcaccaccgaatgtatcatatatcatggtttaatttaagtatcaaatcctacttaatatatatttttcaaaaaagaaaaaatcgtacttaatataaaataataatttttattgctaattattcttaaagtaccacttaatagttatgctaggtagactgtttaataacattgctctttaatttttattacagattgaaatttgtgaagataaatatattacatgcaactttgtttatttttttctaaaaacattaattctaaattgaagattaaacatgttgtgtggaacccaattttttttaatcttcaagtggatcattgtccaccaatctatgaacttcaaggcactcagtatttactttttatacttcttggctgatagcacaatatttaacacatctacgggtcggttagtacactgtactgtgttgtatattaatattagggttggtttggtacatcatatataatatgttgtacaatattaggttgggttgtattgtcttatatagtattattttaaaataatattatattttgtattgacttgtattaataaatttgtctaaaattatgctatctttaccataaaatcgaccctgactccagatccgaactttgagcccactactgcaaaatagactttcaaccatcgatcaacatccaagatcgacacaattaataggtgtggcaagttagcatcggttttgaaccgatggtaccattaggattagtttgtctcattagcgacactaatgagtgaacttttaaagaaaaaaaaaagcccaactgcaaagcctgcacaaatctttgactatatatacatattttggctattaggagcctcattttctttcatctcagttgcccttttcccttacttctctctctctctctctc

SEQ ID NO: 36794 - DNA, 6711 bp, Cannabis sativa
actcttggtgagtttactacttataacgatacgtacacttgcgtgtgcaaaatatcgcaacaaactctcatttttattttcattatttttgacatttgtaattggcaatggccgagtgacccttggtgttactctttgccaagtgacttttcttgttatggtaagcagattttcattcgagtgaatattactcttcgcgcggtctcatcctcttattatttatttatcctttttctcatataggagggggcttattgtacttgattgtgctaccctcttgatttatgagtgttttcttatgcccgagaggcgtccctctcgtttcagcattaggccatgagtgtctttcaagatcacttttggctaagtaacttttgtagggagaagtaagtgtatttctcttgtcgaccaagggtcgctactccttatcgatttaatttttttttttacttttctcccttgtctcacaagtgtgtagcgtcattcatggtactatacacttgagttttgcacacagtttctttcttgtattctctttttttttttgaaggaagtgaggtattactttgactacatgtgatatggtatgattgaacgatttcaatgcaatattcatccttgattcttaccaactcaaataactaaaggatacttttgactcaccttttcaacaatagtacttcttcaaatgtgctgcattccatgcctttttatcaatgtgtcatctatgcggtccaatttgtaggttcctagtgggatgacctttacaatctgataggagccttcctagttggctccttacactcctgcccccgaatccttagtgtttgggaggactttccttagcaccaagtctccagtcttgaaggtgtgcatgcgaactcttgaattatagtatcgcgctgccctttgttgatagactacaaacctcatttcagcaacttctcttctctcctccaagagaaccaaactttttgccattgatttttcatttgttacttcattgaaattcttcactcaaaataagttgagtttcttctcgatggggagtacaacctcacacccgtatgccaaggtaaaaggagtttcacctatggtggagcggggcatggtcatgtacgcctagagtacattcaacaactcatctaccccatctgcccttaagattttctagctttgtcttgaggttctttttgattatttggtttgctgcctcaacttgcccattagcctgggggtgtactattgctgacagtcccctctcaatgcctctctcaaagtaataggaacttagcaagtcccctccaaattgggttctgttatcagtgataattttgtaaggcaccccaaacctacatataaagaagttgttgatgaaagatacaacttgcttagcggtgatgtggactaaggcctccacttctacccatttggtgtaataatttattgccaccatagtatcttttgccacgaccctacctattggtaaagccccaattagatcgattccccacatggcaaacggccacaaactagtcatgcttgtaagtttgattggaaggcgcctactatagttggcgtgtctttgacatttatcacacttttttgcaaacatcattgcatttctccaaaataggcaagtcgtatccttgtttcaatactttcctcgacatcgaatagcctcctacatgactctcggattctcctttgtgtatagaatctcatccattaaaacatatctagcggctttatattggattctccaagcctccttcttgtccaagggaaacttccctggttggatgtactcaacgtatggtgtcatccaagagggttcctcacgtcctactagcaacatttgattactcgcaatggttggctgagctaagaactccattggcacagactctagaatgtcaatcttttgggttgacacaagcttagccagggcatcgacgttgacgttactttcccttgggattttctcaaccgtgaaatgttgtagctgttctaaatagcttttaactttagctatgtatgccaccatttttggcccttttacttggattcttctcgtacttaagaaactaccaattgcgagtcacttaaaatctgtagtcgagtaactttcaattccttagcgtatctcaatttagccaacattgcttcacattcaactttgttttttgaatcattaaagcccaaccgtaatgcacaatgcattttgattcccccatgagatgttatcaccaccccatcccctgctccattatagttcgaggccccttctacatccatctcccatgtggcctctctctttctctctccactttctcccaactctccactagtccaatgcccttagtcctccctatctagatgataggtgaactccaccatgaaattcgccatcacttgaccgttgattgatactcgtggggtgtaagtgatgtcgaattggcttagctctatcgaccatttaagtaagtgccttgaggtttcgagcttgtgcaagactagtcctaaaggatggttggtcaacaccacgattgcatgcatgtgaaagtacgacttcagcttttgtgatgccacaatgagtgcgtaggccaaattttttaatttcttggtagcaagtttcaatgtccacaaaatgcttactaatgtagtacacggtttgttgttgctttccttctcctcttactaaggcggtgctcagggcgtgtttggagactgccaagtacatgtacaacttctctttaggtggatttcccaagtcctcctttgaacttgtgaaagctttctcacattcttcatccaaaataaacttcttttttcctttgaggggtgttgaagaatgagagacacttgttagtggactgcggaatgaacctgttcaatgcagccacccgcctagtcaaatattgcacctatttcctattcttaggcgattccatatttgtcaaagctttgttcttcttaggggtcacctctatgcctctctcattgaccatgaagcctaggaatattccggatgacacaccaaatgcacacttcaacaaattcaacttcattcgatacttgaggagagtagtgaacatctcgtctaagtctctgatcaaatcttctacctttttatttttaccaacatgtcattgatgtagacctccatgttgcgaccaatttggttggtaaacatcttgttgacaagtctttagtacgttgcccccgcatttttgagaccaaaatccatgactcgatagtgatacaaacctcaataagttatgaatgaggtgtgatcctcatctccaggattcatgggtattttgttgtacctcaagtatgcatccatgagcaaagcaattcatgccccgctgttgcgtccaccaactgatctatacgcggtagcgaaaagctatcttttgggcaagccttattcaaatgagtgaagtcaatgtacactctccatttcctgttgggtttgggaaccaacacggggtttgacacccaaaccgagtaaaatgcttcttgaataaacttgatcatgttaagtcagtccacttatcctttcaaggccgcgtacttctcagaatttagagccctttgcttttgttgtaccagagttgcattttgggtctctatggagatggtggcacataacggttcggtctatttcttccatgtcatcgtgcccccaagcaaacacatctacattcttctccaaaaatttcatcaatctcttttaagggctttgagcagcacttttccaatatggaggaccttgaaaaggttctttgaaatcataatttcctttaattcttccaccaactctaatcacacttcctcgcaaaattgtgggtctaattctgacgaggttgccccaatttggctgagtcccccattaatcgtcatcgtcatcgattctgaaggcttggtggtgatcctaagtgacatgttgtagcattctctggcttctttttcttcttccttcaaggcggcattgcctctaggagttggaaatttcatggctagatgatatactaaagtgattgctttgtactggttgagtgacagtcttcctaatatggtattataggttgtcgggcaatctactaccaagaaggtggccatcactgtggaatgccgaggtcgttccccaacagttaggactaactctatagtccccaatggttgaatcaagtcgctgtaaacctgtatatcggtgaggtgcagggttttagatctttcggtccttgtcccatcttcttgagggctatgaagtacatgatgtctattgaacttctaatttcaactagagttaggtgcaccctcgtgtttgccatctgaacatgagtaccattggatcattgtgggggaaatgtaacccctcgcatattcttccataaaagtgactgagtcattttcccctttgaagttctttggaggtctctattccaagctcaagacttgggcctctcgccttacctctcaggtgtatttatctctccccttgcaggtgtcccctcctatgtcaggccttcctataatgtcctgatgtctgtcaatacgtttggggcttctttgtgtacttctcgtctcgcttcagacccttgcccacttgtgcctttgcttcttcctggaggcctatgaatgttcacatcctcgtctattgctcaaggtctatgaccatttgcaatcccctctctgatgacaggtggtggcagatcctgcctaaattgatcaactaactattgtcgaggcgaacctccacctcttgaagattatgtatgaggaaacaacactactttagcctatcattcccatagacagcgccaaactattgacagtaactcttcaacaaacttgtttgccagaaaatcaaactctacttcaaactatgaattaagatgaaatataaattcaagtggctatctcaaagtagagagaaaatataaaacttttcattactctcaatatggtgattacaaaaatgattttctaaccccctctctcacttgagaatggggtacttataggctctaattgcttgagttacatagtggtcccaaagagacaagttgctgctttcgagctgcaaaccgtaggtacaggaggtggtcttctgcctcttactcttatttggtgtcaggtgatcccaaatcgctgaggtggtggctgcagcgtacccttggtcgggtcctcagaccttgcaagcgcactgcctccactactcgtatctccttactttcagagctggcagaaggcgtggtcatacgctttttccttgcatgccttatccttagattcctcctctaatggaattctcttaaacatgtattcaaatatcatcattacttcaccttacacacacaacaacacatgcacgctcgcgcgcacacacacacgcacacacgacacgtgggctcgcatacaaggcccccatacgctctgagctcgcacacgagccctgacacacacacacacacactcacactaccacaactcgcatgtgagcccctctctcatgcacacaacactcaacacacatgcacacgcaccaccagggctcgcatgcgagccccccatgcaccatgggctcgcatgcgagcctccacacacactcacacacacatgcatgactcttaccatgcacacacaccatgactcgtatgtgagcccctcacatcacactccgctcgcaaccttcttccatgtctttctctattcacgagtcatcatagggtcagtccttgtgatgtcttgaattaagccaaaaattgtaagcactgatttttggggttaacatgtactattgaatatgatttaagtttataattttattattgtgtgatattgagtatgttttatatgtgttattatgagtgatgataatgtgatgtttaatgtgtttaattttaattttttttatgtatatttaaatttgtaatgtttgtatatgtataatatttaaaaaaatatatacaaatatttaataatattatatttaaattataaaaataataatgtgtggaattcataattaaatctccacataataaactaaattttataagtataaatattattatattattaaaataatgaaaaatatttacgtgtatctgataatacacaatatatatcgtgcattatagcatagacggtaaaatactacaaaattttatggctcgttggagttatatgcacactaaatttatctttacaattgcctttagtatttatatctagtaatgtaatttatgcgtgtcgtgctgcctcaacttatatttttcattctttacaaaatacggattgtgtgttgggcagtgccataaataaatatagtttgtttcgtgttgtgccaataatttttaagggtagacccgacaaggcccatagacttgatatttttcgtgttggtctcagattcctcctcgtatctatatttaagaatgtaaatttgtgcctatcataatattttttaataattttgattatagacctataatattcagttatatatataagttggctgctaaatccttccaagtatcattttaattggacattactcttaaaatttaaattttggtagtagaaaataatcatgatcatatgctacaaattatttttgggttttgtgccctaaataaaacctatttaaatataatcagatttacttattaataaatatcagaaataacattttatgtt

SEQ ID NO: 36795 - DNA, 2451 bp, Cannabis sativa
tcaatccaggaagtagccagagtagcgtactcgtgtataagagccattattccatgggtgtaggggcctaatagaggcttgaagcgggaacattacacgatgaggctcacattacggtacgttgataactgtgatgaatatattttcttttgtaattaaactttttgaaatcattgttgatgatggatccaattctgatcaaaaaagtgaagcataaaacttattgagtttcatgcaatcatttaaatttgtgtttaacttacatttgatgaaaattattttggaaattaccaattaggtgtcaaaggcactacaaagaaataatcaagatattgtaaatgccatgacagtaatgaaagtatgtaaaacacgattgcagatgatgaacgatagtggatcagattcttttctagctcaggtttctttgttttgtgagatacatgaattggaagttcctaaaatggacgggatctttaaagcttcaggtaaatcacgccacaaatctcatgaaatgacaaacttgtattattttcgagttgatttgttttactctgtcattgatcagcaacttcaagagctcaatgatcgttttaataaggtaaacactaagttgctcctgtgtgtagcgtgtttttctccatgtgaattgttatctacttttgacaagaaaaaattgattaatttgactgagttttatcccaaagatttttctagaatagagttgatgcaactagatcaattagaatcttacattactaatatgtgcatgagtacaaattttaaggagttgaaaggaatttgtgagcttgcacgaaagatggtgcaaacaaaaaaaacatttgatatacctattagtttatcgattgttaacactagcattacttttacatattgctactgatattgtcgagagtattttttgcaataaaaattgtaaaaaccgtttatgcaataagataggagatcaatggatgaatgattgtttagttatttttattaaaaaattaatttttgatggcattgatgatgagactattatgcaacgatttcaaacaataaaaactcatcgtatgcatttgtaaatgtaagatacttttaatagataatgtacttgatttctatgcaataacttattttatattatagtttgatatataattttaagtgcatatccacatttcctgacttttttatctagcttcgccgctgactccatcctcatcatcttccaatatttgataactgctagaggccaccaagaaaaccaaacaaagaacaaacaagaacaacaagaattaccgagagaaaaacttacataaccatgtcacaaaacaaaaatatatataatttctcttttatatatactttcaagaaattttattttatttatgttgttttatatatataaataaacattatacatattatatatatcacttagtaaatataaaatgtattattcaaatcttgagttagtatttttaaaaactccctattattaatctattgcttattttaatcaatttgtatgttaatcttatatatagtattgagtctcaaatatttataaataaaaatacaaattgtatgcgtataaaaatatatatacatgaattagtgtatacaaataaagtgattcaattatttaaatataataaaaatatatcataccatctacaatccaatcgtaaaagagaattttgattttgtatgcatacaattgggggaaattaatcccttaaacaaacaatacctaatatttttaaattaggccaacatttgtgttcacctcaaaataccctccccatttacactttctctttctccttgtctcttgaagtctctctcgcctccttcaaccaccgaactgccccaatccccaaaaaccgctgcaaacgaaccgacgaccaactattagcaacccatgaccacccaacgacgagcaaaccactgttggacaaggttaccaacccacgaccacccgcaacaacgtcgaaggttagttttttatcacttttgtctattaatttaatttttgcatgatttacggttaaaatgtaagagattattgataggtttgttgagatttagggttaaacctctgtgatttgtgagtttgggttagatttagggtaggatcggtcatatctgtattttggagaagaatatggtttttcaagccaggtccgatgccatccgatgctattccaatgtaggtccgatggtctataagagattgctaagtttcaacgttgaagacatcaggcccgatgcgggcctgatgggtggcccgatatgtgtctgattgtattcatttttgaatggcccaattgttgtatgtccaatacgggtccgatgcgtggtttgatatgtgtctgatagttgttcaacttttatgtttttttgtatggtccgattggaccgatatatggtttgatgcccccccccccc

SEQ ID NO: 36796 - DNA, 10407 bp, Cannabis sativa
  modified_base (10360)..(10382): a, c, t, g, unknown or other
aaaagaacagaccttaaattggagttagaaaaggtaattttgaacaatgacagattagaacaaacatggtgagttgcccctgtgtctataatccaattcaaattatgagtgatagattgcataccagaaaagtgtgacacaatgggctgatctggtgagttttctggtgtggaattgtcagcaaccttttgagcaagcattgccataagtctttgacactgagaacttgacaaccctgccatgaaatccttctcaccattcacagtttcagacttctgttcacctcctcctgtgaaattagcagatgctgattttgttggaggttctttagcattcctgttaggaaacttcccataaagtttgtgacctggtggataacctattatcctgaaacacctatcaatggtgtgaccagtcattccacaatttgtacaagagtactttggtcgaaaaggctggacactcccagcaaattgaccttcattgctggtagagttcttgtctggttcagtaatcgtatggttatcatttgttaaactcctttgcctttcttcttgaataacagtagcataggccttattaacactaggtaatggatcacgcataaggatttgagacctaaccatactgtaggaatcatttaaaccaacaagaaattctaacagccgatcctctctttttgctcctggataatcttcacagcaccacaactacaaacgggttgtggtcttaattccctaatctgatcccacaatgatttcagacgagtgaaataagttgttactgtattggatccttgattaagcctttgcattgtctttttcacctcaaaaatcctaggagcatttttctcattaaatctttcatgtaattcctcccaaatatctgcagcattatcaagatacattatactatcagcaatctcccctgaaatagcatgaagaatccatgagattactgtgctattgcatctgcaccagctgtcataatcttcatgatcttcatctggtttaggaagctttccattgacaaatttcactttattccaagctacaagagcaattatcatagatctcctccatgtattataattctcactccctgtgagaatttttggaaccagagtagcacctggattatcgccatttgagaggaaatacggattagacaaatcattacagctcgtcgacctagaattctcaccaagaactgagaatctgttggaatcgttcgagttgccatcaagatcgcgattgcttcgagttcgcacacctcctcctctagccatgaacacgatacagaagcggaagcaaaaagaagaaaaggaagaagaacagagcttactcgaagctaggctctgataccataacagctggtataaaccagcaacagagaaaacagagagaaaaatagaagaggaaacaatggaactttttattattatgaattgaatcaatacaatcaattacataatgaatgaaagatcagcaatatatagctgacaagaatcggttacaaactaacaactctaacagaaaataaccaacttgacagctaatactaactaaccccaactaactaattctttgataaggattcatttttcattcctcacttgtcaggtgtgttgagataaattcaaagcaacaataaaatatataaattttttgtttaatttccgtcaaacttaaagagatagaaatcaaatagaaagctactcattaataataagaattgaccagttaaaaaataataagaattgaaaaggtgacagtattcgatatccaacttcttaaaacatcattctagactatctcacaagcattagacatatctctgcctgatacccacaaaattcctatctaacctatttttgtttgctaaaaacattgcggattgaatttttatacaaagtaccaaatttaagttcatgaggttcttgatctcgattttgaaataataataataataaaagttccccccacccccttattatttttaaagggatatgtcgcacatatttattccaaaaggtgcagtctgtaaaggcatgaaacgaatgcaaacgaacattttggaaatgtaaaatctgtctactttgcagccacagttaacacaatcatatatctatacaagtacagcataaccaagtaatccaatcacattgctaaaaaaatctattcatctaagcaagcagactttaacgtgtatgagaaaattggctctttgaagcgcagagtggtgttcatgtcagttttatctacatcataactactttcagttcaagtcagttcatgcttggcccagctttaacctttgacttcgaacacccaactgctgcatgatcgattgatcttacactgagttgctgtgaagaataggacccacttttcctcaacttcccagggaactctttacttgaattacccttcaatgaaagattctttttaatccgattcctgttgagtaaaagcatagtgttgcgtgttggcacatgcaatgcaccttccacacaatctcccacctgcgcacagccccaaggtcttgatgacccatcctcattgtacgatctaagccttggagaaccagcccttgatcttgaacagctcctcttttcagggcaattttcctcttccaatttcagacacaaggggcagggaggatcactcttacatgccttgggtgttgtttgttccaagcattccgcgtgaaaaacatgataacaagaaaggaccccagtaactggcatgtctccacttctcacaattctacgagagctccatggggatctttgggtaagaaacttttcacacaggccacatctaacaccatcagacaaattataagaccgattgcttatttcagattcaaatgtttctgaaacatctgcaaaatcaatgctgctgctggcactgctccagctctgggcatctctttgagtggtagcatcaaactctggcaatccagcagcagtgaagtcagaaaactctccttgtctggggaaggacaagggatgaataggtttagacataaaagatcgacgccctgaaaaggtacaatgtgaggatgagcgtgacttgtgttcagactcgctgctgtctgaacggaacgaggtggagcccccgctatcttgaatttctgaagttccctgcaaaattataacagattaaaaatatgtgccaatggaaggataaacagtggatttgatccaagacagtttaattatgatgaagtacctccactgaaggtctaaaggatggtggacccaaagccatacctagcaaattcgaaagacactaaatgtttttagtaaatagtataacaaaaatgacaatatattttatgtgggggaaaaacaaagaaaaaaacaggaacaacaatcaataaggtttaaaattttatattatctcagcaaaataatgactgatctataattttagaaggtataatattgagaaattggaacaacatttgtctggattttctacattttcaaatctaactgcataatccaatcagcctcggaaaaaaacttaagaatagatttatatcacctatatgaaggaataaatagctaagtcattatcaacaacacatcttactcatggatagatcatagatcatgtaagctgtatagttgatgactcgacgcgaaggaaaatattaaaacattacataggtagaaattataactcctgaaagatgaaaatcgtatgaagcatttaaaatccctacaacagacaacaggtcaacatggtaacatgtatactttcccataacggcgtgttcactggcagcctcttgggctttgggattgcattcatacatttaaaacagtgtcgcaatcaattgcgtccaatattttttatttttcaaattatcacacaacgattaaacttacacaacacttgcatctgtgaaaggatgcaggcatatagattcacatgaacatgcacagtatgtttgacatatatatgatgaaagacagaatctataatcataaacatttgggctaaaaggtgactacttgacttctaacaaagaacattccaagcttatctattccaaacccaagatcacaaagtaacaaatcagataatggcctcagaaaaatatgtactcagattcataatcattaatcctcaatttgtaatattaaaataatacattgctaattacctctccttgcagcagcagattcaaaatcatcccctctgatttcctgtattgcaggaggcgtccattgaggaccctgagaaaggtctgatgaactactcaaaaacattccagtaccatcagatgcgtactggtgactataaagttgattgcctcttaaccagttcctactttctttactgtttgatgacgaaaaggatccattctgttgatttccatcatgtgaaccatgttgtagtccttcagaatggaactggaaatcccatcttgatggaggtggcgagaagcttgtattagttcgccaatacggctcatgtggacccatcgaccagtccgtactggtatgagatccatgtggccttgcagccacacaacaaagcgaccccgttttagctatgttttataatactcaccaatgtcttttccgtctgctttagacctctacaaagtccaccagaaaacaacctcactgcattactgaaggcagcaatactctacagaaaaattattctggctgcttatgctaattgcatcttgctacgaagcaaactatacataaaaaaatgcaccaagacccaagcatgaaaaaagaattaggaacttgagctacttcaaattagtttacatataaaaagggacattccagtttttgagtgcttaacactgacccgtgataattagcaaaaaaacaaaacatcaactcatgttataaactctgcacaagcttctgaaacagaatcaacagatttgacattctttcaaagttaaatactggctcataacaacctacaaaggaaaaaaaataataagatatggtatcaaaccccaaataaaataaataaatacaaacaacgaaataattaaattttacaacatcatatccacaggaaattttttgttatggtcaggaatcaaacaaaccacacaattaacaattattggtctcctctgtttattactgctggccccaaagagaaagggtttttcagaaacaaaattaaaaaagttgtacttgtcatatattacaatgaactaaaagtttaacatgttattcaaaataacaagcactaggccacaatttttctttgtgaaaataaataaagacttaacaggtgaaataatagtaaagccaatatttaagaccatttagacaagctatgacttgtataaagtccatccgactttgtaaactgcattactcacgagtaaataatctcactttatgatatctaagttagtttctttgaataactgactgcagtttataagtgggaaaacatactccaagcttttcttttctaaactcaacttcacatagtgcaagggttaaacatatcaatcttaacacaagctcaaatactatattttgtaaaacagtatccctccaaaagccctaaagtgtgatcaacaacaatcatcaaatttcaaaatccacaactgagataaaggaaaaaaaaaaaaaaactctgtttgtatcaatatatatctgtctgggtagccagaagtagctcatactatattattatgcagcttcttttatttttctgcttttgtttgtggtgatatcttagagggttattcactgctctggtatatatcaactatcctattgcagaaatataaaaataatttgtgatagctttcagttttgactctaagaaaagcatgtctagctgcagataataatatttaaaaatatcacactgatcgattcattttttaaaataataataaaagaaaaattacacacatatataactccaacatggtgctcttccgaggtctatgaaaaattatccaaaaccccccaaaatgacatttggcttacactgcctagtccctatgataagagcaacaaacgaaaaagtacaaccacgcttgtaaacattaaggcatcttaaattttcccaacatatacatactttataaccctaatatataattttatatcccaaatggtctcaaatggtaagactaagacatgaacctcacctcacttcagctacatcgtgggtcgaaaatgcattgaaaccatgagcttttcccaggcaccaaagggcatcatgtttcttaggattaatcacaaatgcctcatcaagctttgtaattgcatctgagcaatcaaacttcatttgtcagataatcaatgacccaaatttcttaaagagctaaaaaaattcaaggaaaaataagtaaccccaatttagagacgatgatcaaaaactataattatagtcatagacaagtatagtaatattttcaatcctcaaatgcttaaaggattacactagaacaagttacaaagtagaaaaaaatgaaagactaaaaaccttgaatcattttctatgagtccgggacattctgaaactgaggcaagtccagtagagctccagcccaactagtcgagttctgcattccaaaaattaaaaaattaaaaaataaaaaaagtgggacatgtcatatgaaccccttgccactgaacccagaaagagaaacccacagcaacttgaaggtgcgctcttccacgaaccgctgtacccaaaagagagagagagagagaccgagcgtggcgtagatccgagcccagcagcccagcagcccagccccgtttggcgtcgatcagagagaaagagaggcagagtaaggtcgggagggaaatttccagaagacagagagagagtgttgggaagaagagggagagagaaagtgttagggttagctatgttggttggtatggtagaaaaggcggaaagggaaggaaggtaagtgtgtaggagacagaagactgcaaacaaattaaaaaaaaaaattgggttttttttttttttttgttattgggcaatttacactaatatatacattatataattttattacaatatagctgcataataatttaggagaaatttaggagtattcataaaatgagaaatttaagagtattcataaaatagctgattcagttcataaaatagctgattcagtccaatccaatttaatccgcaaaatgtggatattcgcactttgatttgatgggattggaaaattcaaaattcgtatttgtgcagattgaatattgatttatatgtaaaagtaactgattcaattaatccatacgtatttataaaaaacaaaattaaatatacaattaattttaatgtaaagaaaatagtaatttaaattttttattttttttgataaatcagtaagttgtattgcataaattagtaagttgtacatcctaaaaacacctcaaatagaggccctaaaaatcatctctatttacaaattggataaaccagaattgttatgcacaatttcttttacaaagattggatccattctttgtcctgcctgctgattttttgagggtgaaacattgttaatctcatcttcaacttctcttttatctcttcatttactcgacctgttactgcctgttctcctttccaaataccagtatttcttgctgtccaaagttgataaaccagagaggttgttgcagcagccagaatttgcttttacccttactgattttcgattttccaatccacctgttgatgtgaggcaagctctcacttcttacattccatcccaaccattccttaagtctatggaggcattcctctgcaaacttgcactcaaaaaatagatgttgagtcgtttctttcccatcctgtcacaagcagcaaccttcttctatctgtattcccattcttatcagtctgtcttttgtcttcagtctgccatgcatagccaaccatagaataaaacaatgtttaggtaagtttagacgagcccaaacctccttacttcagtatgttttggtcagtgaggtagttagaattctatagcctgctgcaatagagaatttatgtcctgcaaactctcttgtatctatcaaactcctcacttgatcctttagagccaccaacttcttccaataccaactagcatgtatagaaggagtgtggctccaccaatcccctttcttcagatgcacactatgaacccacttcatccacaaactctccttgttatttgcgattgcccaaacatatttacacatagttgttttgttccattcttcaattcttttgatacctaaaccccctactgattttggagtgcaacccgtgtcccagttgattgctccgaccccctgaaacattgattgccctttccaaagaaaagctctacaaactgcttcaatgcctctaattattctctttggtaagataagaatttgactcgagtatggttgaatcgccattagaacagagtttatcaaaactgttctccctgcaaaagacaagttcctcgaactccaactcctaattctggcagtcatcttctctatcagtatttcacattctctatctgatattctctttgcattgataggtattcccaagtaagtaaaaggcaatttctatcttgaaaaacctgaaagtttcagcagcctctctactacagtttgctccatgttactgcaatatattgcagtttttgtaggacttggttgcaatcctgaggtgacagagaaaagcttcagagcttgtaacaggtacttgacacttctctcatcccctttgctgaataatatgacatcatctgcaaaagcaaggcggttcaatttgagcttagtacatctatcatgaaaacaaaagtcttccttgtcccaaactttccccatcagtctagatagatactccattcctattacaaatagtaatggagatataggatccccttgtcttaagcctctcttagattcaaagaaaccatggagagttccattgaacataagagagaacctaggtgttgagatacattgcatgatcagtttgacaaagggaattggaaactgaagtccataaagcatctcctctataaattgccactccactgtgtcatatgccttttgaatatccaacttaatcacacaccctggtttgttggatttcctaccataatgcatgatcaaatcttggcagatcataatgttgtgcccaataaatctgcctttgatgaagcctccttgtgaatgagagataatatcaggtaaaactaatttgattctagaactcaaaagcttagttgcaatcttataatgagattgcaacaagcaataggtctaaaatctttaacagtattaggacattttaccttgggcaccagtgtaatcacagttgagttgatttccttaagaatcttgccattctcaaggaaagaagagacggcttagaaaatagtgtccccaatggtttcccagttatcttggaaaaaataactagagtacccatctgggccaggagacttagagccaggaatgtcaaaaacaactttcttcacttcctctattgaaattttcctcattagcaactttgagtgctccttagacaccatacgaccccttctcaaaatgcctttgaccactaatttcctattttccagtgtagttcccaaagacttttgtaataatctagaaaagcctcttgcaccagaatcagatcattaaccgtctcttcattttgctgctcaatggagaagatcctattttgtctcaatctttgctttatgctagcatgaaacaatgttgtgttgttatctccatcatgtatccatgccatttttgctttttctttcaggaaagatacataatcatgttgtacttttacatagctttcccgagcctccttttcttcattatgcagctcataattcaagggactttgctgcaatctggtctgaatgttatccaatttagctttagccttagctgtagtagcctgcaagtccatgtatccttccttatttatgtcgttcagtaccccttttttgaacagtttcaaccttgagaccacttgaaacatcttcgaacccccaataggttgattcaatatctcttctaaactactttcatacttagaatgagatttccacattctaaagtatttaaagggtttgattccaccattcaaatgaggatacaaagtaaggatcccaggagaatggtcgaataacccctcattaagaaatgtagcttcagcattctcataagcattcagccagacctggttagctaaaatcatgtaaatcttagaataaattcgatcctccccatgttgtttatttgaccatgtaaagatattcccattgaactgttggaattattttaccnnnnnnnnnnnnnnnnnnnnnnnatgttgtttaacatcctaatatgaa

SEQ ID NO: 36797 - DNA, 2470 bp, Cannabis sativa
aataagttcctccagccgtaccaatagcatccaccactgaggctctaccaaaccccaaacttcaccaaaccccattcatatgctctcccacgagcttagtttccatcaagaacaaaacatctgggtcttctctcaaaactaaagctctaagcgctttcttagccattataatcttgacttcgcggtagttccacgaaagtactttcatggggctttggggggtataatttggctcgcctcctcgaccaaaaaaaaaatccctctcaatgtctttcccctgaacactcttgttctcaaattttctcggggctctagtatctgaagcaaatgactcttcctcctttcattgattatccaaacggagcggagatgactcagtaatgagccccttactagtatccccacaaagcacggtatcattatccctatcctttgagcccttaggcaagttaaattcatcccgatctcgaactgcctcatccttcttcgaactataggagctctcaacagatttcatagaattatgaagaagatgagattttttacctataccaacactttcatccctactagtcgtcttatcgttcagatcaatgccactcgcttttttaaatgtatagcaactttgtccctgactttcatgcataaaatcacttttgttaacaaaattctcagaaatcctttttctttttgatccaatgctagctccaagttcacccatttttttatccaaaaattggtggcttcgggactcctctcagcccagccaagtggggcttcttcaatttctgaattgggtctgtcttactaagcccagacccatcctcatcatgggtcactctaaatctaaccgacccaagtttttctttgaacaaattggccacatgcaccacatgttgagtaggaaagtttgagcggtccacatagtcattgtaagtcactgagtaggagttatccgctatttgagaaacaacccctaccataccctctacctccaccctagtggtgccacttcaatagcgttagggccaccgcgccttatgcctatctcgtcaatcgctctgtctttcaggcaacccaccagactagtggaaacggccaacaccacactattcccttacaactttgagtcatctgtctaaagccttcgacaatcctagaggtcttcaacttctagaagtgcaaagccattctccaatcgagacccttccttgagccaaggtccaaacatgggaatggattgaccatcttagaaagacaccatccttttctggccaaagtagtcatcttctacatggccaataaccacacttgtaacaaaagataggaagacgtttatataaaatgaccccacaccttttttgtccccatatccagcaacgaaaccccaacaaggagggggacaataaggttaagcttgacctgaaaatgaagatagttattcataatgaccccattctttcgcaccttgtttgcgtagataagagtcaccatataattagccatgtcctctatgcactcatttgccatataaggcaacgacacccccattaaccttaatccagatatccaaagctgataaatcagtagattcccacttaccatccttcgaaagtgtcgccaccatcattaagccagtacaagggccctaaggcccattctccaaaacaaatttcactttcttaggactattcaagtgagatatataggtttttggaacaggagcctgcaaatgccatcccggagtaagcttccacatgcccataggagcttttctcaaggtcccttttgagaccaccttctaagagatgaacctccccaccactgtcttagaaatcatttcccgagctgtttcattatcaggggccacttgaataaaaaaatcctctaggttaaagttcttagcctctttaattatttccttgaaaattaaagaatgtacggagagagaaatatataatttaaaatataagaatgtcacctatacaatttgaaatacaatataactataattaaattggaatcctccaaaacaacatttcaaactttattctcttactttagcatttatttttctttcttttttcatccttagaacttatgtagttttaaatggaaaatttggtttagtatgtttaaatgtaaaatatgttgttttaatataccaccaaattagaaatggtatatatatacttttaatattttttcctcccaaaaatacccttacatttcaaaaaaaaacttctttctctcactcttcggcgttaaccccgacttagaacccttaccgtcgaacacacagactcaaaaccccggtcggaaggcctcgccgtcatcttctgtcacggcctctctcattttttgcgtttctttcttttagtttaccaatattttgcgatatttagcgatgtattgacattgattagaataaatctgaggctatggttgaagtttagtgataatttgcgat

SEQ ID NO: 36798 - DNA, 3275 bp, Cannabis sativa
aagccttatggtatttttgataagtgttgctcaagctttgttgtattggtgatagtccaaactgcaaaaaccacaccgcaccgcaccattttttatgatgcggtttctgcagttttttaattttgtggtgcaggtgcagttgggaaaattaaaaaaaccatatgtgtgaattaatttaaaaaaatagtcaaaaaaacgcatcagcaccacaaacacccctaattaagactcttaattaataagatgaagttataccgcccttttataagataaatcaagctctatatgatacatattgaattatcaaagcttgatatttgactttttccttcttcattatcattatatcattatcattacctaattgaaaaacccttactagtaaagcaaaacaagatgttatatgagatatcactatgtctctctccacctcttattttttcttttttttttatacgtattaatgttgtgatgaatatagtcttaactcaactgaaaaagtcatttttggtaaagtaaatatacattactttttatattcaaatattaatataaacaatccaattcaatctctatttacctttttcttttcctaatgtaatttatgtaatgttgtacatattgtacacagagtaactaaccgtaataactgttttcttttttttttttttttatctgaaaagaataaaagaccaaaaaaagataaaaatagaaaggccagtaacgatgcagaccaagtcaagagctttctctcgactaagctttctctctctactctctctcctcaaacccaaatattcctcatatctctctttcccctccctactcttccgtacctttcttctacctcctccttcaatggcgtttcccaatataaccaagctctcactccccttcaggtgcctaccttccatatcctccacgtgcaaccccacctccctcacgtgcatcttccctctttccttatcagtatcacccccgcacgtgaccaccaacccacactgcaccacctctctcgcccccgtcatcaccgtcgagaatcggagctgaatttctccggtcagccagtgtcgattaaccgatacaggtctccggctcgaaacattcgcagccctcttaaggtttgggtcgataagtatccagctcagcgttacattttcttccaagtgtttcagccacgcgccgtcgtcgtccccgggcacggcggcgcgtcgtatatctgtcgggatcggatcttttgggtcgattaattcgaccagaaacggtgagcagaggaaccactctgataaggcttcggtctcttcgattttggagaggaccagtttttcctggtaaaaaatatcgacggctgagattaatccagacggacggctgagattgtgattgaatacacgtggcggaacctcgtcgattgttgggaatgagtcggagaagaaagaacggtggccagaagggaagttggagacgataagttgttggaggcggggatccgctacggagggccacatggaagtgcatatgtcttgccatagggactcgtcaacggaaagcgcgtggagttgagacgacgcgctagcggccgaagccagggacgggccgtcgagacgggccagaatatgggcccgaatgatgtcgggatggagggctgagattgtcttttcacagccgtgatcgtctcccgccgtttgcttcgttgttaggtcgggagttgccatgtaacggtgtcgtttttgagtctgtcttaacaatttatgtattttcttttcttcttatttttaggcttgggggaatggtgttgggttgttgtaaaactcgtattgagtaagatgagacaaataaaaattgggtttggagttgaggttttatagttgggattttgggttgagagagagagaggaaatatcctttttgtcacttcatttaccgaaaaaagtctcacgagtttcacattttttttaaaatttttctctttttttcaatgtcactattttttttttatatatatataaaatagactctttatttttgtcattatttttgttttgttaaatgataaaataaattttgtattttttaaaataatataaataagactctatgataaaattggttatattttctgtatctgttcgtgttataaattatcttcaaattggttatattaaaaaataaaattgttaaaaattgagctaagaatcctatttttaccatttaaaaaaatataaaatcaattttatcatttaacaaaaaaaaatagtctaattaataacttttacaaaacagaaaatacaaaatacaaatcataaagttctctcatcatcttgttataaaaagaaaaaaaaaactaaaaattctcatcatctaaatttatattttatttttcttttattatgggtgggggcaatagcaccggagcgtgttaggtttcatgcatatttgaaatgaatggtttaattattttttatgtattaaattagtagtacgtgtttataataaacatacaaagactattgatacaatttattctttatttaatatgaaatagaataaactatggatagtatataatattgttgcagataacaacgagtaaaatacgtaattataagtaaacaaaataaaaataccaagttattgttcaaaaataaaaaaataaagtaatatcaagtttgaggtcatcacgtcaaatggtataatttctctactacgtacgtactccctttcttacttttttttttattattattctttttaaatgcactatacttttctagttcctacttcctataagatataaaagaaaattctaatttctaagtaaactctttgatattttatttttgaccaaagacttaacttttgagccaataagataagatgaggattgccttcttatttacaaagaaaaaacgaggatatagatatacactaaaacctttatctaaaaaaaattattttaataaaaagattataactaaattgaattatttttaaaataaaaaatcaaaacactaaacactatcattgtaacaataacaacaataaacaatttttagtatttgagcattgttatgagatacctcttacgataaagtattgctttataattgattagcgataattcataatatttattaaagtaaaataaatgagatctgatattaagttgcaccaatagtgatcttacacctcacaaggtgttaagcacaatgagtgtcctttaacatttctcttatatatttattgtaaccatcatggttacatttttctttaac

SEQ ID NO: 36799 - DNA, 6810 bp, Cannabis sativa
  modified_base (43)..(53): a, c, t, g, unknown or other
aagttcatatttagggtgataaacaacatacttgtgagtagannnnnnnnnnnggtaaaataaattccaacaagtgtcaaggcgatcatttggctaaacagtggcgggaggtagtggcgcttatcctctgcacttacacctgaaaaaaaaaagaaaaaaaaaaaaagatgagactatgatgagagaaatgagatctactgcaacaatggaaacttagttttatctttggtgcaattttttcaaagcatgattatgaatgaagttgagagaagagggagcttgagagaaaaaaaaaaggtgtgactgctaaaggataagacaatgagttgaggagttaaatatgctccttaaatgaaacctaaaccaaaacaatcatgataaaaggctctattaaaatgtttaaggggtgtgtttggcaaatagccaaataactgtggtagaagagttattttttaaggtccaactaaacacgccttttgttctaaatacaaaaaggtgataaaaaattctaagatacttttaatccgactttatattttttcaagtataaaaattaggatcaaattgtagtgcatcgatgaaagtttaggagctacgatttagtaaatgtgtcaaagttcggagagcacgatttggtacatgaataattgtcgtattcgtaaaattgaatagaattagacaaaagttcttgaatccaacaatttcaatagttcggagaaatttttaatatgaaaagttcaaaaaataagatttgatacatagcgaaataaaaatagtaattagcatataataattgaatgagcattgttattgggcactagtagtgtctaacatctttcataagtgacgcctcacgattgattagcaatattatattgtctaaaaattattttcttaaattttatagaacccgatacttcattacatcaatagtaatatgacaccaaggaaaatgttaaatactaataatacattttaaccataggcagacctacatagagcccagggagggcttaagcccaccctcaaatatcagaatagattatataaaattagagatattaacaatacataattgctagacaacataatttgtgtaggtatttgtttgttactcgatagacctaatttagaatctaatttccctcagttttatcttctatttttatttatataaataaatctactcttttgaaagaaaaaaaaaataaagtattaacatagagtattcaaactacgaataacttttctgttagaaaaaaacttattatattaagaaactatgtttaattatatttaatttataattaacacaagttgttacataaaaagactagaacaagaaatataaatctcatattattatatgctaaaatttgttctcttctatataataattttattcaagatttaagtaaaaaatgtaatatatatttttaaaaaattattattttaaattccaatacaaattttaattagtccaccctaaaattatatactaagtccttagtccatcctaaaattatatgctagtcccccactgctttcaagaattctcatctctttattgaatcatttgatttcaaatgtggaaacatgcatgtttctatgtgaatagtaaaagaccttttcacatgtgtgtggtgtacgtgtagctaagctatagctagaacaacataatatatatataggtctaactttaggaccaccctatgccttatatattattaattattatacatctacctagttacagttgaagattattaattgttgtaattaaaatttctaacctacaaactttatttgtttgactctctttctcatattaattgttgtaattaatatttatagcctacaaataatattattattatttgtttgactcttaccaatcatttgcctcttaaaaaactgaatttgtgtactcgtttgtatacacacacttcttccaattttcatacatgtgtcatcatgtttcattaaacatgtataaattattttcagtgtatagttatcattgatcatatactcaattctctatcccatttaactatatatatgacaactaacgcctttgaaattttagcaaatgaacacctttatctttacaaaagcaaaaactaatatgtataatatatcttggaaagaattaatcatggcctcaaagagagccaaaatcattgatcaaaaccaataatttaaaaattatcaattagacactttaatttattaaatgacaaaataaattctatattttttaaaatagtacaaataagaccctaacttaattttttgtcaaaataaaatttaataataattcgatctaaatgtattatgacaaaactgtttacattttatgtatctgttcgtattaggaattgttttcaagttggttacatttaaaaaaaaaaagttatcgaaaattaagctcaggatcctatttttaccattttagaaaatataaaatctattttgttatttaacaaaacagatagttcattttgtaatttttacaaaacacagagttcaaaatggtatttatccattttaattatgtaattgtttataaattgatttatcttgttacattcttagtgtcacattaattagttaaaatatatatcaaactttctccatttatctaattaaaagagtattattgtgaaaaagaaagaaaaatactgattaattaacaatttctcaattctccttttaaaaaatggtgggccaataaagaagtacattttccataaaatggaatccttaacaacacaattattatataatatatatatattataattaaagaagacatatcttgtcttaactcttacatactttaatgtgtgccaagctttttgaggacacatatcatcgtagagcaacaataatatttttcttctcttccttattaattttaattaatcaataatgaacattacagtcatacgtatacatatatatatatttgcaaatatatatatataaattaaatctaatataacattatttatttatggagatgatgatgatatatatccaactagatgtgtacattaatgatttgggtacgcatagtatgggactgaggaaatgattaaagaatttggtgcaacaaatttaatattcatcgataattgatctattattcaagctatacatacatatatatatatattatagtacaaatatgaaaagttgaaaatctaccaactgagcagtatacttaataattttataataaaaataaaggttagtgagacaaggatccaacatgattgcagagagtttgatttattaatcataaaagaaaattaaaggcttattcaaaacataaaggcaatatcaagatgtatcactatagtcttttgttttcaattaatttgtcggtgtactggcaatatattattattcataattgaattgacaagttttatattagtagctattcatatagagtcttcttcaaaaaaaaaaaaaaaactattcatagtcttaacatgtaaaaagataatacatatacatatgagatggaactacatgcatttattagccatacatttactactacacttccaaatgatcaaatcctaacagtgatggatgtaatatatttggtatagttaggtagttttatccctatagagacattatatttggcattttataagaaaattataatctaatttaattaaatgacggtttacattgtagttatagtagataatttgccaatttttaaaatttttgaaataatttataaatatgttaaaaataaagtttaaaatattgtcaattatgctcttctaaaaagaattataagcatatatgcaatcaaaaagatttaaatcttgttaattttttgtactgtaattaaattattcacaaaactagtagatgtctataatgtataccgtcatttatttatttgttataaaattataatttctgtaagtgtcaaaaataaataatactcttactataaaatttttattaggaggttattggtgtaaaaaattaaaatgctctagcaatactttttatgaacatgtatttcctgatttcaccatattaaatatgaaattacacatattttaatttaataattattaaaaaaaaaaattaactaactatttgaggaaccttgtggtagtgggttgtacataaaattttgtaaactactcaaactgaataacctgtccaaaccaaaccgacataactcaacgaagaatgtaaaccgaataacccaacgaataatgtaaactgaacaacccaacgaaaatataactcactcaatctttatatttgacaggttgaaaataataccaacccgctcatttaacccgaccaacccgattataagagagttttatatatatgtatatatattttattatatatatttacatatcatataatttacatacacatttaaaaaatataaaattcaaactactatattttttatggtagttgatttaaattttgaattcaatttatatatatttatcttatcatcaaaattaactaaaatataataattaaatgtaaaaaaaatattagttgtcgatttagacgggttatatatgaacatatgagcttgctaaatttttgtgatgtttaattactaaattataattagaatatataaatcagttaaagaaattaattaaattatagaatattaatgaaaatcattattattatatattatgctaactgtttactaaacataaattaaaattattttattttgtttgtatcattcaaaaaattattgaattactttaatttaattaaattttcttttttagaaaaaataaataaactttaatttattatgtaagatacttttttaaaaaaataggtttatcccttatattttaaactactacaaatctatgctagcttttactttaatttttacaccagaaataattaaaaaaaaattgtagtaaaagctattacatagattttacttcgttttgagtattatggcctaaaaagaagagctaatgctttggtttatcataaacggagtcaaaagataaattgggggcattttagtaggggttttttcaatattatacttaaaattgattttatttataaaaatacttttaagaaaattatttgtacaaaaccgttatgccacatcagcatatatatcgaaattcaaaacaaatgccgaaaataaaaaaaattagaaaaatctcgtttccaaaaattttcgtttttttggagttttgaaaaaaagtaactatttaattattttttatgtgaataagatatcaattggatacgtttccattaaaaaattattttagaattttacacatatataaataataaaataatcattttaatatgtgagaaacatatatttttctctccaaaaaagaccactaatgttaaaagaaacttttttgtttcttttttatatttttaagctatattatattattttattgtttaagataccttgagatggtcttagtacctcataaaattggttgataaattaaattttgtttaagttaaactttgattatttttgttaactaaatacatagaaaagaaatttaaaagttacttttttgggtcatttgtttctgtagtagcaaaaagatatatgcttttcatatattaaaatgatcatcataaaaaatggattgcaatagtacaatttttgagtcaaaataataaatagtgtggctgaaaatttttttacacttttagaaaaaaaaaaagtaataggctgctaaataattattggtgtagtaaaaaaaattttttaaaacttataaatgaaatagagagtattttttaatatttaatattaaaaatatataggtgtaaagttgacaaaaaaaaaaaaaaaaacttaaaaggaatagtgacacatagtcacttcactcgaataaataaataattgtatctttttatataaaaaaagaaaaaacaaaataaaaatctaaaaaagatgatcagtaaatttagtatttaagaaaaactaattaaaataactaaagaaacaaaaataaaaaataatgttgtcaaagaatattatattaataacactagcagtattattattcaaagcagaggtattttaaacaataaaataccagagcatatttatgtaattattttcaaatacacgtattcctatgcaaataattctttttattaattttttttttataaatcattgagttatattgtacaaacaaaatttttacacccaattcgcaccccataaaagtcgagatctatatacaacatgatcaatctatacaatcaattacatttttgtattataatgcagaaaaccaaactcgatcactacttttgattttgcgagagcatgaaactctcaatccgaaccttagtagaccactttgtttcttcaacaactctaaccggactgaccactattttttgccaaatagagtcattcctagctttccaaaggttgtaaaccagacctgctgtagcagcagctagaacacttttcctgaattttgacactttggctctcccgatctatctgatcaaatgatggagactactagcaacaaaattaaaacttgaccatactaaacaagatccttttgaacctttgggttagctaaacttttggctaagaaccgaaattgaaacaatttgagtttcttgattaagttagtatgcattatttgttggattaaaatctctaatgtgggctcatatgtatttgtgtgtattgctatatgaagtttgatctaaataaagtgatcatcttagtaattgtggatcattaggtat

SEQ ID NO: 36800 - DNA, 4920 bp, Cannabis sativa
taaattttattccattccaattctcattttcattcatattcctatattttcattcctcccaaccaaacactaccttaatggtttgctaataaaattgattcattaaaggaagacactgccaatatatgggggcagaaagaagtaaacttggccaccgttgttaaagttattctctcaaagggagtttcgagtctatatatggtgctttatgaaagttttaagggagtatacaacatgtgtatgtatgcttgataataagagttctaaagaagaattgaatgacaaaaagtactaatgcctactacaacaaacaccccattgttctttcgaaataatattagcatatagaagctttgctgaagtgggctactaagttttcaagttagtttataaaaagaaatgtgaaagttgaagttgcactaaacaatatccaacttaatggataggcatgacaataataatggaacaagcacatatctattcactttttatatttgttttttcaggtaaaaagaggtagacatggtgtgactaaacctaggtgtccactattcaattactaataatgaaagaagcatttttgtgaaaaggtacatggcaactaaaacgaaattgaaagacagatggaacaaactgaaaactatgtaatgagaaattgaccacacaacaactaactgttatcatgatcctcttagataaggtaagctgtattttcattacctttaaacttgtcatttctcaaccaaagtgaacaagctttgattgaacagctgaagtagtattaaaaaaattacaagagcttgatcatcgagtaaacacgagttttagggagggacttgaggaatcccggcgatagttgagaatttgagtttgatacaaaagcatttcagttgccatggtataattcctgttgttgaatcccggcatcttgaaatactgttgtggtgactgtccctagcataattcaatatgaaaaaaattacattgttctgcttgtatgacagtttgaataggctgcaatcatccatgtgtatccatttcaagtataaccagtgatttactcattgagttcaatataaagtacatttctggtgcgaattttcgggaaaccaatcacacaccaactatggtgttgtaagtaccatatgcagcaaaaagtaccccacatgataggataaaccaatccagtgctctctgccagaaatttagagaagaacccaacaattttaggtgaaatatagatggcaaaacaaatgagatgagtgcacatactgtactcccgacaaatgaggcaaaaacactgaaggccggcacaaatgaggccaacaccgctaacccaacaaccaaaattgcacggctcacatacttcccaaactttcctattcttgtagttgaataactatcattgttgttgtcagccttttgaaaccatttgttatttttcaaccgtccctcgatgatctcgttaatgggatggaccatgattggaaatgtgaatataagccccaaacacatgccaatctgttgtcatatagcagaaaaaggtcatgagaaaaaggaaagaccatcatatttaaagacttcactgaaagaaaaaaaaaactgagaaagcatgtaatactgtgataggcgttggtttacacaaggtcaagcttgacctttaaatcattgttgcatagcaaagtcacaaactcaatgcttgaaaaatcatactttgattttatatccaataaatccctcaaacctgcttaatgggcattatgggctcaagtttcgaaaggggccccctcccttcctagtcctataaagtttgggaagtataaaacttgtgattaatcactaatgtaatactaaaccaccaaagcccaaaacatatgttggagcaaaccacaacctgatccatcagctacccgcaccgggttagcttttaaatactctgtctcaacaaatgggattcaattttactgagaggacaatgatatgcgtggctcattaaagtaaactacatcatagaccactaacttaatgccacatcaccattgtgtaatgcatcccttgatccctagttagttgaatgaaataaactaatccattgtctccataaaaaagggaagacacgtgaattttcttgttttagaataaacaaactcaagaattatatcaatgcagataaggctctatatttatacagtagagttggacaaaagaaaacctttggtacagataatatgcattttattgacatgaataaaataaaataaaaagtacattcccacctataataacttcagaaaacgtaacaagcacactgtgccggccctttctgcctttcaatgaagctcaactaaagaactataaatatagatatatcatactttataacggttagagtgtaccggctcaaaatcaatattcttatatggcccaagtcacaaactcaacttctgaataaccgcattttgtattatatctcagaaatcactcaaaacccaactccagcttaaaattggagttcctatcgaaattcctaaacttttgagcagcgtgaaacactgcattttttttataccaagtatgtgaccaacaggaattggaaagaaaaaaatgtgagccaacacaagcttgacttactcaactagttatttaaggctaactataaaaatttacatttatatgcaagtatactaccattgacgtcactacaatattattaaatttaattatactaaactgatttatgtccatatcaaagagtgacttcacgcaataaaccaaaaaattaatggctaaattatgtatcatgcatctcgatgaaggtctatatctcattttttaagtaaggaaaagatctgtcagtgtcacatgaggtcacagattttccagtagccagctaatcgaatcaaataaactaataaagtatcttcataaacaatgtatgtgcatctataaagaactaatatctgaacttgagaattacagcaattaataactacatgcatgcagatgagaataatgctctatatccggacatccaatacataatgaggacggacagaaggacaaagcttggcatatttttacaaaggtatataatatgaaagcaattgatcccatctacggaacacttataataactctccaatagaaaaagggggaaaaaataaaaattctagagcaaataagcaaaccatattgcaaaatagaagctttgtacatcttagatgaagctagtataagggtaagcaataaatagaaagaaaaggacaaacaaaatgtgaaactaaaacgcacaaagcattaaagttggaaaacagtacctgaaccgctagtgcccaccaatttctaggaaggttaagagtaacaatgtcttttgtttcatcaccataagccatgtaaccaaagaatccaaacaaaacatacaaaagggttatcacagaaaacgcccgagcaagcaattttgggaatgtagttttgtctctcattgaaccctccaatgccaatgtcatcccaaatccctcaaagcaaaaaactgccatgccagcagcaaaaggcaacccacttatatttgatgttatggctgttctgtcattaaaggagaactcaccgtttaaagcttgttgtacatcttccttaatcacaatccccatagccaacacattacaaatgtcagcaaatatactgaaaggtgctaaagaagacaagctcctaatccatgacaacccaatttcgattgggaccaataaaagtatgtaataagagaaagtgagatgccctttggaaactgattgaaggttttgtccaatgaaaacaaggtaagccaccgagcctccacattgggcaatgaaaataagggattcagctataaaacgacctgtcgttcccatgctttcataacccaaatctccatacgttttagtgtttggcgaatctgtgtctgaatcaccatcattttcttcttccgatgctaacttgtccctacacttcacctgtcccactcgaaaaaaggtcgaacagaaagaggattcaactcgttaagaatattcaaaaagtaaaattctttctttcattattcccaaaaaaaaaatacaaaatacccaaataattaaattttctcgggaaacaaacacaagatcataaatttataataatataccaaccaggagaagcatgcaatagtaggaggagagtccagcaaccataacaccaatcgagccagcaagccaaccggcgattcggaaagcaaaaggaagacccaaaaccccggtgcccacaatcgaaacgacgatgttggcaagcgtttgaaccgtcgaagctctacttcccgttccaaccgaaactggcgactcctctagcaatgaaattgatgttgttttaccaccataatcttccattgttttattcacgagaacttccacaaaatcttcgactttccaaacccttttctctttccctctgttctgttgtagaagctctgtgtgtagaacaagaacagagctgaaatggaacaagaattgttatttcttttctcttttgtcttcttcgatagagttctgtgtcctgagttgaattgtgaatggagttggaaggagcagaagagtctttgggattcggttcacgccgctatctgataactaaggtgatgaaagcgagtcacaactcacatgataacgacgaataatatgtttcttgcattaacacaaagacaaattcctatattgaaatttgaaagatagcttgactagtagtagattttgataaaataaataaatctttttataaaaatttatatggcattaaataaaaaattgtgtgtacagattttgtattgtattaattgtattatttaacatataaaaaataattaattattaatttgtattacaatataatggtaaggccggggcgggctaagatgtaact

SEQ ID NO: 36801 - DNA, 9174 bp, Cannabis sativa
tttccaatggatctcaaaagaattgggactcgatagaaaaggaaaagcaaccagaagaatcaatggaatcaataatttatagtttatgctccaatggtgattcagtttaccagcaagttgagcacagtgcaggcctgcaaaacgtaaaacatcctcatgacttccaatgaaggtttccagtgagcagtactaaaggtatctctactctaacataaatacaaaagttttgacttaccatagctaagaagcgcataaccaggaactagcctgcacccaaaaaaacaataacagaaacaatgagaggcaaaacttcaaatctaaatttacatttacatcaaaagaagtggattaaaccggcaatgttggccgtatggttgactagcaaggccaatctcgactggtttgacacagaaacataacaattcactagcaatgaaaacgaagccataaatggcaaaatgtccgtgcagtcaacagaagtcacaaactacatatcagcaaattattccatgctacacacatacactaacctcagaccagtaggccaagccactagcatagatggatgaaatgaggtatttaaataccaaaatattaagtttcatccacgataatgcaaatgtaagagagaggatacataccgatatagaaatacaatatcatcagtatctgttgagttattgtcagatctaagcacactcatggtgtaaaatttgattttctcagactgcaataagaaaaagaagaaaatttcatttttgattatgtacaaataccatgtgcctaatgtggtaatctgacaaggatgcatacttttgataagcaattctcatcaaataactcagtcaaatgagtgcacaccagaacctgcaaattaatcagtgattcaacattggaaatattttttagtgataacttttcttcatctgtatccacaaagtgatccttgtatactgtcagtttctgtgtttacttttctttttcttttatttatttgaagctgccatgattggacaaagatcaactccttttgaggaagggataagtattatacttgtcaattactaagggataattaaaagatgaaacaaaagggattaacatgcattcaatggtatgatgcatgcatgttgtttgtgatgagaaatttcaaacaaaactatatgcaatctgcatgaaatggcaacaaccaaaagaaacctttgggggttcgtcgaatgagacaaagtgacttatagttccgccaagcaaaccaatgccatctgaaacaatatcaagaggcataagagatacatataaaccttaatcctgccactaaaaaatatgtagctggtaaatggaagttaacctttttggagatactaaccttctgtaagagtaccttttccaaattcatccaataaacacaatgatcgcgagtttgcctgcctgttaaacttaccgaattatgtagtagaattcttgaagaaaatacgatttatttcattattcctaaaacaactaaattcttaacactttacttatacatgcagtccttgagaatttctatacctagggtttgatttgagaagtggcaaactatcttatagctacaaaataaacctttgataaaacacatctttgaaatagtagtgagaagataaacagtctcttatgagtataccttagcattgttcctacttgatgcaaatcaatcataaacgttgactgctctgcagtcataagtttgcttcccatggcacaaaatattctgtcataacattagaaaaactacattgtctactgaatttcatgtaaaaataattattccaggatgtattgccagttttatttcgataaataatatgctatgaaattcccatgtctgtaaaaggtcaaacctatcagttaaccccacggtagcagcctctgccggtacatagcttccaatgtgcgaaaggaaaacaattaaagctacctagaatataaaggtgttacaaagtgctacattagaattccatgcatccattttttgtttctattcaaataaaaaattatataaatatcttgcctgttttatgtagatgcttttccctgaataattaggaccagtgataatatttattctccctgaaaggaaaacatagaagttgtcaagaaaattcattatgctgggtatataataacatttacgacttaccttcattttgaatctttgtgtcattgggaataaaagtatctactgtcatttcctgcaaaacatgtctgaaaatggaattatgtctcttggtcgttgtagataattaggataacacctagctttttgaggattcaataatgactatgatgaaactaaactacacatcttttaccttccattttgtatatcaagtaagttctcttctgtcaaagtaggccttacataattgttctgacgagcaaccagtgccagtgataacaagctaaaatccacaagaagataagagctcttttaaaatttatacttggaacagagttgaatatagagaaagattaaggtggaagcatactggaaatgagtgaagatggttaaagtgattctcaccaatcaagttcagcagtaaaattcacagccttatgcagatgtgttgagaagattagtatatgtgacaccaaatctctaataattgccctttccatgtcttcatcaatgcagttgtaaattaaacaaaacataattaagatagtaaaacatggtacattgagatagaatggcaaactctactatactcttatgtctgaaaactgaaataactctactatcccacagaaggaacagattttcaatagtttaggaaacaaatgattttttttgaattgtttaaaagactacacattattaacgagaaacattagtcaggcaatacctagtattttgtgataaatatctccaagcaggttatccaattcttgtgtctttggggtacgataaaagaatcttttagtttccccatccacatcagaaaactacgtttacaaactattgttagttatatctgctatagccaaagaatctaaagtatgcaagcataaatcaacttacagcaaacacaaaatcttgaattttctctagagtaatttcatcaatttgttcttccaatatgcacagcaagtatcctacaaatatgccaaaaaagagaagaaatgagtactagttaaatatattaatcaactcaaagaagaaactgtgaaatataatatacaaaactctgaatgagcatgttaaggtcaacacaatcagttggttgactcaacaaactatactttaatctcaacgcagtatggtgagggcttcatgcaaccaaccgaaaaggttactacgttgaagatgggatgtaattataaacccaggttggccccagatatggtatgccatgataccaaatgtgaataatttagagctagcaactgaccatactagctcaattctttatcttataaaccaaacccaagacaatttccattttaggactaacttaaaatgtactgaatgataaaggtttggcataaacattaacttccaactctcactctaaaccttgattctatttagatttagattactttacacagttgcatggcacaataactgattctattttgcttatcacaggttactatacaaatgctggaaatgttgaccaacctatctggttgatataaacaatacgaggagcaaggttgcttttacacagctgagggaatcttgcaagttccaccgatgtcacctgcaaagtactgttataattaattcaatctccatccagtatttcctgcttatatgacttctattagaattacctcttccagaaactctggcaattcttcgtatatttgtctcagctcatccaactatattaaaatagccaagtttacagaaattagacaaataacttgaatagcataaatcagatacatgaacaccctattccatgaaacatataagacattaaacttaaatgtctggatcttatattagttatattctccatcaatttcatttgaatgttaattccgagtgcaaggaattatatagatatagcccagaactgcatatgcctagagataacaagggtaagaaattcactgaatgctaacctcatcacagaaaccttctttcactattgtctcgtaacccttctgtttacttctagtaacatcaagaacaccgattacctacaagtacatatcaaatttaagaatataaacaataggatgggcacaacttttacggttttcacatagtgacagtgtatataaaaaataacgacgaatgcttccacattatcttgagaatgaagaggtcgattaaaaagaactttaggacatgaaaaacaatggagtaaacaaagcaattgctagctaatatctaaagttatttaaggagtaagatagactaactaattcatagacataggcaagctccgttgtaatgcttgaactagcctggaaataaatttattatatttagaacaagaacacaaacacattagagtgtgtggtatattttatcgaagaaagaatgtaagatcataaaaaagataaaataataagtaccttgccaataatatccaaactcaagtaatttgcatgctcttgaagactctcagaaatgcctacttcaaatatcttgttcacatgcaacagcgagcaaacactctacagagtactacataaaatagtgtcaaacgataaaagagtttactaaacactgggaacgataagatattgccacatgcagtgcttaaaaatttgaactgttcctatcctaccttcaaaaaagcagtccaatcagcaattgcacatatggagcttggagagttgaatttcttcaatcattaaaaaaaaaaagagaaataccgacttaatgagacaaaaagattaaggcaatacaagtaaaaggataatgatgagggaaataaattattgataatgcaaatgttgtaattgcatatattttcacaatatatccaaggagtccactaaacgtgagcaaaggaaaagatactgtattagaaaataaggatttaaatgatctattaaaggctaccaaagaatgaaacatatgttaactggccaatatacttcattatatatgaatgctaatgactcaaacactgacctaataccaatggatatgttatgaatgcttgatttataagaaaacaattaaagaaaatccacaaggaacactattcataagaaataatggtaccttgagtatgtgaggaatgtcctttacggactttagagtttcgcgtaaggaaagcatcagctcttcagaagacaaaaagaatgatatcttaacatgttaagactacagtttataaaagttacaaagaaacagttagatattgattcttcaatattaagatatcattattttattaagagagagagagagagagagagacaacggtcatgtctatgactgaccgcctccaaagtttgttatgaacccttgcttgtggcggaggaaaacctttgtaacatgaaactttaaccaagtcaagtgtcatgatgcttttgtaacctagttctgaatttgagcaaaaagtagtttctaatttggtcaaacaatggaaggatacaccattgagacggctgttcaaattgtcgaagtctagtattggcctcaaaaaccagtttctatatgaaagaaagaaaatgtttagaaaaatgaccattagagtggaattactttattacatattacgcttcttttaccattacctcaagaggcgtctccctgctggtgttacacactaaaaatgaaaaacaagaaacttggttcaatatacaaggtaaccaaataaatttaacagcagtttgtaacaatacaaaccttattcatcatgccaaacacagagaacctgcattttaagtaactatcagcacatagatttttcgcaataaaaccttttaagactgattagtcattatttacccctctttagctcttccaatgcccatatggcttggatgcttgtctgtttggaatatctgcaatgcctcgtgagcagcagcatcaagtttgagaaagttgtttctatttatcatgtaaaggcgtaacttaaattccaaattctatttgcttaattaaatcttgaaaagaatacagagtaaagtaagcattaaagaccataaagggatacaatgaaatttggacaacagaatctatagtaatagatgcattcccacattccttttgctctagagtatctacaatcctttcattttctaatatggcaagaagacccccacttgcacgaacttgaatatcacttcccatatccatcatagaactcaactgcaatagatgaaaaaacagctaatccacaaattggaacccgagtaaaacatattattgtgttacattcgtaaaaatgagatgctttaaggcagcagacttttggggctgctgccaccaagaagaaaaaataaagaagttggcataagtatgtgtaagtaaatagacaacgcttctctattcatagagaaccaccgcagatgggtatggagcagagctgacttatgttttctagaagtgtttcaaattgtatttcagtagagtagcaattggagcaagtctgcgtcatcaagtagcaggcaataataggtgatctaaaaactccataagcagttagctgatcacgacttaaggaacagatgaccaaaaacagaaaagcagcaacttacataacaaatcctctccttgatgtttagcccatcatccattccagttacacgaaggtatattaatctgaatgtgagaaagagtatgatcacaattgaatcatatccatttatcgtttttcatgaaagggcattacgagatgcagtaagagaatttttatttttaatttttcatttgaaagtagttaatccaaatattttaaaaagtatcaacagcttagtgactggaattattctaacgtttttcaacaataatgtccatctttttttttccatcaatttttttttattattttttggcatctgtaagccaacacaatgtgttagatcaatacatacctgtgccatgcttgctcataactgaatgtagaacttttcacaagtttcaccatgggagtctcatttattccatctgcaaaacttcacagtaagaataccaaacaccttaaattattagggtgcataatgcagcacttaccacttcgctgtaaagcagacaagagggattcttcacttttactgcttgagtagatgatcagaggcttagcttgatattttactgttacaacagaaaaaaagtacaagaaataaaaccaaactgacattatcaagaaaaggctacaccagatgaactgaaaataagtattaatttctctcaacaaacaacatgaaactcttactcaaatcaatcagtggaaagtcattattgccatcttcccagacttccagaacattaagctgccgaatactcgaatcataataagataatccaactctgaaaagaacgatttgccaagttatccaaaaacttacagtgtttctgtcccttgttttaccaaaaagcaagggatcatttattaaggaaggaagttcacaaaccataaacaagtacaaaaaacattttgcgaaaaaaaaggtacaaaaaacataaatgcaactgaaactatatactacaaggttctgatcatcaagtggggtgattggatggtttggagctgtaagataatattggccttttttccacaaaccaataacactcttaaattctggaagtaattccaagtaccaactcgcaaattgaaatgtttcaaacagtaaatgacaatagttaaaagaatctcaccgatagccatgttgaatgcatgccatgtacacctacaattaagatcaagaattcaaatcattcttctgtctcttcctaattattatagctaggcaacttttcacttaaaacactaaaaagtatattaccatacagcagcttaataaactaaatattgtgaataacatttaagtttctttccaggaaactttctacaatgtcacagctttgttaaacaaaatttattcgagatagaaagaagtacaaccagaaaatcattaatgaatcaattcaaagaacattgatacgtttcaggaaaaaaaaaaaaagcacaattttcttattcagtctctacattgccgatgataatcaaaaatccataatcaaacaggattaggagcgtagttttagcattttctaaggaaaaaacaaaagaaggatacactctgtaacattctttacctgtcttgtttcccattactaatgaaattgaaaattgtaagtcttaccgatttagttcaatacaaaaaaaaatgtatatgtatatataatttctcatgtttgtctcaattatgtatactttcctaaatttcaacactgccgtattttcatttcgttttcccagaaatcaaacaagaaggtgaaaaactaagaagtattgaggcaaaaagagtcgatgatgaacctgaggaacagcttcggtttcatcgatttcctccatttacgatgattcgtacaaattgtgtgtggagcgagaaaggaagaaatgtcaaaaatcagtagcgcatgcgttttgtttttcgaggttgaaaggtacagagtacagagtcgtttatgggcactggcagaccagtgtcttctggacctcagaggattacactccaaacaactatttaggcgggaattagacagctggctattttattttagggaaattacaatttctatgattaataaaacacccaatatcaattttgactcctcttactaatttgtaccaattaattaatttgattacatgaacttttcattttactcttttgtttttaatataattttcgctaaaatcgcgagatctcattttttagagtattctgtgtgttcgtatttttctcgacagtttctcgatacattctcgatgggttttcgatgcgaatgtctcaaggtcagggaagacctttctcgaccagttgtcgataagttcttgaaaggctcttgacttgaatgtcccaaggtcagagaagacctttctcgaaggatttttgataggttcccgacagtttgtcgaaatggcaaatgactttgcatttccaatcatgattgagatgtcttttgacaaaaaaaaaaaaaaaaagcca

SEQ ID NO: 36802 - DNA, 5068 bp, Cannabis sativa
tgaaatgtggatttacttggtgtcatatttgccaaataggactggataagtgtttagggttgcaaactctacagaaaataaataacgaaacaaagattataacagagtttattatgtaattcgacttttaaccaagttctaactggagagtttgctagtcctttgcttaaagcatcattttttaacagacattactcagatcagaagttatgctgacaagattctttttgcaatttctatccattaaattttactccattttcatgctaattttagatacaacatctagagtttgagctagaagtgtatgtatattacttaaaaattaaattaaattccgattctaaagtgcatattctgttaagtatcagaaaaagaaaaaaaaaatcaatgaatttcaaatatacgtccaaggatgtcctcaacaaacaaatacgaaaacaggacctaaaagaacctaattagttcttatggaatgtgaactatacaataatccattagacaccaaacaaatacacatcacaccacattttttggaggttgggcacatccctggttccctatttcgtttctctttcatttaagtgagaaatgacaaaactaagcttaaagttacacaactaaaaacacatcaaaatcaaagtaactattagccctccatatttgacttcttccttttcccttttcatttaaccactagctttattctcttctgtttctattcttccttgttcctccttcaaagcacaaatttgagactttgtaaagcttgcatcttattagagcaaacttatttctcaaaatcacacttccaagcttcaaaaagctgttcaaaggcttattatgtacagcttgggaaaagattagagtcatcatcactctttttttttcttttttttttttttttgttgcttaatctttctgttattctagattctttttactaacagaaaagaaattgggtaggtttcatcccgcatgaaaaataatagcgggaggaagagagttagtaaagcattagtcactaagctggttttcataactagattgtgatcttatgatttttgtatatcaccttcgcagaatttccacgaatcatcatcttgccttcgcagaacataccgaattttgtaattgctgcaacaaatccgaaagagacagaaaagtatcgatcaaacttgacttcaaatatcaccaaaaagaatgctcagaagactctacattaaactaagaaaagaacatgaaaacatatagtaccaaagtattccaattaggtgtgctaacaacaacgcaccgagacacttacttacctataataacttgggttcttctttagctcagattcactaacaagttcagcagcttcctccaggagtgcttcaatttctgctatctcttcagtcccatctgacaaaatttcagctcggaggacagacaattgtagcaagacgaacttccaataacaagacttggcttgtgcagcatcagccaatgtatgccactaaaaggcaaaaaaaaaatcccataattagcaaagagccaaaaaagtagacttgtgactaagaagtatatttcaataactgagatccaaaatctactagttatgacttcttctcgggatgcataatattaaaaagttttcatcaagtttaaattttgtatttaactttgacaaggtgagtcagtatttttgttcaaactatgtcaagataatgtggctttcttgtaattgctagtacttaatctaaccaaatatcatttcttctctcccattcataggctaattagataacgttagaacataatttaaaagctgatacgagccccagtgtcaccaatgttggtggtgatgaaattgtccataatatcaatcatacagtagtcctagaaaaaatgtgttacttatttgattaggtagctacaccaacatttaaataacaataataaaatatagctgattaactgaaattatattataaataaaataaatccacaggccaacataggactttatataagtaaaagacccaactgcacaagattattaggacgaaacctatgataaacttacctgaacgagcatcgatttgtcaagaatttcagagagactatgaacttgatggctaggacccagagcttccgccttaattgcttgccattgcttgacaagttcttcggcttcttctataggcatgcgcctccgagacattgttcgcatagaagacgatagactggcagcaggcaatgaggtttgggaatttctagaatctgagttgttttttagaaatgttgtaactgaagccaaaaagtggttaagtctcccaggaattccatcacccttgatatatgcaggcactgaattgttatctatagaagaatctgttttccaactaagggaactgccattcgaatttgatttatttgggatatatttagaagtatttctcatcttgcttacactcatgtttgttaactttaaggtagcaaagaagacgcaccccagaattgcaacagaagtaaacctactcaacaagtatgcctgagaaaaccaactgtcccaaactttactattatgcatgcttaaattccttttcaattgcacaggtgatgcattaccactgcttccattgttacttttatccaatattaatgagctctgcaaatcaattggagtcaactgctttacagcagtacctagatgttgggaagtgtttacacaagaaatggaatcctcaaattttttacgctctgacaaaagtgtgttttgcattggtctgtgaccaacaggagaattagctcggagaccacctatatttttcttggtcccgagagttctcctttcaccattaaaaaagtttacctgcataaacttaaaatataacaacattcaagttcgaaacagtgaataaaaactgatcatatatgaatctcaccaaatttggaggacaatctcgtgtatctggaaacacatgaagcacagtatccttcaaccatgtttcctggtgaaaatggagcagacagtcagtcattttgaaagaggaaacaaagaaaaaggaaaaaaaaacaaaaagatagaatgatttggaaattatacgttattttgcacagaataatttttttcttcaaataaagaacaagttgactaatggtttggaataggatctgtttcttacgaaacaacagtatacataattataactatatgcaagcccatcagagttttatatttattggagaaggtcttaggatccatgttacatgccactgaattatatcaagaggataggattatatctactagccaatctagtaaagtagaaagacaatgctgaccagaatgatttacttcagatatgacaatgcgaggcaaatgcttctagcggaatgaagcatggtatataataggcattcaagataatgataatgtgaggctcatattaatgttaggtatacattttaaagacatataatagcagaattttaattcacaataaagcataccaacaattgatttccatcagaagcatctttgatatccctccctgatatcgatttgtgtggactactattcaaatttgaaacaagctgcttaagtttttcaattacctcatctttagtaccctgaaaccaagatatcatcaaagtacacctttgagaaaatgcaaagacaacaacaggcttaaattcataggtgcagaacccagaaaagaatttaattaagtatgaaaataaaagatatacctgaccaagaaggaataagcaaaaagcttcctccaattttagatcaataccttctgatgctatcaaacactcacagatggtttttgctttgctaatctataaatgaataaagtaaatgagacaaacaaaacagagagggaaatgcgaacgtcatcagtaggtaaaagttacaatatgcagtattgcatgtctacaaaaagttaccatctctctttgcttgcttgaaaacccaaccgcaatatgagctactaagaccacgtagaaacaatgaaagtcaacgacaactctttgattttgtgactcaagtgatttcttattcttccgagtagttgccagatcatcccatgcatgaagatcaactatctctgcagccatgagtttattaagcgcttggctaaagaagcacgaccaatcttggacttggcatgatgcctccagatcaaggccttgtctgagcaattcacgtaatgctttaatagctccttgtctacgctcagcattctcaggtgagttagtcatccccaacaactctaatgtgcaagcaggggctagctcctccaaagattcttctatctaaaaccacagcccaaaaattatggaaaagcttaaatcaaataaatctaatttctatgtatagtaattgctgtgcagcaatagatatctgttgttataaggataatcaatttcagccagtgaaatatacaatattatcctatattctttcatgatttcttcatttttaattaattaaaatatccttgctattgattattgaacacgttcaacatcaatctatcacttttaaacaaaaattctattgagcaagagtgcatgcatctatgtctataataatcatgaaggaatagttacaattcttaaaataaaaacaattaataagggaaaaatagaagtcaaagatcgtacctgagataataacgttagttcatcaaaaaactttttactccttagaagagattgagctcgagcaagagcttcaaatccttgggataccttgttcttctcaaaactgatctttgcaattgcacacttcaagaaagcacctatgataagaaaatgaggcataacaaggcagctagaaaaagaaggtacaagatcctagcatctttccttcaatgtcttacctcagctagcgccatggaaagaagtatatcatgaatatatggtttagcatctggatgctgaagagcaacacgaccaatatctaggacgagctttacttcccccacctggaatggaaatggataacaaaaagcataaatctacttgcaggtcgaaagagaaattactaacgattatttagagttac

SEQ ID NO: 36803 - DNA, 4140 bp, Cannabis sativa
atgtttttgaaaaatattttaatttttaattttaaaaataaaaaactaattaaaaaaatataaccaaacaccactttaattttgaagaaattttaccccaaaatcccctttattttatataaaacaaattttctaaatttatgataatatttaaaatattaatattatatatatgatgggtaacaattgcggtttttaatatttgtttagtttaactataccgcctaatgatagtaagaattttaatcataactgcatcactaataatattaaccagacgtacggtgcagtacaaataatgctagttttgtgctcaccctatttttaacaattctctaaaataattatgattaaatcagtgttaattttgattttttataaatttgatcaaaatatagaaattaagcagcactgaatgtaattaattctttgctacttttaagaactttaccccaaactaacgcaattaaagcctcgactaccagctaggtcgatctcgagagagttcattatcaaactcccaacaccgtattctgtcaatattaacatgaactcatcattatccttatcctacacagtccacaagcgccatggtttcttcagaaccgttatggctaattacattgcttttactagctctgctgccttcctcttcttgcttttctctcactgccattacacccaaacagcccctcaaagacggtgacattttgatttcagccagtaagacttttgctctcgggtttttcagcccggcaaacacccgaaaccgctacatcggagtatggtactacaagatccctgaaaaaaccgtcgtttgggtcgctaacagggacagtcctctcagtgatacctcgggagttttgtccatcgacggccacggaggccttgttatccatgctaacaaaagcagaagctctgttttttggacagccaatgcttcggtccaccacgcaaatagtttcatggctaaacttttagacgtgggaaatctggttttacttccaaataacactgatgggactcctttatggcagagcttcgattatccaacagatactatgcttccttacatgaaaatcggactgaaccgggtcaccgggttagatcggttccttacttcttggaagtccgcggaagacccgggaaccgggagcgtcacgtaccggttcgacccgaatgggaatccccaattgatcttatacaagggtcgggctccatgttggcgaaccggttcttggaccggccgtgagttctgcggtatacccgaaatgacgcctttcttcattttcaatggcagtttcgtgaacaatgaagatgaagtcgggactgtgtactggctaactaacgactcaattttgtcgagaatgatgatcgatgagtcaggaatggttcgcagatacacgtggcacgatcagaccagacaatggcaggagtttttatcgttgccgagggaagtgtgcgatagttacagccattgtggctcgaacgggatctgtgaccggtcgaatccggagaggttcgagtgcacttgcttacctggtttcgaacccaggtcgcctggagattggttcttgagggacggatcgggtggttgcgttaggaagccagggctagctcccacgtgcgggaagggagcagggtttgtgaagctggctcgtgtgaagataccggacacgtcgaaggcacgtgtgaatatgagtttaagtttggaaggttgtgagaaagagtgcctagccaattgctcatgtacggcttatgcgaatgcggaagtgactggtggtggtgggattgggtgcttgacatggcacggtgatctggtggactcaaggacatatccaatgtcgggccaagatttttacgttcgagttgattcaataacattaggtacgtactattgttcagtctttatcaatgttattaataatgtggtttgcatcaaatctatgtataatttacttttgattataaatatatgcagccaaatataaaaaggactctaatagttctatcaacaagagagggaaactggaaattgcgctgggttcttttgctgtactactattaatgatcatgtttactatcttgtattgccggacacatagtataagaaaaggtgcgtgtgtatatatatgtcctgtctttttactcttcgattcatgttttgtgtataattaatcccaagatatatatttatacatacatataatataggagatataaaatatatcatgtctcatcatcacttcaccatttacttaaaaatatataaattcttcctaaatacaagttcagtataagtaattaaaagtgatatatcacaaatttaataaaaaaatggataaatatgtaatataatatatatttctatacacactctttgtgacattgttacaatatggggcatgagtatgcattttcttgctgacacatagatagttatatttatttcttgtgacattgttagtttttttttttttttttttttgaaaaagtggagttagcctaatttaagaataagaattctcactttttaatgatcacttattaagaattcccactttttgtttcttctgtaagaaataaatgtaaatttagtgtacgagatatttaaatgccactgatatgttattgtgtttgtgctaatatataacagtgaatgaagaacagagaaaatatcttcacaatgtttccgaaagcttaagtacctatcttgacgacttttccggtcaaaaagagctagacgaaagtggttcagagttgccagcatttgatttgaaaatcatagctgcagctacaaataatttctcaatcgacaacaaacttggagaaggtggatttggctcagtttataaggtaattatacaaagctcctcatttttttttcttagatatatatacgtgtgtgtgtgtgatgcattgacaaactaattctctacctttcatatatcacactttcacagagaaaaatgtgcatgcagataagttaaaaacaatattagtatactattatatctatggaaagcatgcatcagctatttttattacaattcaggagctttttgtccactataaataataaattaagtgatgatgagtactgaaacattcgtcattgggtgtgaaatgatatatattcagggtgttttgtatgggggaaaggagatagcagtgaaaagactatcgaagcagtcgagccaaggaagtgaggagttcaagaatgaagctttgttgattacaaaacttcaacacaggaaccttgtcagggttcttggctattgtgttcaacgagaagagaaaatgttaatctatgagtacttgccaaacaagagcctggacttttttatatttggtatatatgcatatttctcaccatttgtctactcaaattaacatatttaattaattacccggaaattatacaaatataatcattaacaaacatcctaaactatgttctcagatgaggagaaaaggaaattgttagactggggaaaacgtttcgatattatttgtggaattatcagagggatgttgtatcttcatgaagattcaagattgagaatcatccatagagatttaaaagctagcaacattcttctagatgccgacttaaaacccaagatttcagattttggcatggccagaatatttggaggagaagaacttgaagtaaatacaaatcgagtggttggaacatagtaagcctccatgaactgaatatcaatctaagacattacacttttattcactctacatcacaggtcttagttttaaaaagaaaatcacagaaaccaaacttactcacgtgaaaagtgctattgcagtggttatatgtcaccagaatatgcaatggaagggagattctcattcaagtcagatgtgtatagccttggggttttgattcttgagattgttactggcagaaagaacattggctatcgtcgtgtgaatccggctggttcatcaaatttgattggacaagtaagcctagctagctagctagcttgattaattaatttgtttaaattagctcgtgttgctatatttttaatcgctacgcaagtatacgcaatcaagtagtaaaatctcacacaggtgaggtcgatcccacagggaattggattaagtaccactaaa

SEQ ID NO: 36804 - DNA, 3524 bp, Cannabis sativa
gaaaaacttttaccgacgttagataacatgcaagcaaaactcttcacaagcggttctaaaaagtcaaacgacaccgtttcattttagggttctaagtgaaactttcttaatgcgtactttgacatttaccgacgcaaatatatagaaagcgtctgcaaaaatatacgattgatattaaataaccaacgcgtgcccatttcttcttcttctctttatcttcaaaacccagctacccgtacctattccccaccctcaaaactgtctattttcaatctttctttctattaaatcaatttcagataaacaatcagaacatagtaaagttgtattttgggtgtgttttttctttaaagcaaaaaagttcatttcttaattattggtaccaaaaatagccagggcagcttctatattattacttcacgtgtagatgtaaatgatgatgacgtaccagaggtgattaaatttttcctagagtatgatacatacacatatgattatatatatatatatgaatgcttccttcatttatatgcacttaaaaactatatttgtcaataattacttgaaagcagttgtcgtttggtaataagtttcatctattatcttcccatgataagtttaaccggggatatctataataagtttcaaaactgggagaagaagattaaaaggttagataacctagatttcatacggggtaatacaatggtaacaagtacataaaccatactacatttagatggaattctaccataagtataacagaacagacaacaaggcttacaaatcacagaaactatattataaatgtgagtgctcccctaatgttgcaaaacatattctgatatgttaaagcataatcattattattgcgactaaattgtgtccgctaaacagatcgccccaaagatactagatgagttttcaattacatctttcacttctcggtgttaaatttatactccaactgacccttctctttgcctgtcacgtataataaaacataaattagtatgtctagatattccaatcagaaacaccatcactatcagcgcaataactcattgagcaaataaagtttatgaactccaatacccccacccacccccatccccgggaagcctttctcataaaagataatatactcttcttaagggcttcatattcatctaaacacgtatttttattttactcctattgataaagctcggatcagaccaaccgcactaagtcgaataattgaattcaatagaagccctatagctcagacagacataatatagagagggtgccctgcaggactagaattcagattgtgtcaaattcgttaaccaagaacttatttgccatggaattgagaggaggctatcacaattatttcttgagaaagattaatgtcatattcatttgaagacaactaatcctttttcaatgaaagaaactacaatcatgcaaaatgacgttgaatcaagccattacatgagaggtcttaaagaacagggacagttgcatcacttagtttctttgattaggtagagccttgactcgagggatagcctccaattggtcactgctatactatacgagaatacagaagacaactatcttaagaaggaaaacaacaagtatcaagaggcactgcgtatagaaccaccaacatgaagataaagaagataaaaagagagccctgtggacaagtgaaatatatcaaaaacaataccttcatcaatttgactttaagtcaattagattgtatgtctagtgcgtggaaaagttggtatgaaaaagaattcttataggactaataagaattgagtcatatcattgttatgaaaaacattacctcaataacgagtgttatcaaaaacccaaggttcatgagtgaagagctcacggccattcatttccactgtccctgcagctatatcttcctcacgtttccttactgcttcagcttttctagctaatgcatcagcctcctgtgaaaaccccaaattctaaatacatttttctttacgaacttaatcacatctcttctctaactactgatgggattggagcaagaggcaaatttactatgctaattgatgaaattggaagtctttagtgttggcaagaatttttcttaattgtactaataaaaatttgagagatttattggcctttcaaggcatcaaccccaattgatgttatagtaaatgtaccattcggatttgggggattttacaattgaaatatataaatcattctagggagaaaaacccaaaaagacaacatgcaagaactacataaaaagtaggataatcgcatgaaaatcaatcgaataattgagaaaagacataatcgaaaaagggataaagtaaaacctaaaagaaagagaaagaaagaacagaaagaacagaaaaccttgcggcgtttccaggagaggaactgggattgtgtgatggcattggggttaatagtgttattagggctgagcttgttctctgcctctttaacgtcttctgcttctgcacccatttttcagtttctctttctctctgcagactcagagacgcaaccaaccagacaactacgatgccaagcaaggcatccaacacaaaatgacgtcgttttatgccttgaaatacaaataatataagaaaagattctatttgcactcataaatatactctattattaaaaaaaattaattttttttttgttataaccaaaaatggcaaaaaatattacaataataatacagtgggtcggtcactattacaataatacagtacacataacaaatattacaagaatacctcttacacacaattatcaagctgcaccacccacggtttatgcttctcatcctggagcacttcatgcgatcaaacgaagatggcaaccgcaaaacaacccaaccagtcaattgaagatccaccattaattctagcaccgtgacctgagaagaagatgaaattatacagaatgtcgatcattactgattggtaaaaaaaatctacatgtaaactggtttgaaacacaaaatcaaccatcaattacgattcaaattttatcaaactaatcatcctatattcaaattacatattcaaaaaaatatagatatgaccgaacaagaagtagagttctgaccaatccaaaacaggtataatctgatatacacatatcaatacataatataatatcataattgttgtattacaattattttctaaatttttaatcttgtaattattcaatttcaatcacgacaataacaagaaattcgcattcatctagcaccaagaaactagaattgttgatttaaattttgtgtttcattagagttgcctttccattttattcacacactgataatgataattgaagacaatgctctcctaaaatataatatataacatggtcagtattttctatatttttgattggtttatttaacgttggtttacaatgttctaatatccacaagaaaaatgttaacaaaaaaaatattggtgatcagtgcaaaaaaaaaaaaaaaa

SEQ ID NO: 36805 - DNA, 6141 bp, Cannabis sativa
  modified_base (4326)..(4328): a, c, t, g, unknown or other
  modified_base (5468)..(5477): a, c, t, g, unknown or other
aattgtaaaaatagaagaaaaaaaaagttaaaaataatatatgggatgattttctttttttttttctattatttgaaattatcccatgtacaatattttttttgggtgcttctaaaatactctccactggaaatggtacactggtgcaattcctaactattttggtatctagaagattttcttagttcaagtttttttcacaatcgtgtacatagttatttaagacattctacaaaaattgagaaattcagaataatttacaatataagaatcaatgttcaaacagtttatttcacatgcgtataaaataaaataaaaatgtaaaaaaagtcatgcgtgcaacaggctctttaaaccttattttcgacgtgttaaatttttctcaatttcttaaaattttgtcagatttcttaattaactacaacgtgaccataaaaaaaaatttggaataattattttttttagataccgaaattgataagggtgcatcggtaaacccatttcatggaaggtattgtagaatttttcatttttttatcagcaaaaacaaaaacataaaatatttatttttgggtgtttctatagtgcacactcctgaaaagagagaattacttcacaaatatacaaacataataaaaaaaataaaaaaaaaaaatatatggttgtacggaattttaaataattttacgatttttatgattttatttacaaaaaatgcggtatttttatgttgtactcttgttaatttgttgttgattttttgttatttgtatgttattttatgttgttattttcctgttatttttatgtagctttcttgttattttagtgttgtttttatagagcaccgtaagaaatgtaaaaaaaaaaaaaaaatcattgaacgtaaaaatataaaaaaatttacaaaaaatagtgcattatataattatccctaaaaagagtatgtcaatgtgtatgtaattagttcaaaaaaaagatatcgatgcaccccttatttattttaacatcggaaaaaaaaaattaatctaatttttttatagtcatatacgttataattatttagaacatcacgtaaaattttaagaaattcgaaataatttacaatatagaaagtaatgttcaagtagtctatttcacacgcgtataaaataaaatagtcatgcgtgcaacagactgtttaattaaaccctatttttggtgtattaaacttctctaaaaatcttaaaattttgcaagatattttaaataactataacatataactatgtaacaaatttgactaaaaaattctcttaggtgccaaaataaatagtgatacatcaatatatattttttagaagagtgtatggtaaaatctccttttactttttggtatggaaaatatacaatattttcaacaaaagaaaatttaaatataagtacaaattttaaaaatatttaatatatttacgatcaaaataaaatacatatattttttattttaaaatattgtattttaatgcgtaatcaaaaaaaaaatgtctaactctatgcatgaacttggcataaaaacttattttatagttaataagaataaataaatgatatttgaatgatggttcattaaaatttgttttgaaacaaatagtgtgtaatgatagttttgtgatgatttacgattaaatttgattaaaacttggttttgtgatgatttacgattaaatttgattaaaacttggtgtctttaaaagtttttattttagctgaataataaaaagaaaatactattatattttagcatcaaaatagtattttttttaagggaaatttgtggtataaataccatatgttttcaattttatacacttaaatataattttttttggtggatttaataccaaacgttgtattttaagtctctctgttactactattatgttagttgtgattaagtgtagacccaaattaaatccctatttttttaaatgcttagttaaaattaaaaacttaactttttaatccaatatatttaacttaaatttaattttcataaaattattttaataaattaaaataaaaaaaaaaacaggaatacaaatcaatcatccaaataatcctaaatctcatcctttcttcttcttctttcttcttgctgccttacaggcagtcaagtacaataggaaaatcaaataatgactctgctacttttcttcttttcttctttctttctatatattttgcagagaatgggagcctaagattcttaaaggaaaaaacaagaagaagaagatgaagctcagtctgaaggctttccttgagctttcactatggttattgtcggtttggtctgggtgaaaacgtaacgtggcagcgaagagtgcgaaatcggcggctgagagggcgaagagggtatggcggagaaggtcgtgattgcggcggagatcggagaagataggggagaggaggagacgggtccagcgacggcagacgagggagagattgggtatggaggagggtgggacacgagagaggcaatcgatgaagatgtcatctgggagggaagagatattggaagagaggcagttgttttatttttgtacttgactgcttgtaattttttttgtattttttttggttgaagatggaagcatgaagaagaagaagagatgagatttaggattatttgagatgattgattggtattcctatttgctttttaattttaattcattaaaataattttacgaaaattaaatttaagttagatatattagattaaaaagttaagttttttattttaactaaacatttaaaaaaaaatagagatttaatctgggtcttacacgtgtacacttagtcacaattaacagaatagtggtaacggagaggcctaaaaacaacgtttggtattaaatccgctaaaaaaaaaatatagtatttaagtgtataaaattgaaaacatatggtatttatgccgcaaatttttctttttttttttattagttttgggttttctccattaaaaattaacatttagttagagttatattataaaaattgtaactatagagtatacccaatagttataatcgtagttttttttagttgtggctaaggaaaaggaactgcattaaagtcctatagcgtcatttatttcataataattgccgtcatagatgcacataatgtttgatgcatgtcatctatgggggcaattattttgaagtaactgacgcgataagactttataacctcgactgtcgtcacttctcttcatcgtcttcatttttcatttcagcaaaccacagtccaaaatccacgaaaccctcatcgaacaaccctctttaagccattttggctcattttttttttttaaaaaaatctcattttcaatacctaaaaacacattgccggtattagattgttttttttttagtgttttagtataaaagaagcttttgaggtggcggttgtggtggttgtagctctagcaaccagtattaaaggagaaaacgttgaatctcaatgtccattaaagtaaaaatctaatctttagtaattttattaaagtagattgctttattttttattttgtaaaattttttatggctatagtttgtggaagattgtgagttcattgggttgtggtagtggtcaaatttgtggttggtattagtggtagattttggtaataagataaaaatataatctttaatagttttgttataatttttttttggattggaatgattttttgattagtgaatgtgtttgtgttaaactaacagtttgttataaatgtatgatttttctttaatattagtatgttaaatattgtgattaaaaaaggaaaagagagattgtgaataagataagagggtattaaaacaaaagtttagaaattaatttctaaaaaatatatgagtaagatataatattaatatgttattttttgttccttacaaaatatatgtaaaggtattttataatataagatgaggaagccctcagatgggcaaaggagaagaaatggattagcctaaagggcaaatctcatagcatgctcattattcaatcaatccgtagtgatcaacaaatgttatctatttttggtttgattattactgattgtaaaattttactttcctctctacttaatgttcagttaagtttcattagacgatcaacaaatcaagttgctcattatgtggctagacactctcgatttctctctggtcgtagtcgtagcattcctgattataatgttccaagttattttaagatccttttgtatttagaatgctagatttcaatgaagttgatattttatttttaaaatatatnnntatatatatatatataagatgagaaaaataagttaattcttctatcaatttttctttgtgcatattagacttaattccatttttcttccttttttatattatttttattcatatgtttttaatttttatttttttactagctagtaactagtttttttttttttttttcttgaatagctagtatttagtaattaattttcattcatattggtgtgttttattactaattagttactaattttaccaactaattaattattagtaactagttagtaataaattattaactcagctaattactaatagattaactagttactcataaattatataactagtaagtagctaaatagtttaattttgtagtttctttatattataagttgtaaggtcaatttacaaggattcaactcatttagttttgatcagtttctagctagctaaagatataggttcactaacttttattattaattgattatgaattatctcccaaatcacattcatggcctcttccaaaactcaattaccaagtctggtagtgagctccataaaccagttgccaaaattcatctcagaccatttgtgatggtcgagcggttccaacaagcccgagccgaacacctaacaagagcatgaaaaatagtttcatcatgtgtactgtagatttgacaaatagaacaaagagggacatgtctcttagatagttgaacacatgtaagaaatgcaccaaaaactgcttgtcataccaaattactgactttcgggagaaattttaaatttcactacttcctccaaaaccagtagcattatttttagaccacctacccttgagctcttttaaataacggtaagcctttttaactttgtaattttctcatttctcaaacttccaagcagggccggttctaaggtatatggggcttaagacaaaattaaattttgggacccctatatatagattaactattataaaaataatagttctaatgcatagtgtaacagtaaagtttttaaaaactcttaagacctccaagattcaatctctcataactacacatttaatattttttaaaaaatttgaaatgtagaggttgggaattgatctcatgatttcttaatttaaagtaagaccttttnnnnnnnnnncaaacaatttttgttatattttttttatttaatatttaatctatatattaatattttttttcacaatttcggggctctgaacgttcggggacccaaggcgcacgcctagcccgcctaccctcaggctcggccctgctttcaagaccacttatcatgaactaacaatcgaagagcttaattgaatggaagatataagttcctagtctcttgggataaacaatttttttttttttgatgaagttgggggtgttagcacaccccaggaatatattaaatggaaaagataatacagagttcaaaccataaaaaacaacaaagcctaagaggccataaagaaaactgaaaaaaaaaacagacagtaacaaaacattagactaactaactgaagaaaaataagaaaaaggagaatcagacagcttgacatgctgccgttggtaccccataggatgaattagattaacctgcatgtttcttccattcaacgtagtcatccagcactgatttatccagttctgtgcttcgaatgagcccagtgacccgaaactgtctcgcccatttagcaatgttatgagccatgaagttgcaattccgtgggacatgcccaatctcccagttcttgaaatttttgcagaacttgtgaaatcgccttctgaggtgaactaag

SEQ ID NO: 36806 - DNA, 6779 bp, Cannabis sativa
aatatataaaattaatttagctataatttcaatgggtgcataaacagaaaactgccaggtaaattttttggcgccttttcttaaataaacgacagaaaaatctattgtcgttttttacaatagcaagtcatcacaatagtcaatacaacagtggcgcgtggtctctcagtctcctccttcttcaaaaggaaaaaacaacacaattccattcacagccgtccgatcaaaaatccaacgatcagaatccaaacctcacaatacctataaataccacttagctttcttcttctctaagaattccatcacagttcacacgtgtgaatgatcacacttccatagccaaacactcttctaagctctctctcactagaatctcgatcaatgtcaatggtggaagaagacaatacaagatcaaaagctcctccgacgatcggttcgtctcttgttccgatcgtcaataggctccatgaagttattgcttcggtcgggagtaatttgttaaatatttctctgcctctggtggcggttgtggggagtcagagcagcggtaagtccagtgctcttgaagcgctcgtcggacgcgattttcttcctcgtggttgtgatatatgtactcggagaccgcttctacttgtgctggagaatcggtcggtgagtcctggcgatgatggagctgagtggggtgagtttcgtcatttgcctggaaagctcttctacgatttttctaagattaggcgcgaaattcaggtagatattttgatgattgcgttacttaattacttactttcagtacgttaaatcatacatttgatattttgaaaatgtgaatgtaatttgattgtgtggggagattcgtattcgcgatgaatttttgattgtcttactgggaattagtttgagtgattttgctgttttggttatttgaattatgaattgtatagttcattttcgtttttgaatgtagaagtcgggtggaaatgaagtttagaaagtagaatgaaggtgagtacatgataagatgtatggagagcacagtgagtgcattgtataaaatgcaagttgtgcagttttattttgttcaaggaaagtaacatttcttattgggtttgaaaacatgtgttttggtagctcaaaatgattgctcattgaaaaagagttgtaaattcatcaaattatttcttattctacaattttatcgtggtttcatagaggggagctgcctataacaggtttgtttttctaaatatttatatctcagatttttattagaagagatagcaactaggagttattactgtgcttgataaatcttctcaagcaatatcactgttatctttaactaatatcatccataagatgcttccaatgatttctaaatatttttttttgagaaagcacacaccctatgctgccccccaatttgttttttttttcctttcttgtgtatggtcattggattgctttttttgattgataggctgagactgacagaggagcagggttgaacaaaggggtttcagataagcaaatactcttaaagatttcatctccgaaagtacctaatatgatgcttgttgatttacctggcataactaaagtccctgttggagatcagcctagtgatatagaggcaagggtcagggaaatgataatgacccaaattaggcaagaaaagtgtattatactggctgttagtcctgctaattctgatctggctacctcagatgcactacaaatggccagagatgccgatccaactggtagggattttcgtgacttaattttttcactgagtttactctatgttttttgtgctacctcctaaatttttgtgccaaacatgattcttgaacaggttctcgaacaattggtgtaatcacaaaggtgtgtttattttcttttcaaaataaaatgaaggatacttttcactctctttagtatttgtcttgattgtactcttgagttgctataatgttgttttgtggttctctttgtagcttgatataatggatcgaggaactgatgcccgcaactttttgcttgggaaagtcgttccacttcgccttggttacatcggtgttattaatcggagccaagaggtaacttttttatttttcttggggaaagtggtaagacatgaaaacagaaactattgttgacttgtataaaaagatctgttcaaacatctttatgtacacatacctttccttttgtaaaaactatctttatgtggtcaccacaggttgctcttcatctagtatatactagtagttgtgagatgcaggctgattaaacagttgtttgatactgaaaatttaataataaggtcacattcattggtgcgtggtctctagttatggatatggacaaaccagtttgatgattttttattttatttgtcaggaatatgcaattaagctgatgccttgctctgctccttttctgagtcgcaggacattaataaaaaccgtagcattgctgatgctctttcccgtgaagagaaattctttcgtgatcatcctgtactttgcacttcctttgcttaccagtttcacttgaagaatggtttaaattttctttggctcttaaattttgttcaattttcattttcctttcatattaaaggtatatagtggtctgtctggttgttgtggcattccccagctatcaaagaagctgaatcaggttggttaactcctttctttgcatcattaatactgcatgattcccatttttaggtgctttttcagttgttatttacttgttccgattttctttctaattgttgtcatggttgttcacatgtcagatcctggaacaacatatcagaatggctctcccaagtttgaagtatgagctgaactcaaaaatgattgctgttgctaaagaacttcagacatatggaaatgttgtagaggctaatgtaagttgcattgtaatcggaggaattctttctgttatgctattgggttatgagagtgtctctggctttctgcatatgcttggcatgtcatatttgtttggaaattggatctccaataatgtttgcttctaaatatgcaactgtaaaatggataattacatgtctaaaatctgaaaatgatcatttgaactccgaattcagaaaattggcaaattttgtttcttagatgcgtgtaaaagtttctccatcatctattaattattatttatttgtttgttcttaaaaatctatactttgccttgtctcactaccataccatgacaattatttcttccaattcattttgttggcttgtcctgtatatcaaccaggtggaaaaaggagtaattttgttgaacattttgtcaacatattgtgaaggtgactttcaataacctgttatcgggctactcataatttagtttctttttttgttctgtcattttcgtaacctatagaatgtgcattggactcgagcactattttcgtaatttttttaatattaaaatcttgatagtctggtggtttctgttatttcattattatttcttactggaaatctcttattgtcgtttctaatactgttttattcaattaacagatttttctgctttggtggatggaagtagtcaggatatatcaactaaagaattgtcaggtggagccaggatcctttatatatttcagtcaatttttgtaaagagcttggaggtatactttcaacataataacaactttgtgctttgtttttatgcttcttgataacatatgtatgcaaatattttatgtttagtaagatctacgatctcgctaaggtcatgattgtttctattacttaagttaatatccccttgccatgaaagtatcactgattatgtttgcactgatttatatggtgcaaagataaattattaaaaataaggtgttactgtatgagcaagctgtttggctatgtaattgtaggaagttgatccttgtgagggtttaagtgatgatgatattcggatagctattcaaaatgctgctggtgctagaaatgtattaatcattccagaggtgagagtatgatatggcatatgctgtattgttgcacctatcaatgcatcttacctttcctccctgctgaagagttgtgaggacaagcatttgaaaaaaataactccttactttttccacttctcaggccccatttgaagttttggttaggaggcagatttctcggttgttggaccctagtcttcagtgtgtacgatatgtttatgatgaactgataaaggtgagattctttttattatgtaatgctttggaagatttatatattaatatgaagcttattgttttgttgcagattagtcgtgcttgtgaagtaacagacttgcaaaggtttccaaaattgagaaggcgcatggatgaaattatggtaaagtttgtacgtgatggtgtaaagcctgctgagagaatgataagaaatcttattgagatggaggtagttcctttggtatcttgagcattacataagtaacaattctatattgtatatcatagatgcatgattcttaatattgtatatcattacagatccaactgctaagctgattaatcaattttcttttttattttttaaagatggattatataaattcttcacatccaaattttctcggtggcagcaaagctgttgagcttgcttcggagcaattgagatcacaacaggtacaagccctgcactaccacttcagcaaactatataattttcatagattatatgaataagtttcctaaagccacatgggggtgattagttgaattttgaaggctgttcttattacaataacaaagagaagtttacagacttggttaaattattatcacgttatcaaaacgatccattttcatctgaaccccaaagtgtgtttgtatcatattgttgtggaaggtgagagatattgaactcacataatcctccttcttcattagaaataaccaagtcatttggaaacatttttagatttacttatgctaggagagggaatagacagaatgtacaatggtaagtcgagtttttggctagctggttgtatgagtgagtggaggggtattttggtaattctcaagtagggtgacccgctcatatagtgtgtatgcgagtgagagattatactagaactatggttttcctcagcatcattggagagcttaggctctcaattactgtaggaggctatatagtctcttttccattttcaataactactatttaacagtagggacttaatattaccaagaaactaaaagttcaggggccatttactaaaaaataaaattcaggattaacttgctaaaacttttatatttggagactaatttgtcaattgaggacttacttgctaaaacttatatagttcttctgagacttgcggtacaaataaccaatttttttttaaatatgttagaaacacaagaaccaccctgaccccacagtgggaaggtattagacttacatctttaaaaagtacagaaaatgtcttgtttcttctttttgtttttcttattaatgacgatggacttagatttgatcagtgtgtgctgagggcttttatgaaatgagagatagaggtcagataaagagatcattggtatggtcaccattgtcattacaactcaaaatagtgggtccatcttctgtaatatggtccagaaacacacaataaagaaaatgacaactaaagtttttggtgagttgattgaatagataatagattgatataatttggaacatgcaacgttagggaactatggaggctagtggaccatcatcaaccttgattttttggtttcttggacagcgtgtgaaataatgtgaagttgggtcatgtgatcattagctctggaatcaatcacttaagcagaagagacatttgtttgagatgctcaaggcatggaaatatgacaacttcatttggactagcaatctctgataggaagattcaaagtcatagtctcttgtgtgtttgtgtgtgtgtgtttaataaagagatgaatttgctgaatctggtacctccatcatctgcaaagttcttatctctgtgtttatcccttattgtaaatttgtaagtgatttgtggaatcttataatgagattcaatagcaggattgttcccttccccctgtgtaatctttgggagtcagttctcaaaatttatatttacatttgaattgatataaattttacaaaaaagttgtatgatgtatgctttaggattttttgactctctcaatttttttttaagtacatatatgtattgtttttgtttttctggcaaaatgagattggtcagaattgaatgttatgtcctttttgagctcatggataatcaaaagctgcactgaatacattcaagtgttgctttatatgtttcagggcattgcagatgttgaaaagccaatagagaaaagccagaattctcgagctgttattactaggtctctggtgagtggagctttattaacccagttgcattctccaactttgtgaagagtaaaatggaaatgatttagaaactgacaatgatatacaaaagaggcaaacaaagaagtggtattgctgtattgtaatactttatgttggaaacttgaattgtagcagaaaaataattttttttgtttgttttcaaagtgagaattgaattgacgtaattgaacattttagatgtgagattaaaataggtgaatgaaatatctattctatataaagtgtgcctatataactaaaattcttggtttatgagaaatttatgggtgactttttatttttatt

SEQ ID NO: 36807 - DNA, 5009 bp, Cannabis sativa
ccctttaagtgtatgaagctccctcaacctgaaaaacaatcaaaaacagtaagctaagtatatatatatatattatatacacaaatacatacacattatatataaggattctttatatgtaccttgcaacttcagctctctttttagcttgttcagctatttcagacagttccctgtaattgtttttactgtcatttaatatatcagccgtttgtggactctgtagaccatgaagtgtacgttgagccaatgcccattgagcttccctttctcctcttccataatctctcttattggtaaaagcagtctgcatatcacaacagagttcaaacaaagtaaaaatgagaccttttgtttgattattccttaatagtcgcatcaaaatgaaacctttatttaattgtatacattaccttgttctgaagtaaattgtcccaagccttgccactgagtgcataacgaataatgaacttaagaatgtctaatgggatgtagaagatgatgctgtaaagccatataacgccagcccatccccaaccaatccccttcattcgagcaaaagtccagtttgcatacactgatattaaagtagccacctttggacacggcaaaatggcaaaatgggtaaataacactaaacttatatgaactgaactgaagttaagtttagtgtttgttttcataccagttgagctatcagaaaggcaatcatgaggaagaaaccaggtctttcaacaaaagaccagcttctagaccttgtcacaaagataagtgcttgactcacaatactaacttgaaggtaaacagctgcagtgagctcatcttcattgtttcttagaggtactaacccaaaagtgttctgcaattgttaatggtgaacaagtagataaaatttttgtatgtaataatgtaactaagtttcatgattcaaaataatgattgggttttggtttttaccgtgaaaaagtcagaactttgagcaagccagaagaaaacaactgtcatgacagccaagtatgtcccaagaacagtgccagtggcgaaaatctccttaagcttccatgagtcaggaacaggagatggtttaactctgtctttagatatagtcatgatggtaccatcgtttagtatggctatgatcaacaccatgaaaggtgagaaatcaaacttccatataagagctaagagcatgaatccaagcacgatacgaatagttatagcaactgcataaatggtgtagtttttcatcctttggaagatggctctgcttgtcaaaaccgcgcttataatcacactcaaccccggctcagtcaagactatgtccgaagcaccacgagcagcatctgttgcatcagccacagcaattccaatatctgctttctttaatgctggggcatcattcacaccatctccagtcattccacatatgtgtttcttgtcttgaagctttttcacaatttcatatttgtgttctgaaattgcaaagtgagtgagtgaaactcattaatacttatatcacaatcaatacaagctgagagagagtgtttttagtaatagattaccagggaagacaccagcaaagccatcagctttctcaatgagctcatcaatagggattccagcaatggattcatctttactttcaccaaggagagaagaagaaggatacatgttggttcccatgccaagtctcctaccagtctccttcccaatagctagctgatcaccagtgatcatcttcacattgacaccgagattaagagctcggcgaatagtctctgcactgtcatgccttggtggatcaaatagaggcagcaaaccaacaaactcccatggttcacctgcactttccttggtcttttctggcacagcctgatcaaaaaatcaaaagggtatgcctaatttttaaagaacacaactaacataaagcgagaaggctaaggaaagagctctcacttgtctaccaacagcaagagaacgaagacctcgttctgcgaatttatctataatggcatgagctttcctcttcacatcttctctaaggttgcagagttcaatgatctgtgtcatggaatccaataagtacaacatattgaaaagtgaatataacaagcataagtagtattcatgacaaacctgctctggtgcacctttgctaacccggtgccaattgccttcagtgtcaatataagttatggctgtacgcttatccactggattaaagggcaagaagtgaacctcagtgataccttctctggcctgcaacacaaattttcatgataagtttaaaccttattacattgatgataatatcaatcacaaataacagttctagtttgtgttattatacctccttgggatcacccaacattccaactatacaagcatcaatagcatcttggttctcaactctagaagctcttgccccaagcaagatcaagttgtccttgtccacatctttcacaaacacctataaaaaggtaaacttcgtgatgaaaattagccattcgctacttttataacactttattggagatgctcttataatttaagatcactaacctcgaccatggtcttgtctacagtaagcttgtttagagtaagagttccggttttgtcactgcagagaacatccattccagccatctcctcaattgctgtcattctcttagtgatggcgccctgctgtgacagccggtgtgaaccaatagccattgtcacagacaaaactgtaggcatggcaattggaatgcctccaatgagaagcaccaaaagattatcaattccatctctatacctcctgtgctgaattgggtacattactactatctctatcaccattccaagagcaattgagcaaatgcagaagtttccaatagcagtcaaaacctttacaaaacacccatcatatcagactctcaaaacatcatttgaaaacaaatgtataaagtttcttattcttattcttttttggtaccttttggaagtgtcctacttgattggtgctgtcaaccaaatgtgcagccttaccgaaaaaggtatgaacaccagtggctataacaattgcctcaatctcaccttgcttaactgtagagccagagaaaacttcatcacctgcataccttgtaactggtaaagactcaccagtgagtgcagactgatcaatctttaaagggtctccttccaatagcctagcatctgctgggacaatatctcccaacttaatactaatcacatctcctggaaccaagattgcagcctcttgctcaccccatctaccatctcttagaacctaaaaaaacccaaacacaaaaaaaattgttcagttcagttggaacaaacatcaatcgatcaaacaaaactaaaagtcaattgatgatgatttgacaaaagggtcaaccttggtttttggtgctagaccagccataagtgctgcagcagcattcccagcattgttttcttcaatgaaacttattgtagagtttattatgagtaatgaaacaatacccacaaaatcttgccaatctggtggtttaccctgaattccattattgaaaatattattaacaaaacaataacatacacacacacatatatatatatacacacataatatataagtaattacccctccattagccaatgctatggccatgatagcagcagcctccatgacccatgaaagaggattccacataaaccccaagaatttcaggaacttactttcctgttacatcatcaaatatatacatatgagtatatatatatttaatctccccaaatatatatacatatatatgagtgtgtatatatatatatatagacctccttctcttctaacttgtttggaccaaagacatccaatctcttctgtccttcctcagtggacaacccagctttggtacattgcaattgaacaaaaacctcctcaattggtattcgttcctgtgtcacatcccaatttttgttacaaataaaaataaaattaagaaaaaagggtcaaaatttattaattgtaattcactacaaaaactacataaaataaacaatgatttcccaaattttgattataacacaacgaacagaatatacataattataaaaacaagaactttgattaaaaagaaaaaagaaaagaagtatttttgcatggtaaatgaagaaagacaaaaataatagtacttacaagatcgacagtctcattcttaatttcttcgaagttattggctgccatgtttaatgtaatttttgtttttctttgtacacaaactctagtctatcaaaaattgtgtattgctagggctatgttgtgttgtgttgcatggtgatgaatgtaataggagactcataatgtttataggtatttatatttttatttatttatttattaataaatcttttagaatctgtttcatttgaattggaataagtcgaccatgtatttaggatcttagttcaggttcaatttccctttttttatttttttttgttaatatatatacgtatgtttttttttattggagtgtattaggtttgattgtttattgtggagtatgtttacctatttaaaaggcaaatattatctttcttattccattgccataatttcaaaatagtcatcgaaaagtaataccctcttacctcgctctaccaagttatttgtcaaaaaaaaaagagagagaaaaggcaagtaattaattgattgatttaattgacaaaaatataaaatatagtagcttgattgaccatgagaattaccattataatcgttcaatgtaaaaatatatgattttaatggcatgtattgaaaactagtatattctcttcgaagaaaattttatattattcttccccaagaaatttatataaatgattcttaatagtttgtttgcttaaattttataaagggaaattgaatttctatgcttacattaaggaataattttttccctaaatttaaaatagggaatattggtaaaatgggataacattttcttaattcccacaat

SEQ ID NO: 36808 - DNA, 3410 bp, Cannabis sativa
ggggctgggctatatttggcttgattggtcgggcaacatagtctctgctggcatgaaatttctccctgtttgctgtcctgtgatagttgctgaagcaaaagctgtaattactgctctgcaggataggccgatgactgtgtacaactcctatgagatctgatcggactgcaagcaattagtagatgatatctcagcaaatgacagttatcttggtactgctcagcctattgtaaatcaaataaagagacaccctgttttttcctcttgtacaaagttcattcatttaaaaagagctcataatgtaggtgctcatagcttagctaagagaagccttgaaaacaaagtaactcattctttttacaatttttttccgaattggttagctattgtttgtaaggctgacctttccaaatctttgtaagtttgttggtgttgtttaataaagattcatttcaaaaaaaaaaaaaaaatcattataagatgataccatataataattaataattttttataatatttattaaagtaatataaataatactccatattaaattacataaataatgatattacacctgacaacaataagaatgttaaatttggtaacatagttaccctgcattttttatttcttgaaacagagacgatgttgtcgtttatattgcagatcgtcgtcgtcactgtcgtttcgaaatatgtattatattaattattaattaaaaaaaattagtgctcaaaagaattttccctctccctcccaaccacaacaacagaaaaaccagaaatctttcttcttatccttttctgtcctattactctctctacattcaaactattccatgttaaacaaagctctacactggttttaatggcgattctagcttcactacaaggcggtggtcacaacctcttctcctcactcccttcaacaccacccccaaatgaaattccatccaactcttctcctccttcacctccaatcccaattcccaaataccctcctcctccttctcgtcagagaaaaccccagaaccccactcaaaattcccctaaaccccattccaacccagccctcaaaacggttcaccgccgctccaactactacaagccggtcaaagaaggtattctcacgtctgacggcgaccgttccgtcgtaataggagagtccggtgtttcgtaccagcttcctggtgccccgttcgagtttcagttcagttactcagagacgccaaaggcgaagccaatcgcaattcgagaaccggcgttcttgccctttgcgccgccgactatgcctaggccgtggactgggaaggcgccattgaagagcgccaaggagaagaagaagaatcgaaaaactccgctctttgaatcgtttaatccgcctcctcccgacaccaaaggggttaagcatcttcaaatgccggggccttttccgtttgggaaatatccaaaagtgagaaagagcagagaagagattctgggagaaccgttgaagaaatgggagattcgaatgtttgtaaagcctcgtatatcagataatcgccaggttaatctcggtatgcccttgctcagtggtttgtttactcatgtttttgcagctgacccttttgtaaaaatagctttatgaaattctttattaccaaaataacttgaatgaattacactgagcgacgataaacgaccaaagtgaccataaattatcctgtacgactattatggtcgcatagagtaaactaactagtgaggttattttataaattttaggatttcacattattagtttgataaatttcttcccttttgtgctttatgtatggagacttagggtgtgtttggttggggataatggaattgaatggaatagaaaagaataaaatttcatgcattttaaagtgttggaaagttattcccatggtatgactttattgttgaatgaccattccatttcaaaatgggtggaaatgggaaaggtcattccaattaagatgaaaaaatatctatgttttttgtgcatatcaaatttagttctcactcccctttttattcttatgttttggttacttccaacctaaggtaccttatgttgagtaattggtttttctggtttaggaagagatgggctaactcataacatgttggaactagttcattcccattggaagagaagtgaagtttgtaaaattaaatgtaaaggtgttccaactgtggacatggacaatgtttgccaccatattgaggtttgcgtttttggctctgaaactttaaatcaccgtttggtaattctagtttttgtgtattttattgagttgtgacttgtgagattaaaaaagtacaaaattggtttgatatgtcaggaaaaaactggtgggaaaatcattcatagggttggtggagtagtttatctttatcgtggcaggaattataattacgctactcgtccccagtaccctgtgatgatttggaaaccagctgcacctgtttaccccaaacttatccaagaggctccagaaggattgacaaaagccgaagctgatgagttgcggatgaaggggaagaggcttttgccaatttgtaaattaggtaaaaaaacaactcttttgggcatactcttgtgttgtatggtgaaaatccatcatgatttgtatgatatgtttaaaccatgactctgttgatgtttggtataactacattcagaagatgtcattactcataacctggatccaaatttttacactactaaaatattttgatatattcttctttcacattacagccaagaatggagtctacatctctctagtgagagatgttcggcatgctttcgaaggaagcccactggtgaagattgactgcagaggcatgcatacaagtgactataagaagttaggtgccaagcttaaggtttgtagatttctattgctagccaattattcacatttggaacttgacaaatctacataaactatttatgttttaaattgtagtattggacatgtaatagaatgttcaaaagagcatccatttggttacttatcaaatggactactttcttcctatatgtttttaaaatcaagtcaaaagctaattttatctgagtagagtttcctaaaatcatttccaaacccttttttgtgccaggagttggttccttgtgtgctgctatcctttgatgatgaacagatattgatgtggaggggatcagattggaaaccgaagtaccacaattattctctccctctcaatctagtgaatgaaactgtgacagatttcgataattcaggtatgcattagagggaagctagaatacattcaatacattgccggaatctaaattgagattacacatagtatcaaatgagagattacatcctacaacagtttccatcatagctgtttagtagataagatca

SEQ ID NO: 36809 - DNA, 6424 bp, Cannabis sativa
aaagttcagaagtacatgttaatgttaaaaaaaatttaaggaataaaaatcctaattagcctacaatgaatgtcgagtcaacaaatactaaagagaaagtaacttaaagggtaaaagagaactcactgccaggggtcatcgccaaggagaagaacatcgttctcccggtcaacaaatacaagctgccagcctgatctcagggggtcctccaactcgccttcaaggccgaacatgcgagcaagttcacttcgcagctcatggtagctgctgaatttggtgagatctaatgacctcccgaaggaccctgacttgtaaacctgttaataaattatattgttccattaaaaagacatgtttccatgagagcaatacattttggaagccatagacaactcaccttaacaaaggttctggacggttggtttccttggcctgaattgtctggagactgcaggaaaccggattcatcgatgcaactggaaggtgtaattgcaggattaagtgaaaaatcggttcctgtagtactcatgtaactagaacaaggaaacggtacagttgtggagtcattatcactgcctactcccctaagatttgacattccattctgcataagaagagatgagggctctatattgacaccaaacaaaagatggctatgtggatcggtattcccttcttggtcaatcgtgcactccctgccaggaaagggtggcagcgaaacagaattctgggagagattattctgtggctgccccaactgttcaacttgaggcaaaacacattgaggtccagaagaaataagaggttcaactgcagcacgctttgatggccagaccgatgaggatatgttgctcctaggcatgttgagcaagtgggatgattcgtcgggtggatatgaacccaatatgctgtgcaagggagaaacaatgctggtggtcacagcagttccatttgaatcgggataactctgttgttgacacattgaagagatggtctgcatggacggtgattgtgattgagaagatgaagaatagtgggacattggagacacagcacttgaaatttgctggtggtcaactagttgctgctgttgctgttgtgaaggcagctgttgctgctgctgctgctgctgttgctgattactgctattgaacgaatgctgttgttgcaattgttgctgaagaaggtgtggctgtgttgaatgctgagtgtcctgcatgccttggagaaacacctgttgaggttgagattgttgcatcatttgggactgcatcaaagcagcagcagcagcagatctgtttgggagattttgggtctgctggaattgcagaagggaagtcggtattggtttggacggatcaactgccctcatttcttgaagtgcagcagcagccatagcttggtacatgtcaggttgcagaccaagcatcgacgcgtcgaaccttggctgcatccatggtgagagcccaacaccctgataattcagagcttggattccacggtctccataatctcctcgaagccacataagctgagagttcatgccaaggtcgtcctctttcatacctaagaataatttaggaacatggcaaggtaagatgagtttatactcaacgttaaactaaaggatgttagaaatggagcccgaactgcaccatccattaaaggtagcagcagaaatgcataccgtgaaacgcaggaagtcccggtggccaaggtcttttaagcctaaggggaaatggtgatggatacatggggaatgttgttagcggctcaatctcccacagggacactctcggctgcctatcccctgccgttgattcatcccagcccacctgcattaatcaagcattttgtcagcatttcggtgatacaatggacatgtctaaaggaacttgaacagaaaaaacattttacataatatacacataatagttcttgacaaaccttgactgagcgccagtgtgaattaggccaccgaacagcatctaaatcacttatgccagttatcgtgcccatgtatctgtcattaaacacagttttctaaagttagcattttcttacacaccttcaaagttcgaattataacattattgaatatggtgaagcataaaggttaaaatttaccgacgaacgcttgattcttctgtttcaaacagcattctaaagcgcataccaacagaaactcgtgtatgataaactgctttgacgtacttggccaggggaatgacaaattcagatggactagccctgaaaaaggattaatgtggatgtttaacttggtgtcagaaactaattaatacacttccaacagaagcgaaaaacaatcataccttgggttataaaaaattgtgaagcgactatttgttgcagctgcatgagcagcagcagcaagaagccccaagtgcatgctgtcactcgataaaactgatgaaggcatcacagtttgaggcctatttgctcgccggatgccaaggagtaactgatttttctcattcctgttttaaacaaattgtaactttgtaagtacaatcagttaaagcagaaggcaggaaataatcaggaaaaaacaataaaaaaaataaagcaactgtctcttattcgatgccattcatacacgacatgagctgaaatccaaagcatgcctgttgagcatatgatctttagtcttgttcaatgactctatagccttattacagcagagttgaatgacgggtctaacacgaatgtcatggaactaaagagcataaaaatatatccgacagcaaactaacatccttaccagataaaaagcaccgagtcaccagcgacaagtcttttagcactaacaaaaacactccaaccagttgtaaggagatgtctttttggctggcctgcaaaaaaggaagggaacaaatatttacttcaatctaacattagaaaaagaaccccaaccgggccaatcttaagtcaactacagcaaccatacgaaaacaaataatcataattcaagtcacaattcttccaagtgttcgatacacattgaacattgttctcgaaacaaagaatatgctttgtgattaaaggtttctctcagaaaactaaccacggaatatatgtctaaatttccattcattatcatgaagatccctcgcaattagctcttgtgctggtggctgctgggagaagtcctgcagatcaaaacacgaaatgtgaaaaaaaccaagactcagcatagaatcaaatatcaatgtcctataccaaatttgagtcacatagacaaagttttgacataaaaaaatactcttgttaaaactcccaattatgttgaccactttgttatgttattcctttaactctttttttgtctatgattctttttagtgtcatgctgagagattgggaggataaaatggacccaaaaagaaaaagtatgcacatgtttttgaataaaaatggccggtgtcccattgttttcattattgatctcagtgtccccacaattataggagacaattcaaaactgacgggccatactacgcagtatagagaacagggaaaaaagaaaaaagaaaaacgaaaaagaaaaggaattaccaagggaggaaacactttttcagctgcccggcgaggaactgagaatccaccatgggtacttgtgtcactggccgtcaaggttttacaaaagtaatttgtcggttgcttgctgggagcgcccaactctgctggaaggtaggcctccttttgttcttcctacacatcaaaaggtcatatgtgagatacacacaaactgtaaaatcagtaaaccgaaacaagaaaaatacatttcattgcatcataccggacttagtggttgcaaagtcatttgtgcatacacttcatcggtgtcaatgtctgcctgaagatcataaatttaagactgaaaaccagtttataaaactatgtaaaaacgtaaccaaccagactaaacaagcttacatgcatcgtcacattgtgaagttgacaaataagctgtggcggtaagctagggtagttaggaatatgtgcatccacttccctgtttgttgatgcagcaacctacataacagcatcaatacatgataaagaacactataactcattcgtatttcttttctatcaagtgatcaacaacaatctcttgaaatatcggtaacaagacgtgcattagcgaattttcttaaattgctctaaaatcttaaatatttaatggattctaataacttcaagctaacatatttaacttttgacaattacaaacagaatcagcacaagggtttttcattttaaggctatttaaacaagtagcttgatgacatgaatttttttaaataaaataaatttttgtattattctctctctctctctctctcactcactttatctctttttcaaggaacaaaattaacaaatacttcttcacatgtcttaagatctccttcaaaaaatgcattgttggaaaaaaagaaacacaagaaggaaaatataaagaaagtaataatgaaaaatttactgacctgttcactgtgaccttgtggaaagtaaacaaccctgcttccaacagcaggcaaagaaacaagtggaccagcacaagcatgccatagctcagaattcaaaaccctcttctcccctgcaaaattcaataagagagatacaaatattataatcaaaaaaatgatactagtaataataatgctaataatgaatcatagtatattaattcaaagatctcatcaagagggaaaattcataaataagagaactaaaggacaatggtaagctatcaaagatcaaaactttaagagcaagatggagaaattggaggagagtgaaataagattcctaagagaaagaaagggaaaacaaacaaaacaaactttgcttcaattttgggtctccacaaacaaggtagagagacaaaaaggtcataatctaagtataaattaaataattaacaaacttgggtcatcaagattttagtagtttaatgattttattaagtagttaaatggagccaagagacatttaaatccaaaaaaaagaaacataaaatcccacaaaatattctcaccccagaactcaatttagggaccataataaaaaggacaagaaaagaaaaagattgttaatttatgtttaagataaaagggagagaaagtgtattaggaatattaatcataccttcctggggctgagggctaaaaccaactgcagagagcctcatttctgaagattttaaccaaaagcttgtcttaattacaataaataagtaccaaaattcacccaaatcactgaataatccttaagctcacttcttttcttttgactccacaaggaacccatttaaatcccaatacagtcctccatgcacagagagaggtttctctcttctcacctctcactctctctttctctctctctcttctttctttctttcactcaaagtctgaaacttttaaacaaagaaaccaaaaacttcaaccaaagccagtttcactgcaaaacaagattgatttcagcctcatccgctttcactgatcaccttcttccaatcaccaacttcatgctactgctgctacaacaacaacaatcaacatttttcaactaaacctcgagattctcaacacttttttttttttcaacttaataacaaaaataagtaataataattaaaagaaaaaaaaaagtttctgtctttctcaaactacccaattaacccaagctcacaaaaccaagcatctatggcgaaaacccagaaaaaaaaaaacccaacaaagctaaaaaagaagcagatctcccacttcagaacggcacaccatgaaaaacccagatctcaatatagctaagaaatgattctaagtggtgggcatatgcattaaattccaggaggagcaaaggttttttcttttttcttttttaaggtacgtaatgaatttacatatatggttttagatactcttcttaacagagaatatattcatacacatatggaaaatccagagttgggttttgagtttgattccagtaatggaaatggtggtaagaagggtagtagtagtagtagtggtgtagtacttcttcgttgtgtggctttttttctctttctaaagctctctcttttattagcttccaatatcaatcaatacacaaccgccattattttttttagttctctttttatatacaaagagaaaaagtaaagaaacattttagagagagagagaaagaaagaacatatgaatttgaaggagagagagagagtgagaagaacaacatgtcagatttttgtaagagagaaggttttgcacaatttatattgccttttgctttttgggtttttttttttttgtgaaggaaaaaaattatttttgaacatggaaaattgggttatttgcggcaaaaccccctaaagtaggtaggtttttgc

SEQ ID NO: 36810 - DNA, 5679 bp, Cannabis sativa
tttttggtttagggaaaaaaatttttgattttctaagtatagaaaatcaaatttcccttttaatatgggttgtattattaaggccaaaatatgaaatttccctaatacaattacaaggtacggttaaagttgctttgggttcaacttttctcttaaagaaaaataaaaaataatccaagcactgttatatactgttggtattggcaacgaagattgtctatatgatcatactttttcaataagtaaggcaacaagctattgaacttgctcgtattagattttggtaatcttaaattcagtcttaatactttgcttctttttagtccaactccaataaaacacaaaaacacaaaaacacaaaagaatattgttattaagcactaaaattaatatcttactattggttacaaatatttcataaaaattattatattaaattatataaaatttgatatttaattgcactaatagcaatatgctttattggtattttataacatttctcaacacaaaagtagtgttaaaatggcaaaaaaataacttactaaaaattttattatttttgctgtatttacggtgtttcactaaatatagttacggaacacttagtagactatagtgtaaccttaataattgtatttttcttttatttatataaattataatatcaattcttttacataatattttttatttattaaataaaagtaatatattataataataaaaagaacatactttgtattaaaatcatacaatttttgtgttggttcaataccaaattagtgtttttatagttagagatgtcctagtgaaatttatttgtagagatttaaaacatagttagctatctttttgaagctctcatggttgaacaagtgtaatagatttaagtataaatttatttttaacaagagaaataacttttattcaaaacagaacaaagatacaaaccaaagcaagcagccaaagccactgctcaaagcctcaaacaacaactaccagccctctatacaatttaaaacatattgtgataatgaactcttttgttacatcttaactagttgagacccaacactctagctttaacaaaacctttaatctccctactaattgccttagcagaacaacaaaccaactcgaaaacacaacagttcctattttttccagatcaaataaaaggcagcagaaattacagcatttacaacataatgacaaaaaccggctgttttcgtcgagcaccgttgcaacagctcaccaaagtctctaagccagcggaaacaacccagccagctttcgatttctgcaacaactttcttggtgaaaatacactccataaacagatagctatgcgactctatatccatctcacaaacaggacataaaacagagggaatgctcatgaatttactcaaatgatcccgagttaaaagttgtttattagaagcttgccaatagataaatttatgttttggtactaaaagtttgtgccaaactgctttagcatagtcggctttggcagccacaatcaatgaagtgtaaattttactcaacataaaaggactcgatcactttcttcatccatgtgagctcacaaaaacaaggcccatttttgcaccaccactgataagattcattaaaacaagtattacaagtctattatatttaagccaaaaccaatatcatcaggcagatttatctttgccatattaatcaaaaacattatgatcagaaagaaaaataggaaaatgaaaataacctacaaaatcttcagaatacatccttcaaatttggtatgtattattgctggtattcttttattacaacagagaaaaaaaaatatatatttaaaatccataacataaaagaagtccaatttgagtgaggctatatataattcactgctaagtaaacacatttgcttggattctccggaaccttaaaatgtgattgtggagaatcaattacactttacatatatgaacaaaaagtttactgagaaaagaattgcaggaagaaaaaaaaaatggcactatctgactgactatacgctacacttgaccattttaattacaaaatggtccctaatagccatatgtgcacaaggagacaataggcaataacaccaagtcttgcccttggacgactcattaagactctcccaccagataccctgcaatatcaccaacaaattatcatcaattttcacttctaatacatcttaagaccatgccaccaagtacttagcagagatgcaaaattagccaaaagggagccttaatcctgctcatggtccatgggaaaccttttactattttccaactaataatttcagttatcttcttattttatatagttggaattaagatatcacaataatagcaataaatgaaatagcagtaaaagaaagcttggatctttgtgtattccgctctctaataccaatacgagaaataagtaagaatctctaccaaattttaataattcttaccagattccgtcaactcgatctgcaatcaacctcccttgtcttggcacaagaccagaggtattaagagacttgaatatatgacctggcaaaggaaaaaaaattaagagaatatacttggatatgatggggtaaaaataactaaaattgtaaggtttgaacctttgtcctcatcagtttcttcatcggtgattaaacgattagtctctccatcaatatcaagagccagatggtcagtagacccctttcgcatagttcgtacatgggctgccaatggaacagatgatactgctttctttccaagtgatccctgcacaaatattaaaagagagggttaataacatattgctcttaacatttttaaacaaaaatctaatcacataatctagatacgaaccaagaaaaaaacacaaaaataaaaatcataaatttaaaaggaaaaaaaacaacatttgaaaaacaatgcagcatatatgtaactagagtagataaatataagctttaacatttaccacatcttcaacttcggatatttctggattggtgggcattgatgttccttcatacatgctcctttcctggataatctctggctgggtatccctaccttgaagtgaatcttctagtaacttaaccttcattgataattcatcaacatccttttggctttgcaccaacttgctaccaagatcctgggtttttgattttgaactttcatattctgatagtaaagtcataacccgtttctctaatgccaccagagatcccttaataacagaagaattttggtccttaatcaaactgtcacctcctaagataccaacaattttctccaaaccaaacataagttcggaaagttcatatctcatcttttctgtcgcttgttcatctgcagcgtgtttttcaacttcctccttcagctgctcattctcgagcatctgtgtttcaagagtcatctgtaggttttccttctccatagaaattgagatacattgatgttgcaggtcagagaaattatcaatgatgtagaagagcttctttaactgagaagaattttggagctctgtatctcctactttggaccctaccacaggaatctcaagctctccaatctttttgtacagagtattgacttgagatgctgacaagagggtgtctccagcctctgaaacagaaaaaatggaaaaaaaaaataacttattagaacgaatgattaaccaaaaggcaagggtagttgagaatgacaatggaggaaagtaaacagacctctttctttcttcgacaatgaattgtgcaatgataaaacttttgcctctctttcttttaacgccacctctttggcctgataatcttctactataagcctcagctcactacatgaggttctaaaagcttcaacatctgcctccaacttggaaattgtattttgttttagatcactttcctcaattgctttctcagaaaattttcgagcttctatcaaatcattttgcaaatctacaattgtagaggctgcaacttcagtggtgctctcaaaatgcttacacagagcttgaacttttctggtagcaagcaacatcatctctgctgctttaccatacttgctgccttcaaggttttggtgacccttttgaccagaggctacaccggtttcttcaatcacttggaagaaactttgtctcagtttttcaacgtcaggaagagagctaagctccaataaattgttcctcacctcgaattgtagttcactcgtagcatcagtacaagcagataataaagtcttcaaattattttctaacaaagcaatttcattatcttgttcttgtttatgcatctccaaaccatttaccttctgttttaaagactcaatgtgttcaaatacaaccatgacttcatcacttgttacctgtagtttccccaacaaagctgcaataaactcatctagaaaggaagagaaatgtccaaatttttcagcaagaattttgtttctcaattgaaatccttccgtaatcttattaaaagatgaaacgaggtcaccatctacaacactgatctcataattatccttttcaatattaaacatatccccaatatcatctggtatggagtttgtcgtatgtaaatcctgaaatgcatagtatagaagctaattagcaagaagaagagaaaaatgcaacaatagctcatgcttttactaggtgaaattataaagtaatttaagtctgtgttatggttgaaagatgcaaaacaaagtaatgcatacgcagatccacaaaacagcatgcatttaagaacgaagaaagcacttggcacaagaattagtaatccaaaaacatacctccatgtcatggttttccatcacttcaaaacccaaaccaccaaaatggtcccttatccgttgaagaatgatatccacatttttaaggccatcaaatttcttctcaaaccctttaattaaagacagcagcgtcttatcattcataagtacttgaacatcatgcagataaccagacagctccacagatttgctttctatgctgccagtagttccagccaactcttccatgcatgcatttaactttgaatttagtgctaatatagctccttcagcattcgccttctctccctcgagtatggagatattattctctgccctcaacaatgactcttccaatgactttttggttacatccatatctgcaagcttgctggcctgtgagctaacttcctcttgcagcttcttcatttcattttccaaatcagttatacagacttgagcatcattattttgttcactaagtaaagtaacatcagtctgagcctgagataatgcatcttcaagggatttcatggtcttgcgggcatcattattttgttcactaagtaaagtaacctcccctcttacttgctcaagttctgtctctgcatcacttctactaactaaagcactttctttctcactgatgatggcatgcatgttactttctgcaagagctaacgcctcttctagtgacttcttacactcaaaggcatcagtaaacttgctagtgagcaaagaagcttcctcgtgtgctttttgcaactcttgttcaacattgtccttagccaattctatctcccttttttcttcagcaagttgagatatatcattctttgcaactgacaaagtatcttccaacgatttaatagta

SEQ ID NO: 36811 - DNA, 2810 bp, Cannabis sativa
  modified_base (1480)..(1482): a, c, t, g, unknown or other
acataagcgtgttgtttttggctttgattcctaaatcaacagtcagctgtgatcaatagttaggtgctgatttgtgtaatgtttattttcctacttctttgggagaggaatggttgcatcaaacctcctggtgatacgttgattattgttgatgcgcaagatgctaatggttggttcataggtaaaaccgcaactggtgaaggttgaaatgttggagactattggtgtgatggaggcacataatttaataagagacggattaccttcttcttgtgcatgccaatcgaacttttttttctgatgatttcttcttttggttaactactagtctctctcaatttaatagcaatgttttagtgttatttgttaaatgacaagattgctcataattttagtgttatttgttaaacgacaagattgctcattagttggcgagtaactcttactttaaagttaatcctattattagtaggagaggtatattcttacaaatatgacaattttaattactaaagtctgcaacttttattaaaaaataaaacaaacaaaaaaccaaaacaaactatctttagactattcttagttgtttggtatgtgattgaattggattgtcaaattttaattttgataatgataattcatccttaattagtaatgttgtttgtgttatttaattctcttccttccctaggagaatttgcataccaactttgtactagttgaaagagccaacgaataataaatatagatgagaaaagagagagagagagataaattatttcaattttgtccccagcgtaccctgcacatgacatgattattgatttggtcaattggttcagcgcacaactgcccccaagtctcatctcatttaaatatggtcccttttatttttatttttatttttattttcttcctttaaacttattggtctctcaactcaaatggctgtcctcttctcagttcttaatacttacacactaagaaattatttgtttgaatttttaatactaaaggtaaaagccagcattagccactaccaaacttaatcacactcagaaattttgcttatctgtagagtttgattcccccacaccaaattccaacaagtaaagcagaaaagttgaagcattaaaaaataaagagagagatctgccatctttttgtaaagttttcaaacaaaggccatattgcactttcacaaaaggcagtgccaacccttcatctcacttcccctcttttattataataagaacaaaattggtggcaattcatgatctacctattttaacaaacacgatttagtatgttgcgccttttaatcgaaaataggtaactgtgtgaagttatattataaggggtcatgtgtatagttataatatttaaattaattatgtgtgaaattatatatataatgtacacaagtaagggttagttaatggggtatcttctcaatttcttatatttttttttttttttnnntttttttgaaagaacctcagttcggggtagattaactccaaaggatgatgggatttacagggggaaatccctcccctttacagttcgaagagctgctgcgagagtgacgcgactcattagcaagcttgtccacattggagatgaaacatctcttaacaaacatgaaattacaaacagtaaaagaagataataaacttaaaacagaggtaaaagtagcaaacaagtgccaatcaggacacttcttctgattcagagcctgaaccaggatcttggaatctgagacgatggatacttccttcacatgttggttgactgcccataacatagcataccttatagcctctagctcagccgccagagcattaaaacaggtgccagcattagagccccacacccaatccgcacttcctctggtttgaaacaccatggcacatccgaaacaccccttatcaaatgaaccatcaacaataacaacacggtcagttgaaatggatagagatggagggggctccgggagggacacctccatccgagtatgctggccaactttcggattcatttcatgaaatctggagaccacattggctaaagcccgattaatgcagagttgcacagcagagggggagtgaatcacttgattcctgtatttccatgaagtctcgagaatgatagctgagtagataaggatagtggttctcaatttcttatatatatatttcatttcacactctccaagcattctaattggttttacgaataaaccatgtatatcaagacaatggtgttgcaaacttggagtcagtgtggactcggtactacttgtgatttgaccaactctctctttctcttatttttttctccaatgcatacttatttctctttgttgtttttcaagtttgacaaatcaaccttcttataaaagaatattccttctaaaggtcaacaaattgttattatagaaagataatgacatacttagaagattctacatactaattaatcaaacatcaatataaggttcacaaatatgcaaatctctcctctttcaaagcgtaaattattttctcttttctctaataaaaaataataataatcatattcagttggtctttccaagtcttcttattctaataatagatttagatccaaatcctatttcatttaatctccaaaataaaacattagtacgataaataaagacctctttcactacctaagcctaatacccactttgaataacaagatagtcaacacttggtcaagcccttgtctcaatccaataaattgacaacgtgcattgggtcctgttctccattgttttttttcta

SEQ ID NO: 36812 - DNA, 3940 bp, Cannabis sativa
ggggggaatgatcctcacttaagattacctgccatatgtctcccatgcagttgcacgaagtaagtatgtagaacccattaattgcaacacggatccaggaattgaacttggttgcccacagaactgaaaagcattattactgctttcagatccattttcctgagataacacctgtgaacccataggtttctgtaaatttttaagccatgcagtgctaaaatgaccatcagttgtcagtgttgtatcttcagaagcaaactcggtaatcaactgagaacttgaccttagttcctgcaaggatggttaaaataggttgaaaaaacagagaaatgtaataagaaaaaggcaatgaacaaggattatcatcaaaccatccatggtaccttgcaaacattaattggtgatgttctaagcttcagggaagctttaggaccaaatgataacagaggtctttgcacatgctgtagaggacagtacagcaattccaagttagaaaatcagcagaatatacgttagaaaagaactcgtacagtggtacttgaactaagttgcagtagtaacttacgaacactgaacatgtgttatagtttcaacaaaagaaataaaaaatgaaaaactgaagttcagaagaagaactacagagaaagcctatatctacacaatggggtaacaaatttgttcttaccgtcaagtcaaatctagccatggctagatgattggaagccactaaacgttttaacttcaaattttcagctctcttcagagagcctctcaagagtacaaacaattgttgctggacagagagtgaaatgcctatgctggtcaaaggtgagtatgatgatcccagtatcccagttgtacttgagataccagtttctgacaacaagttacagatagcagctagagtgtatgccagacaaacatcattactttgctgtacaagtagaagtcacaaggcatcagactaggacagaagcatgaaggataaagtcacttgacttttcataaattcaatacaggagaatgagatcaaggatattaacaataatcttttagcacattcaattataagcttttaacatcaaaccaacaggtacctgttgagaaatatgaactgcctctgtgagtacctgttcaaacaacacaattatgaagaagtcagcttctataatcagactcataattagtggagaaaatgaagaggattttaaatgaattcatttccacatactcacctccaaagcttgctttgggtgcccataatgaaaatgcatcattcccaagcacaacaaagcaacttcatatctccctaaattatagcaaccagatacaggaggaacataatccaatccttcaatccctgcactttagtcccatcatatattggattagatcatttgaggtaaacactttcattaggctttccttttcttatttttttggtttataataaaatttatcagaggaagttataataaaagcacaagaaactggagaaaaaaacaagtgtcacaaagaagcacaatggaaatgcaaatcaaaactaaattgtaaattctacatatcaatatatccagaacatttcatatgttgatatgaacaatggcaagtcaatatattaaaattagcaacaaatgaggagaactggagaagaatagcatctttataaatctcatcttgatcccacataaagtagcatgtgcacaaaagcaaaaattcaatataccacaaaatgcacaatatcaaacaagaggacttgaaagtttccaaaatcatagaagcttttttgaaagaaagaaggaaaatactagaaagccaaatccacctagcatcaaactaaaataacctacaatgtccccattttgtttactcgtaatgccaacagctccatttaacattaaagatgctaagctgacaaaataatgaacagaataactaaagcagaagtagatcaagtaacatgttgatgtaacaaaaaacataacaactgataacctgtaatcaaaatagcaatgaagattctccaatgcagcaaaatagtcgtcatgataaaggctattcaaatatcgcaagaaacgaacctgcaatagaacccagcataaatttataataataatagatggaaaaatactttatttaaagagaaagatggtgtgaaagaggataaaagaaacattgagagaaataagcaactaactcaaaagtaataaacaaactcaatgagatacttagaaagataacttacacgatgcagcttaggtgctgacttttgaagttgccgcaggacaagttcaaaagcattcaaagagaaagagcctccatgcctgccacaataatattacttcagaatatataccacctaaactgcataaaataagtgagtaacactatgtttggtgagagggaaggaaggagggagaatttaggaaagatggaaaggataacaagtctcctttatgttgtttggtattagaagtagatttggaaggatagaaagatagttatttatcaaaattactatattgtcttcttcaaatatatattatttatgtttatgaagggtatttaggacatttaatatactttattttgtccctttctctcttccttccacttttggaaggattggattttgtacatttggaaggagaaggtatccatccacatttcctctccctccctctttcttccctaccaaacacatgatttattctccccttccaactctttccttccacccaaaaatccttcctgttaaacatagtgcaaactaaaataaacttaatgaaaataattagaataataacaaattaataatgtgtgacctttcaatagcatcagcttgttcttgcagaaatccttgtatctgccagtttgtgcggagaaacagagcagcactgctatcagtgtctcttaatgtatttgttggaggatgcatgtactggccaacttctctatccttgtcactatgtctcgaccttgggtcagcaggaacctcaatatctacacaattatgaccgttattaatattgttatccaatgttaaaatatacaagtttaagcctcaatattctattaaaaatctatttttcaaaatcctaaacttctaaacactaataaatcataaaaaacacaaaataatagtaaaaattaagggaaattatatctatatatatatatatatattcaaattcaattaaaagtttgaactagtaaactcaagtgttctcatgtcgtactttctaactaatgctatgattttatgaataaataactattctaggcactattgtttaggtccaatactaagaaaagtcacttttgttgcaccaaataatgtcattgtcaacgcaacggctagttttgttaggcacaacacttcaagcactctcaaaataagaataataaatcaggtgttagcctcatgatgacgttgaggcacctcaaacagagacaattctctttctgaatcctccaaaagagaaaagaccttttaaacgttgctattaacttgtcattagcaactttaattctcaagaacaagcttgcaaaagtaaaccaaaacaacaatgtagaagaagatgctattatgcagacaaaagcagatgtggagttatgtctactacttcttggaatgcctcctgaattctctttcaatgaaaagaatttggggcattttcaatgccagaaaaactaaatgaaggtaaaatagtaattggaggataaacaaaactattttgtaagaggcaattgcttcaaaagatgaagcctagtttagacattgtataaacctatatcataaatgttgtgtaacgattaagaggcgtatcatgtactgtttggggagaggaacaaaaaatgctgaagatattaccattcgaaattagaaagtgttctggaagctctcagaacgagtttgataatagtttttttttttttt

SEQ ID NO: 36813 - DNA, 5912 bp, Cannabis sativa
attaactccacctcttatatgttacaactatatgtaactcccaatcacataatattgtgattattacatgcatataattcccaattatattatatgtaataatatatataacatatcataattttaatcttaagcattatattatataataaataatataacacactaacaagtctcatgtttcctttcttattcctcaattttttaagtttgctgccactcaatttccttgaatattagggccatttgatccaaaaatgcaaagaaattcaatcttactcctttttttgctacgcatggtgtcaaccattttcactcatgtgtcgattggccctaacaaaattcggtacttgaatggaaacatcaacatatttaaaatatggcttgggctctccttttttcagtcacacttatcctttccttattgaagttatattgttaataatgcagtttatcttatcaatcgtactacttctaggttgcttaagatgaaatctccttttaagcttttacacaataggcctcccacttgtgatcaccttaaggcttttggatgtcttgcttatgcgtctactcttgatgctaagtgccaaagtttcatcctagagctaaggcttgtgtttttattggctatcatcatggtatgaaagcatatactttattagttgttgagtatcaagacatttttcattctcgtgatgtcatattttatgaaaatatatttccttcacacaatcagcattctaatgctagcattacagatttttttaatgactctcttttgccctatacaggctcaaccgaaattcaaggccaccgcaaaaatttgggtctcggcttgccccaacaagaatagctagcagctgcttccacctctaatgacaaagcgtcatcttctccgcatgttcaaataaccaaatatggtcggaactctcaaccacctactcaattaaatgattatatttgcattattgatggttcctctacttccacgacttaccctttgtctaacttcttgtgttatgacaggttgtctccttgatatcgtgctcctattttagccgccaatgccattttgctcccgctagctataaagaggcagccactattcgtgaatagaaccaagctatggacaccgaaatcattgctcttgtggcaaacaagacttgggatgtcattcctcttcctcccagtcaacattctataggatgtacgtgggtttataactataaacataatgaaaaaggtgagattattaggtgcaaagcccggttggttgccaaaggctatacccaaaaacacgggataaactaccttgatacttttgctcctgttacaaaatttaatactttcaaaatattacttgctatttcagcaatcaaaaattggtccttatatcaattagacatcaacaacgccttcttacatggtgatttgcatgaaactatttacatgcaacttcttaaaggctatacaccttcaggattcctttccaaaaattctgtttgcaagctgaataaaagtctatatggtttgaaacaagcctctaaacaatggtttactaaacttagcaaatatctcttatctaatggttttaaacaatcttcttctgaccatactttgtttatcaagaatactaataatgttttttttagctattcttgtatatgttgacgatattgtcattgcttctaacaatgatggtgttgtctagatttttaaacaaccattacactctactttttacttaaaagatctttgcccattacagttttttttaagattggaaataggtcgttcttcggctggaatttcagtttttcagtgaccttttacgcttcaacttctcaaagagacaggtttcttgggagctaaagttgtctctacccccatgtaacccaatatcaaactaagcaaggatgttggcactcccctttcggacccaaccacaaatcgaagacttattggtaagctcttttatttgttcattactcgtccagatatctcctatgctgtcaacactttaagtcagcttttacatgagctgcgtacccctcatttacatgatgcacatcgaattcttcactatctcaaaggcacaccaggccaaggcctaattttttatgctaattctaatcctcatttgtgtgcttttgctgaatctaactttaaaaatgtagaaccacaacttaaaaaattttcagatgcagattggggctcttggattgacacccgtaggtccatcacggggtattgcgtcttccttggtctcatggaagtccaaaaagcagccaacagtttccaaatcctctcatgaagttgaatatcgtgctatggctcaggccacatgcgaaatcacttggatctttgctcttttatctgacttaagcattcatcacaccagtccacctgtcttatattgcaacaatactacaaccatacacatatttgaaaacccggtgtttcatgagcgtacaaagcacattgacattgactgtcacgtttttaggtaaatgcttcaataaggtcgtctcaagcttcttcatgtctctataaaggataacatcactgacctcttaaccaaaccttttttcccaaatcagttttagatgcttgtatccaagatgaatgttaacaacttgtacaattcatcttgaaaggggtgtatttaagattgggcttttattatctgttttgggttgttttcagctttgtgtatataccatacttttcccattattgggttaattttaccattttcctaatatcttgtacaaaaaaaaaaaaaaaattcttttacaatgtacagacacaaaaaattaaaagtccccactggtctcgttagtgtttctcaaattgcttatgagaaaagtatgtacatgatatattggaagagagcataaatttagagaagaggtgaactacttgcctttagtattgaaaaattgaataactaaaagcacaagaactcatttagtttggattttttttttcccaataaagtttagaagcttttaggtgtttgcaactctagataactataaatattaaaaagatctattgtaatctcaaataccaacaaaagtgattaataaatagttctctaaaggtttggatttcattggaaaggaagaaaaaaaaaagattaacagaaaaaagaaaaaaactggacaaaaaacaaagaaggaagaatgggttttggaaaagaagacacaaataattttttacattatttttttaaaataatgacaacaaaattattcaggttcccagttatagggctattcttgtccttacatttcaattaacaaaggaaaattttatttacattccaaaaacttataaagactccccattttaataatctttatattatataaaatttatatctttaattttattaagtttttttaattttttttttccaattcacattcttaaaaaatatacctatcaaataaaaaataaattatattttaaatattatgacaaaaaaatatatgaaattttcttaaaaaaaaaaaaaacatagatacataatttagaaagaaaaatatgaaaataaaatcaaattaagtattgaaattaacttaaaataattgtgaggaaaaattttgaaaaaaaaatattaaaaataattttcaaaaattgtttaaatttattatttttaataattgagtatatttatcattttatagggtacaaataaaactaatcttaacaaattaccactattggatgccaaaaatctatattatactataatcgaatggcttactaatatgttgaggtgtgtaatccctcactaataaatgaggaattacttaaatggctatagttttataataaaaataatactttagtaataatttggagacacaactcatcagttttttttttttttctttttaatggaaggcaacccctagcagctatccacatcaaattcttcatcattggaagaatttacaaactccaaatctttcttccgaacctagaggacactgtcacattatcatcccactctccattaatttattgtatcaatttatatgcacttttaacaatataaagttggagaacacactaaatcatcatgacattgagtgatattcaaaggaatgctagaaataagagctctatctttatctttaaaaaattagcatgtaactcattatgccaacctcctccatttaaactcaagagacacaactaattaattcaattataagttaggagatataattttgtattgataatattccaaagcattatataagtatatgttaacttctcagcatattatatcaacagagtagaagatatttttacataatttgataatacatttgatacaaaaatgcttattttgataaatttttactattatggtaaaaatttcaggaagacatactagagaatgttcaaaaaaatactaagttatatttgataagaaggaggttgagtagggtgtatggagggagagtttaggaaggatggaaaaggatagtaattcttctttatattatttggtattaagactaaagatgaaaagatagagagaaagttaattttcaacagcaccatagaatcctttttaatatgtgttgaccccaaaaatttgctaagtaataatatttgggttgtaacaaaagggaagaagaataagagagctcaagaggcaatgcgggcaaggagtctcctccccttcaacgatgtcgcaccgctggagattagaagcacctcttggtgttgcgccactggagatcagaaacaatccacattgtcacgccgctggtgcctttgtgcaccatgtcgctgacatctccccccaagcggcatcatgccaattacatgcaagcgggagcgtgccacagagacacaaaatggcttcatgccacgccttttcaactaaaaaagacaagggtcttgccaaaaccatgtcccttcattacaagcaaacacaaggctctcctcaactaatcattcctcgttgtcaaacaactccgaacaaagcaatctctccaaaagacaaaacggtgttgccaccaaaagggcggtgcctctaaaagggtgtcactaccataagggcatcgcaattaaaaggtcgtcaccaccaaaaggttgtcacatccatgaagggattcccccaataacataattaacacttagtaagttcttataagtgttggaagagaagtcattagagatagaattaaatggaggacgcaagcaccttgtgatacaatgagagattctaaagagaatcaaaggcacatctacgaaaggatggtttagagggtataatctgttggattatattttatcaggacctaggtttactaacaagtatatttattaacatcctaaatatgaatttctaaaacaatgttatttaaaaacataaagtttgagtaaccttacattgattgcagtggaatataatgactgctcccactcagatctctaacccttattcccttctgtcgcagagtattatcaagatctgagtccgattctctttcagttttttggatttttcacaatcttacacactacgatagactactagacttgctatgggtgggcatgcaatcaatcactaaggctcaaaaatttatgtgaagaaaactcaagaatttaaatttagaagaaagaaaaacgaagaagtctcaagaactctctagttgtctgacaagttgtaaactaggttaagagtcattagtttagattatgagactatcctattctttttatactaattctcttagggttaggattgaattatatgaataaaagatgataaaataataactaaaataaatctatagtcgccgaccatgagagtgggccccactaattatatttttaccatttttaaccatttatctattatttcacaaatgccatat

SEQ ID NO: 36814 - DNA, 5902 bp, Cannabis sativa
  modified_base (3504)..(3513): a, c, t, g, unknown or other
tagttaaaataaatattattattaaggtagaaccaatagaaatttaattttttttataataaattagatattatttttgaataaaagtatttttaaataaaaattctacaattctactatatttctagctatgtacatctagataattttatagtacacatctagaataattcattattctcttatatgtgtgataattaattatttaattttatttttatcactataaattatttattattttttaaaaatttaaaagttatctcaaataattatagtatacataattataaaaaataattacattaaatattctcctaattaataccaaaataaataaaggtatatcataacaaccctattaagggtttactaaaaaattttcatatacattattacacacaccaaaaatgagaaatttaaagttagagtagatccgaccaataaaaacttatacataaaaaactatattatatacataacatatagctatagatccactatatggattggctggcaccatatataaaatatatataactgtagttatatatgtatattatatatagcataaatgttttcttatagaatagaagagagaagaggatagttccttcttgtttcgtatatgtatgtgccattggtgccatgcaactcgtaaaaaagcaaagaaaaaagtctttaatttgggaataaattttccacaacttaacccaagtttctcgtgaatcctttccatttcaccgcacctactctcttttccccactatatttttctctacttaaatattatacgtacttataattcaactcctatctcaaattcaatcacagccctccatttccatttcctactacactaatcaaaatcaacggctacaaatgcatgctatcattgctacctattagctactagcttcttgttgtgatcatgattattaataatctacaatgagacaattttgtggacacctttaaccgatcctttaaataaaattatattattcataataatgtacgtacgtttaattgtcaaaatacattactttttttttttttttttcaatagaattattggcatcatattcaatacaatcaatattttattacatacatttcaaaagaaaaaagtatacaatatgatacgattttggtcattacattccaattgcaagattattatgatagatcataacgtataatcttgcttaatagacttatgtataattagtggagttttaatttgtgatttcatcgaagacgttttttctttcgagcaagaaaggaagtgattcgcaatagaaaataaaattttgtaagtgagtcctttctaaacctctattttctttagaggatgtagatttattcaagctcttaaatattatgtgtgtgattgaaatttatctaaaaaaaaaaaaacactttctttttcttttattttttgagttgattggtcttgattttttaacattgtttagggcatattgtaatagagaaaattattttattaatttgtagaattacctaaaattatagtttaatttcataatattattactttattgattaggttttgtacaactttagacgatttttgttttttttaagatttagaatttctattcaaacatacaaataatatatcaacttatgttttatgtttcatgtaacatcattattgttaggtattttaaaggaacactacaaaaaatgattcttatgagtagttagcaaatttttttatattacttttaaagttgaacccaatgttattcaattatattaatataatgatatatagttaattattgtagtatttttagtgtttattgaaaattttgaaaattcaatatgataaaataagaactaaaaaaatatatcaagcgaatgaaatagagataaatttttttacgtggtttgagtattaatgaactttagtccacgagtcacctgtattaggctaaatatccttgaaatattacactaacgttcttcacgagctcagaaaccctagctctttgctatagtattttcacaatgaatttttaaccccttgcatgagggtaaaaggtaatatttataggttaggatttgcgtatggacatacatgttacttgctagggtttgcatgtaaatttggcctactaatgtggtaaatacataaaatacactaactttgggcccacggactgaagctcaactccaaggattgttatttcccgtagggcaggggaccacatatataaggttgacaggtgtcgtgcgtgcgctgcctttgcgtattgtagtatcagagtagtggttgtaagacaataaagatgttccctttggtgatacgtgcatctgacacaggggacaatcccttgatacagtgggatttggtgttagagaattgtcgtgtcagcttcaacttggcttttacggtatctcttagaaagccctcccagatgtatcctagatgctgatcatttggaggatccttattgcttcttcttacttgggtgaggcgcccttatggattcagagatatctagtttcggatgtaactatttggtgtctcgaatggtcttaacgcccatccttccaagttgtcttggtccattatcttattagggctactaaacaagccccagttgattaactttgaattcgacatgccacatgtctccctcccgaaaacataaataacatttatccccaagcttctagaacttgagggttgcgaaagcttacaatcctctatctagtttattatggacacgtaggaaattcggaaagggaatgatccttccaacttctgccttctttcattacaaataactatggatctttgaatctcagctagtggattacatgtggcatcaacttcttggtctgtgaacttcatatgtgttgtgaaagcgcgtgacgcttaaggtagcatgttgatggctaaattatgttagcactcataccgagcctaatgttacaattgaaaatgcctcgattccaatgccacacattaaatgttgacccttctgctcttactgttggattaactttgtattttctcaaatttaatttgagcctcttatcttggggcacaaggatcgtcacctctttccatataaatagggagaaacacttcggttcaccacttttgctcatactttaggttcaaattttctaagagagaaaaaattgaaaattacccttggtgaacgtccaatctgttcaacgattatcttcacattcttctaaccatgagcaccaaccccagacctgacggctcctcctctagatccatcaagatcgttggatttctaggcagagatcgatagattgattgcttgggcttgtgagcttcaggccagactttgtcgctgcgacttttgccttaccctcatccttcgccttcatcaattaagtgttaggttttataacctaaaagcctataaatatatttttaattattaataagagttgaacattttgttatatgcatgaatattaaattattaatannnnnnnnnnaataatttatatataaatatctaaaaatttcgtattcatacatgaaactgtgacttgtagttgtacagagaattaagatcacttagccagttagccgtgaataaaacagtcagcaatatattaaagttaaagaatttttaatatgattacccatgaagactactctagttgagacattgtaatacttttttgcactcttttgattgccccaccactccaacacttccgttgtcacataaaaatttaaagcataggtgtttaatggaggtaattgctctgaaatcgactaggaccgaccaccctaagataacgttgtaggtagtgggtactacaaatgtataatgtttgaatgcgaatggagtggtacttccggctactcctccattcaatgtatctaggagctggatcttcctcattggcagtagagaatctccattaaagccctgaagtaggatagggcatggcatcaaatcagcttcagttaacacaattgcttgaaaaggcaaacttgaacagtatgttgaatgagatttcattgttcactagcactttggacacaatattgttggcaatttgggcttccatcaccaatggattattgtgtgggaagtatacgtacgttgggcatcctcttctgtgaaggtgatgggttcatcatccgtggactccaagctggagatggcactagagcacacacttctccctcataatcttgctcattcatatatcttttttgggcattacgtgtactttcaacaatatgcggtctctagagatagttgccacatagccatccatgggtggcgaaggcaaccctggtgggtatgggttattgggtcctgagaaaggactgtcgcagtagcatgcacatttgatactccctaaagggcctgaatggctgaggcatgtatcaccagagccggtagagccggaggtcatattttaagagcttgagggaggcccataccctgtagaggatttacaacccctactatccgagaatcacaagctatttgtgagctataccttgtttgggatagattatggaaattcaaacccaatgactgaggtggcctgcttgggctaaagttttatctcgtcttttaaataatcgcattagttgataatgtggtcaacatcgttgtggtacttgcacctcttgctttgatctttcttttgctcccctcctttgaacatttaagatagttttctatagtggaccatattgcaagtagccttataagtgttaattaagttggtgtattcaatattttggttcatactgacttctttctttccttggagcctctccccgactattactcttcttcttttcttactccgcaaataacttacattcgattctggggcttacgtttttgttttttttttagagtgaccctacatccaatttgtactaccacatagccagaaaaattagtctaggtaggcacgtgccctgaggatgtgggttcgtagactgtaggagtggtgtactagctagtagcttccaactatcaatactgccagggctgagaattgtagagtaaaagttgtgctgttgacaggtgaagttagtgctggaacatttttgaaagcttgaatataagcttccagtgtcttagatggtgttgaggcccatccttctaagttgtcttggcccattatcttgttagggcgactgaacaagccctagttgattaatttcgaactagatacatatcacgtgtctctctcccgaaaatacatataataattagcatctctctttacaaattattggtgaatgtagattatttttttggggagaaatgatggtgattttagacttgggttatttatttattcttattatatattttatttcaaagtgtagacttgggttacttaaaaacacccaaagtgaccaatggcatgggccttgagttaagcaaccctcaatttatgattcgtccacttttttttctaagagaaaagttatatgcatactaaatctatgttcacgtgacaatatatagtagtagtactactgctaattataagttctaatcaataataccaactaagactactatgatatgttatacgtggcacacatgcaactatattacacttgagtgacccacccataaccacccaactattattatgagtttatgactattacttttactaacacaaatcaatcacttccattaaccatatcaacccaaaaactaaatcataaacatagtggccatttttatagtgggccttcctaagaatagtttcttcaatttattttcggcattcattagttttaattttatgttttttcatatgagaatgcatattttgttacatatatatatagggctggtttgaaacgcatgtcgtattgtattgtatt

SEQ ID NO: 36815 - DNA, 2876 bp, Cannabis sativa
gtaaaagcatatgtatgtaacatgttgaagaaataagaattcaaagtgttggtagattgttgtggtaatcaatgaaaatcttattgggtccaactctttaatcttcatgcatggtacactacccctaacaagggtaccagatcagatcgacaattccatgagtgagaaagagagaagaatatatacctcttcgatcttttgtatttgctttcattaaaggggttcttaaggtgaattgattatatgtgcatatatgtcttcgtttcccatcctttttgactcattgattcaaaaaatttactatctttttcaaaccattattttataagtttaaatagcaaaacaattccacaaatgtatgcaaacgatgggtatttttaatgattagaagattatgattcttccatataaacagctttccgtcaattatgacattttattaaaaaaatatatataactttgtatatgtaaatcctcctatagtatctttttaagaaaaagctatagactttagccttatttatatgatgaatgagtttataacgcaccgtcttgccaaccatgatcgttggatcgatgtagttttatggtcaagatatatggggattttggaacatatgcaaagatgatcatgatatggcattttattatttttcttttgattcttgaaactgattctaactaccccttttattattattattatttcatatttgtatagtcatttatatataattaacaacttaaaactccacatgattcttgagaatggtccacatatgaaatgcgtacggacgagtcactctcactctccatgcaaaacataggtttggtgcatgcatatatattcttttaacccaaagtgtcaaaaagaatttttgactcccttggttgctttatgtttccgttttccttcccataattaacaaccacgttacgccaaaatattatttttctttccactctcagaaagagaagaggtgcaataaagttgaattatagctcaaaattcttaaaataaaaacactcatttcaaatattctaaaatagagaagaataaaactaaaaacatacaccaggtactctaaattctttcattctaaattctaaagcttcttcaaaaattttaagactactaagtttatttttggtaaaagatgagaattatggatccatgaactcaagctctaataagttaccgtaaatttattttcaaacaaataatctcactggtttattaatttctcgtgactctattatactcaaatttacgctcttaaattcataaaacgttttacacaaagtttaaatatgttatccattgttataaccattatccattgttactaataaaacgggtataaattaccattttacccatcataatgtattttatctctaactcggcctaaatttcttataaatgatatattcattaacctaattacagaaataaataatttatcatttaacacttgaacctaactataagaaagccatcatttcacctcttaaataaaagttatagattttatgtctataataaatactccacttaattatactattaaatatttaatatgtaagtataagctaatctgtaggataagtcgataacgagtaaatcaagacttaaatactacaattagtagaataatatttactcagaattaagatcgacttgacttacaatcaacgttgtgatatgatgagctagtatgagctagtctgtagggtaagtaattaagtatgacctagtctgtagggtaagccaataacgagtaatttagtcaagacttaaataatacaattagcagaatattaatcactaagaattaagatcgaattgacctacagtcaatgttgtgatatgattagagaagatataacaatacttaagtatcttattaataattaatatcggtctaatctaatgtaacaaaatatattcaatcatattgttcaatatcctggataggatatgttatacacccatcttttgaaaaataaataaatgggtcaggtatctaggttctctatgtacactaataccgctataactgatatgttatctaattgacaaatcataatacatgtatactaaacatgtgcatatgtgcatctgttatactaaccttaccttaattttgtaatcaagtgtgatggtcaacttaagtggaaaaagtgttcaatgatcgaaagccctatatcacagtaacataaaactggtaattaagtgtctattctaaaaaaaaactttcttatacttgtttagaatctagtttttttttttaccaaacgacatggtaaaaataccctaaaataacatacacattttagatataaattacataccatattgtcttttcacaagctttaaaacagtatataaaatgtccaaaatagacactcgagtaaaaagttatggccaaaatacaaaaattgacctttcccaatactatccaactggacttccagttgatatagccctgtaccaatcagacgaacgattcctggggagtaagagctcaaaaattagaaatttttaagcccacaaaatttgctccaaactttcccaaatgctaccaaaatttccaaaacacaaaaacataacctactaaacatgttccacaactcaaacaacacaattaaacaccaaatcaaaaataaccatggatgagtaaagcttgagttctaaaactcaaactcactcaaaactactacaacgactaaccttcaaccaaaataagttgaattctcactaaaaacttaaaattaaacaactcataacatcaccacaactaacataatcaatttagccaaaaatcacaaaattctaactttaattcaacaagaacttaggtggcgtttggttg

SEQ ID NO: 36816 - DNA, 5112 bp, Cannabis sativa
ggtgatactggtgagtagtggtcgcgaaaagttaggaggtctgagaaatattttgaggaggtggcagaagtaagaagaagaagaaaccaggggttctcggatgattgcagaagaaaaagaaaagaaaaaagggattttttttttactttttcattatttttgttaacaaaaataaataattttaattatatttaaatattaaaaattaggtggaccaatcaaaacataacatgtgtacatttaagtacatataaacaattctccttgacatttaacagcaatttactaacaaaaaggataaatagcataacaaaagtgaagtttggataattttgccgtcaaacaattaatttatgtaattaagtgtcacaaattgtataattcaaatagttttgtcgcgaatatcctataaatgaaaaatatatatatatatatatttgatttaaagaaatatataaaaaaaatatttaaaataattattgaaattaccattaaataattatataaaaagatatatgaagacagatttttcaaaattattttttaattttttttattatatatataatattggcctgtgtttgtggggtaaataaaacacccctaaaaattcccacataaaatacttcagtgcattttacaaaagatgaataaagagttcaccgcttttcttttttctttcattggtacagtggtttctactctcatcaagtattagaagtaccacaaatttagattgacaaatattcacttgaaaagattaatcacatcctcagcaacaaacaatatatacctcaggtattaaggatgaaagtattaataatagtaatggtaataataacaataataagcagctaagaaaacgacttcacaacacgagataccctctcaaagaagatcgggcacatgcttgtactgaacataatgacctccttcatccactgtggggctactctctcaaatgtccccaaagataagacattgtatagcaattcttcttcatttccatctgccttcttgacccatgtcaagctaaacgagtaacctgttaaaaccgtaatcataaccattaattaatgtactatgccaagagacgatatgtggaattcttaaggaaaaagatgcttgacagtaaatcgtgttcgaacaagcatgagagactaaacaatcaaaaccacaaatgatgacaaaaacaggatatggtatgacaaggaacttgctgtgtcctgcaaagatattagctaacacccactatggttgctacaaattttgttttacgtattagtagcaagctacaaatgaagtggacaaatacataatcagaagaaatgtgagtgcaaagctaagaaagccaaatgtgcaggacatgtaaaacataaatcttagatagtttgacagttaccacttgattggtgctctgctgatatggatattccttcactttgattaacagagaacttcatgcccaccaaatactcaacaagggcttgaaacaggcaactagaaacatcttcaacgtttacatcaccacctggaaaaagtaaattatgtatgaaaaaaaaaatccaagaatgtactaaaccggttattataagatagacttaagatccgacacatacctgatttgtcagtaagtcttctacaacattctggctgaaagattgtgtaagattagaataagaaagacaaaaaaaatcaaagatttgctaaaaataaaaagattaccagataagctccctgaacattctcaacagccttaaaagacaaagtttctgtatgcaagtcctttattgattccttttgcatagcatcatcttgaccactagcatgaggagcagcctctcctgtttcattaacagaacacctcctgcgtttactactccttgtcactcttctgtttgagctgtcatataattctcttgatgtaatttgagtgcttcctggtgtactcagttgcctgtgatttctgtactctttactgccaaatgtattctcatgttgcagcttttgcagcctcacaatttcttcagaaagcgctttatctgccataaatttgagcacacattgaagaagtattaaattaaaaaaacaaggctgtgtgaaataaacacaactttccttttttttttttctttcatttcaaaaaaacacaactttctttaggtgccactattgtaagtagatgttgtaaaaaacaacagttgaatggaatatcaaaatgatattctatgccaattttaggttgcacaacaaataaaggaggggaattatgtgtcctgggtaaaggtgaaactattatataagcattttataattagacaaaaggaaatcctagataagtccacgggaaagtaaactgatgttttaactgtataaattttgtataagaaaagagttgtctcagttttgaatatgatacgcgaacacacttccatgtaaatgcacaaatactttcttcaacccatattaagcaaaatcctggcaggaagaaaaaaactagcaagtcttttaagatttaaaatttacagaaccaatgaaagtgaaaatatcatttttggataaacataaatcagtttggcccgccagtagtataactttacaaatgaaaaaataatccacaaagaaatttatcagccacaacagaactaaccaatagaattttctttataaaaaagatattaatgcgggcgcactttcttcaaatttgagtggctttcttcatcatatataaatgcacttcggacactgtaatcttatatttcactgaaattttgaagaatgtgtaattacaaaaaatatcaagcacgactaatttaaatacccagaacgacttactcttctggctctcttccatccagagtttctgatactcagcacattgttcatccttggaaaccctgtaaccaatgaaacaccttgttcaagagaccacacttaaaatgcatcaagtaatgattgaattaaatcccatcaaaagggaaaacaaaaggaaaaccaaatgaatttaggattgcatgcctaacagaagcaacttcacttctcagttcatcaacttgagattgcaatctctcgttttcctttttcaagtgttcaactaactcctctgtagctgcaaaattaaaattcaaattactaatcatcagaaagaagccttaaaattcaaggatagtttatgtacagtaaaacaaactcaacactaaccatgtgtagcatgaatttacaaaaataattcaatagattatttgaagaactaaataattattgcattattataggtaaaaggatataggagtacataccagatacataattcacaaattttacttcttgatctctattgagctcatccagttccgtaaatttttttgtctgtaaaaaaacaaaaccaagtttcagattcatagaaagtttacacattttggcaggctatcatttactatgaaaatagcgacttgtacaagtacttctgagacttttaacataactatgttctctaatactgaaatttgaaaaccaatccctgaagctataagagataacaaatgaactctcttctgaatgtagtttagcaacaactactaaccaaaacttatcactatgaaaagaacatgaaagataatgcaatgccaaaatgcctaagtgtttcatatgcctcataggttcattaagatttaagaagttcaaatgacaaataaacttatcattttctcctcaccatgggtacactgcagatcatcccacggttaaaggaaatagtaaatttgcatgttgtgagcatgctctgatttccattccgaagtttggaagcatctcacttgtaaaattcactcattcatatacatcagaatatggtaataataaaaatcacatctacacattttatgcaacacaaatgtacatgtaaaaatttgcagcaaaaaaaaaaaaagcacatgtaaaaaggaaaaaaaaccttaatgaacagtgggaaataattaaaagaagaaaaagaataatgaggtcaattacaaggaggaaaagaagaagaaacacttctccgacttcttacataaattgatttttaaaattttcctaacttttgtgataactctaggtccccaaaacttatttcaaattattcttaaccttcctccccttttatatatttatttattttaaacccaaacaaaggaaattggatccctctattttttttcattcttccccccaaaaaatctgtgtgaaacaggggcaaaaagcttgggaaaaaagtaccacgatacaaaattcaggtgaataaactacaaaataaaaaacttctaccaaatttccacaccctgttgtaaataattatagtcttcgatcttttttttaaagaaaaaaaaaattagtctttttaattttttttttaatatatatataaaaataaataaatgcatacacaagaatgatcaagcttataattatatcgaaatgcaggacaaattttttaaaaatacccttcaatagaagtctaaagcttgaaaagtaccaagttgaatgcaaaatgttgatggagtagaatgacattgtaaatgctcaaactaataggaaattaagccgcataccttgattttattgtacttatcgtaaagcttagagtagagagcctccatctagaacccaaaccagaaaatgaaatgacaatcaattccaaattagagtgggaatcaagatgaccaatacgactaattataatagagtagaaaaggtagaaaagccctagaaaaaactgaagaaaaagaatttaggcaattttaacaccttgaaaagtgatgtaggccatctggctggcgagaaaagaaagaaagaaaaatgatggtaccttggatgtctccatggagtggcagtaaagcgggaaaagcgtgtttcgaaatgttcgtgtcgtgtgctgagctgcgaagcgatatatagatgaacgaggggaactactcagacggcgcaatcgaaagaggggatcgatttctcagaattgcaactcagtcaggggcattataaatggtgcaactcagacgagtaatgggaagagaggatcattctttcatagacgggcgtattgggtttttttttttgaaatgggcggattgggatttt

SEQ ID NO: 36817 - DNA, 9650 bp, Cannabis sativa
catgttcttatatatggctcaattctctaccatttattccatgtgggacattgtccacaatacatacaaatatatttcgttccatggcaagaatttgagaaaattagagttggaaagtttaccatagagagttcgagattcatctgttaagaaagtatcaaatgatttttctccaaacaatggatatctataattagtcccagcaagtaaagttgttgtgcataatgaatgagattgatgatgatgaagttttttcgcatagatatactcctcagagttaaggagagaaaactatcgtttgtatactaaaccacatcgtattggggatgaataatctttgagtctaacaaatatttcaataagtatgtcttcgtgaaaattttcaacctctttataacatatttcaaaagtgttgatattgaaattacacatgtatttcacaatttagattttattaaataaaaaatattttaaaaataattatatagttttattttcttaaactaattattttaaaaaataaaaaataaaattgaaatattgtttgaataacaatgtcctcttcaatcgtcttgcatgtctccataatttacctatcttcataaaaattataataagcttatcaattaatctctttcaaaaatattataaattaactcaaatttaaagaaaaaaaagaataaccttgaaattcggataaagaaaaactaataggtttgtcaaaggaaatagcaaatcgttaggtagaaaaaaagaaaataaatagtatattgggtaatttaggtttctatacgattttttgttgcaatttaggttacagcgctaattgcaataagagtttctacgtagaatttcgtaaaagtgaaaaaaaaaaactattttaagtgtaaaaataaaaaaaactcatatatatattttgaaatagtcctttattaaaaatagatttttacaaaaaatactagattttgggtaaaattttataattttactatcacataattttttacaaaaatactatctttttataaaataattgtaaaacaataaaataaaataattaaaacaacaatagaataactaataaacaacattgaaataacattaaaaatttaacattatacactgtataaaacttatataaatttccacaaatttcagcatgtggaggggtttttacaaaaatcagaccaagacgaatgggcccgatcaataaagtccacacacgatatgagaagtgatacataaagcaagcccaactagaaagcccatggaaggtagagagggtagagtggtaatttaacatacatgtaactctctctctctcatctcaaatctcaaatatatatgcggaactagggtttacactcatcttctccaagaaccctactttcttacagtcagcggcgccaagaggaacaaactgttttaggtacaattctactcttgttttcatcaatccaattcaattcaattgtgttcttccaaagatgtgtactttattgtttgtttagttggtttctgagaaaatctatgtgacctaattaatctgcatctaatttctttcttgtctggatctggttgagtcccatttacatattttaaacaagtacaagatttcgttgatgaaattccaaatgtagaaatggtgattataatttccccatttcctgttttttttttttttgctggtttgaatcgcagagttcgttcccaagcaatcgaaaatggtgcagcgtctcacttatcgttctcggcacagctacgccaccaaatcgaaccagcaccgaatcgtcaaaaccccaggtttttattttttcgtagacaagcccatttctttgtcgaaatgtttcatgaatttctgggtgtttctgggttttgcttactctgtacttttccgataatttaggagggaagttggtttaccagaccaccaagaagagagctagcggcccaaaatgccctattactggcaagagaattcagggggtatggtgattttttgtttttcattgttattgaacgaattgctttataatgtaataatacctttttgattgagctttaatatggattcgttttttaggtcatgcatgataatgctaatgtacttatttagtatcaatttgctatagtaggtttcatagctatatatatacgattacaaccactatattgtaagttttgcttaacgaacacatagggtatatttatgttctaggaaccgaaatgaagaatttggaatttgggttttagacttgtgtgtgtttccattgctcgcatttgaattctgtcctaggaactgaaatgatgaatttagaatttgggtcttagattgtgtgtcccattgcttgcatttgatttctgttctaggaagtgaaatgaagaatttggaatttggaatttggaatttggactcgtgcatgtgccatttcttgcatttgacttctgctgttttagctttttggtgtttagtttctgttttattatcatcttattggattgcgacttttcctttacatccacaacttgttaaagtctaatttatggtttgttgcagattcctcacttgagacccactgaatacaagcgctctagattgtcaaggaaccgtaggactgttaaccgtgcctatggtggtgttctttctggaagtgctgttagggagaggtatgtaactattaatcaataacactcattttcctcccaattgttaagtctaagtgtctcttaacaaatccattttgttgtgcaggatcattcgtgctttcttggtggaagaacaaaagattgtgaagaaggttttgaagattcaaaaggctaaggaaaagttggcagctaaataagtgacattatgttgctaagagtgaaattttgacttccttttaagtcgactattcaatattggaacaaaatgtttaaatggttttactactgtattctgtttgctacttaagttagtgcaaaatttgcagacaatcaatcttttgaaacatggtatttgtagtagtttgatttgatttccaagttatagtttgttaaattcttactgatttggttttgcttcggttttcggttctacgtatttgttgctatgattttgtttgatatttcctcaggcttaatgtttttgaatctgcctactcaaactttccatcccaaaagtttggaaaataccattgagtagacctttaaaaacaagcaaaatagtgttcattacatataatagagaatcaataagataagtggttagaactgaaaacatgaacaccatgataaggcaaatggttaattgcaacttaattacttttcaacatcattacacagttgtagaaatcttaaattgagaagcgctatagaagagaaatggttaattacaacttagttactctttaacataaagtaaaaatttacaattttactgttaaacaattttttttttaaaaaattacactttatataaaacaaccatataaaacttacactatatttttaaaacatgtcagtatgtgatgtaaaaaccactaaaatattagaggatgcaaaacgattttatacataataactctcatctggatgttttgaaatgtattgaccagatttgtacttatgcagagctttatgatgttttcttgtcttgccctacaccaactttgaggaggacctggaggccaccacctcaggattggataaaaatgaattgtgatgtcaaggtgggcttagaaagcatgtgcatagcggtggttggacttctgggtagagtggttcggattcatacggctcggttggacttctcggatgtgttatgtggagaagtagcgacctgttgtttagctgtttcattgactcaagagttaggttataagtatgttttagtggagagtgactcgagaatagttatcaatgctcttaatgggacggagtcactttgggcgcttgagaactatgtctccttttgttctaagtcatctccctcttttatttactgtaatttcgtgtatgttagtagaacttgtaattttgcagcccataatgtagctaacttgacttttattcacaagttgtatgattctattccagcctcctcagtttcggaagaccttttatgtaataaccgtgagtctaattttatttaattaatggaacggatacgcttattttttttttttaaaaaaaataaataaaaaaacaactaaaatattttcactaccatttcctaagtaaagtacaaaaaattcattagagttgtcgccaactaacctaactttattatttatttttgaagtgactaagttattttgttacaatcaaagaccattcatcaaagttatatcattttttacaaaatgtcttaaatattacttttgtttaaaaaccactattttctttttcgtgaaaaattcacaattcagaacctgttttgcaaaatgaatcaaatttctatttggtcaaacaaatataattcaagtgttctcttccccaatcgttataggcacatatagctctctctctctctctctgagacttacccattacaagacaccataattattttggtgaacaaaaatctctattatattacaaataaacaaaattgtgttattaactacaatcaaatttccctctttttattggttttttctttctttctttcttttccagcaaaaattgctttttgttactttgatatgtaacttgttatgaatcacagccaactactaaaacaatcgacttcattttttcttctttttcttagtgagttacaacagcaacattgaatcaacaacttcttctgagggactctgcttcttcacacatctgtttgtgaagtcgggcttttctgctctttccgatcggtatcatcatcattatcatccccagttttttcagcagaagcagttccattttcggctgaaggcaatttgccattctctgttgtgcttttctcctcttctccattactgataacgggtttcgggagttctcttgacgaagaaactgtaagaagccggccaactccttcgtataaactctttgcatccatgatgagagcagctccaccagggtaacaacggccgaagcatgtcgcacaatgtgggtaaacaacctaatgaagtatgaagtaatggtttatttagaataagaatacagaataaagtttaatataaataaataaataaataattttatctcattatgcaaggaaatgtcattttagtaaaaaaaagaaaagcattctattggaaggtcattccgatattttaaattgcaatcaaacaaagaaataagaaatagatacacgaagtgtaaataaaaattagtcatttaggcaggagtacctcaataaaggcccggcaaagtgagaggaaaagtccggattcgttttctctaagcatccgagttgtattgtacctcaacaaagagtcggaaacagtttgcaatcccttgattaattcctgggcaagcacatgcttcaaacttattggggcacaagggcgtaattcgttcattgctgcagatacacctgttgcaaaacacagagagaatagtaaattcaatcaatcctcttcatccatggagttgcgacaaaattaataaacagagaaaccatttttccatttcaggttaatactataatatcttgtttatctcctatggcttaggaatcaattattttcttttgcataagcattggaaaaagattaacttcatttttatactcaatcatcagccatcgattactacttttgctaggagttacctaaataatacagcaacataagaaacaaataccattgacaaaagagatccatattgacaatacagagacacagctgagaagaaatattgaatttaccattgacaaaaacagcaagtggtggatgctccataagataagatggtggagaaacctcatcctgtgtatcttcaccggaactacttaccggaaagccaactgttggtaaagggacccaacgatgggaatccaagactaactggagtaacagaacacttaatatttagatcagttcatacaaaacaaaatgaagtcatcttcgtgattcaatactgatctgtatacttgatatttatactaaaacaaatttgaaattttaccactgtctagttacctgaaagttctcaactgctgtactcatatttttcgaaaataagttgagcactgccctgcaatgcaaccaaacttgatgtttagaataggaaatgtacttttaagacaatataggggtgaaagatacacccccatcttaagaaaatgaaccaaaaggaagtgagaaaaaggtaagaaacctactcttcaaaaagagatggaagcaagcctcgaaaatctagtccaacccaaccaaggcccatcgcacaatactgatggtaataaaaaaaactaacaatgtcaacataaatactattttgtagcagaatgatcaaataatgttattataaatatattacatacatacgtgcacctacagtaagtttaaaagataaaaactattaacataactacattgacatattttcttgtagtaatatgtactttccatcaaaaaatccgcgcatgtagaaaatgactcgaaagaagatgctcaccatgcattgatccaatatatttgacagagatcctccttcagttatctttgggagcatgaacttaagagtcttgaggtgtgaggtgatctgatgcatggcccaactaaagagaagccccccatcatagttttcttcacttcctgatgtgtcatcagcaaatattgctcggtactgattaacaacatcaaagagatgcatccgatggcagtttatcattccctttaaatactcataagcatttctttgatccagatcctccagtattccagtaagccatgcctcccggcacctcaggaactgaagaaatatttgccagataaaatcttttaaaaaaaacgtggctagaagagcatgtgatgtgaccaatcttaatacccaaaaacaataaacatgcatgtcacacacttatcaccaccaaatatgtactgaaattgtgccttcaaaaaacatatatcaattatagtcatacctgcaaacgcatttcatactcactgaagactccaactcgacgcaagtatccaataatccgtaaacactctggtaactgcaagaaataaagttatacatccagaacgatgcataaactcctaaactgcatgcttagatgaatggaacaatttgcttgtatgctcttataatttgatcatacctgaatgttagaacgaagtttctgaagaagctgagaaagaagagactgagtgatatgtcttacttctgcagccagtgcctgaataactggtaagctatgagggacaaaaggaggatagagagagaggagtaagcctcatgttatggtcaacttgacaactcgtacaagaataacatgaacaagaacaactcacttggggtgcatagttgaaagttttgcaacaaatgcttccaagtcaagagcttcatcaaagttcccattccttacacatctgaaaaaggggggaaataacaataatgcttctattaaacgagatgctaaactcactagaaaattcaaaaatgccttcttacgaaattgagaaaaatttcccatgcttagtggcattagtaagaaaaaataagggttgagaatttttttttttcggtgaaaggcagaaagaaaatgccaaggttggataaaaattattgtaaatcaagagagacaatacaaagaattcatagtaagattgagcgagaataagaacttagggaagctcagacagcaattagaaaagaattaataaagatggaagtaaattaatagaggaaacctaaagaaagaaatagaataataaggagtgaattcaagtaatttattgattcatcataatctaccaataatcaatgagcatatacagctaaacaagaaatggaaagctgcacaggaaactggcttctgaaaaaagcatacaaaaaaactaatctactcatttgattgtaaaagaagtaaaaaaagaaaaataattgaccatatattccttaaaattcactacctagttctccgatcaggctttatctaattggttttacaaaccgactttctaagaaataccaactaagattatattcactaatcagattcagtagtagattgtctatctatgaaaaataaaatccacatagttgacataataactagaaaaaggagtacattgaagctttgaacaaatagaaatgtcattatatttcattaggatccccataaaaaaagtaaactatttaacttcaacataaaatcctaacaatatagtaagatacatacgtgtccataagttgaggaatttcaagtaagtcaagcaaagtactgtgatttgctagcaaaatttggttcatcttcctcttttccaaaatctgctctgcagattcaacgaactccgtacatccagatgtcaactttggaatctcacctatctacaaggaaaacaatttattaacctaaatcctccataaccaataaaatccatgaaaataacaccataatttcagctctacccatctaaatttcacactttcatgtaattagtttgacaaattacactccgaaattccaacgcagaacaatgtaagtttttttttttttttttacaataatgccaccaaattcacataacaagcttaattttgagaactaacataccatagattcaagatgcttatcaatggaagatacttccccacgaatcgcgagcaaggcatcagcagcagcaataaaagcacggtaattaccaacagcaacctcttgcatttgcctccgaattcgctccgcatcgactcgaagaagctcaggctcctgcaaaattcaaatcaataataatcaaactaagatcacaaaaatacaaaacatagctgataatgagagaaagagtggagaaccttgtggagacgatcgagagtgaaggagaggagttcggagacgtagggttgctgagaggcggaggcgagagggagaaggccgccgacgacggaggaatcgtccgccgcattatcgaaatccatggaatgagattggaagggtttcggatctggtggagttgtaatcgtttctctccgaagccgatctgataattcttttatttgagagcttagttcatggaactagaaaaactgttgaagttatttatttatttatttattttttactgaagttgaaaaatatatatttttgaaaatgtgaaaacaataattgcttttggaaatatttttgtttgtaaatgttttaatcacttttgcccaagtcaggatttgggtcaatagtctgggttcgagaccgtggtcgggttctggggctgagtacgggttgacatcaaggtctggggttcgggccgggatctaggtcggggttggggtttgggtttggagtcgggtaggagttagggtcggggttgaaagttatattttttctattttaaaaattagttttgattctcaactaaaaaaattgaaaagtaaaaataattttataaaacataattttggaaaataattgcaaagaaaaatttgtgtttatgttaaaataattttataaaatatgtttttagaaaataattgcaaaagaacttaaactcacaataaatatt

SEQ ID NO: 36818 - DNA, 2956 bp, Cannabis sativa
ggggggggggggacgtagaagacagactgagatggtaaccagttttgacagagtaaactcgtgtttttgaaggctcctagatcagctcatcactggatgggtggagaggaagggggatggaaagtatctcctctacaatatgagaggggtagcagctccttaggagaggaatgtcccaagtcatattagacgagataaaggaagctaccttatcaggaacagggttaagaggggtgacctgacaaaaaccagggatccaacgatcaagggaagtagaagtgttttgcccattgccaattttagtaatgaggcccttgtgcagcaactcttttccccaaaaaatgctacgccaaacaaacgagggagaatggcccagagaacagtttatgaaagaagagttttggtagtacctgactgctaagattttggacatagttgagtttggatgcttaaggatgtgccaggcttgtttagccagtagagcctgattgaagtggaccagagaacagaagccaagccctccatcttttttggacttacagagtttttgccaactttgccgatgagtctcagcccacaaaaagttagccataatggattcaagggagtgacaagtggccacagtgagacgaaaacaagccatagaatacgtggggatagcttgaatgacagactcgagaaggatttctttgccaccttttgagaaaactttgtgcttccaattgttaagatgaccccacactttgtcatgaaggtaatgaaggacttgtttttttgttctgccgatatgctggggaagacccaggtatttttcaaaagaggttctgacagggatctacatgaaatcagaaatcagagtctgctccctcaggccaacattaggggagaagtaaagagaggattttcggaagttcactagttgccctgtagccctttcataaagaccaagagcctctttaatagtattgcaggaatgaatggaggccttacaaaagaggaagctatcatcaacgaaaaggagatgggatatggctggtgcttgcctggcaactttgaagccggtaagagcccgacttctttcctgctgctggaggagggaagagaatccctcggcatagagcaagaaaaggtaggggaaagagggtcgccttggcgaatacctcgagagggagttacatggccggagactttgccatttacattgaattgaaaagtggccgtcgaaatacaagcagagatgaggtgtatgaaacgtgaagggaagttgaacttcctcaggatggccaagatgaaaggccactcaactctatcaaaagctttagccatatcgagcttaaccgccatccagcctttcttccctttggatttaagctttatggaatggacgacttcctgggcaataataatgttgtccgaaataagcctaccaggaaggaaatcactttggttggaagatataaggttgttaagaacaagcttaagcctgttagctattgattttgagataattttatatatgatattgcacaggcttatgggtctgaactccgtgaccgaggtaggctgtttaaccttgggaatgagagttacaagggtggtgttaaaaggggcaatgtccccatctccattaagaaagctgagaaccgtagtcaggacatcttttttgacgagagaccaatttgctttgtaaaaattggaattgaagccatcaagaccaggagctttgtccagagggagctgaaaaaaggctttctcggtctcctcaaaggagaaagcttcatccaaaaaggatttatcaatttctgacagaaagcggtcaatgccttccagtgcaatttgcatgtcaatacgtgaaggattcgtggatgtgaaaagagtgcgaaaatgattttcaatttctcgcgtaatgtcttcgttcgaggtgacaatgctcctagtagacgaatgaagattaaggatttattgaccttcttcctatgagaggcgtggcggtggaaaaatttagtatttctgtcaccttgggccagccattgggttctggctctctgtttccagtaggtctcttccttgtaaagaagggcatcgagacgggattggagatctttgatatttccaatcgtacgatcatccaagtgggagcaggatcgggcgagctcaaggtctttttcaagtctactgattcgttttttgaactggaagtcctttttgtggttccaagcattaagttaattagcacaagtggcttgggttgcaagaagactgggtatggcttcttggtgaatagtggatttagtccaagaattttccatggtcttcgtccaattcgtgtccgtgagccacacattttcaaaaagaaagcgtttgtctgggcgtccaggagtagaagtgatagtactagaggtaaccaactcaagggcgcggtgatcagaaccgaagaagccaaggtgggtgagaagggcatcagggaaaagatcggtccaagaagagttaacaataccccaatcaatgcgctcctgaatgttttttggtgaagccacattgttgttccaggtaagcaaaggacctttcgggtcaagcggggttaaattaaaggaactcagcagatgtctgaattgaaaggaagggcctctgtcgggattactgccttgtttgtcatcagaagagaggaaagcattaaagtcgacgatgacaagccaagggtctatggggttatccttcccaatcttattcagaattttccaagtttggggtctatgcaactcaattggtgagccatacatgatgtaaataaattaaaaaatgactttcaattttacaatgtaaatatagaatttataatagagtataatataagaatattttatttaaggaaatatatttctatttaaagaaataaatttctatttaaggaaataaataaataaatgatattttgataaaagaatattttatattc

SEQ ID NO: 36819 - DNA, 2224 bp, Cannabis sativa
tatgaaagtcataaatcttggtagaacaaaacaaacaaagagggcccagagaaattgttcaaaaaaaaaagagggcccagaaaaacaaaaccatggcagaaacttcagagtgctttacagagcagagaaggaccaggctcactataatttaaccattttcttactcaccccattttgacaactgaaacatatttttaggaaaatagtttttattctttttttttttaaaaaaaaaataatataaatgttccttcaaagaaagtgatttgacatattagttagaataaaagtatgcatatactgtagctgtacagattctcttttatagtcaaggtttttgttggaagctgtcctttttcatttacaataataatattttatgtataagccggttggttagctagaccaaatttctgttaattcagctaaaacgcaccgtttaatttctgctttacagagtaagaaaagaatcaaatcctcgtaggaagggcctaagtatatagaaaataaatgagaattattgtcagcctattgtatagactatagatatgaccatatgatatgagtaagacttccacagctaaagaagtaagaaaaatcaaagtctcccatggccatgaagctcgatgctttaacttgcccttttctacattaaagtatttcttatttctttttcctttttctctttttttgactttaacatatgaattgttttcatatgcaaattaagcctaggtagcatattggaagctcaaatatttaccaccccaagtttttttttttaattctataaaaaaaaaaagaagaatttattttaatttaacttatttaggtagataaagttttcgtatgatttaagcaaagatgtgtgcatttcgaaaacaaaaaccaaaacaacctaacatgtgcgaagaaaaattacagcaatttaaataaaggttgaaatgaatcaatacattgaaaacaacagcgtcacaagttcataactgaaaaaataccaaaccaatggaacacgtgtcaacaatctaacgatcaattaagtcaaatgtagatgaatcctagggtggttattaagaaaagaaaaagaagactaaattccaaactttctttatgaactataagaaccgccactgtaactccttactgggcgaacccagaaagaaaattaaaaaattaaataggcaaagccaaaaagtaaataataattaaaaaaaaaggagaaatgggtgataattatgacgccaccattgataaacctctcaaataaacagaaaaagtgcttcgttttctttctctttctctttcttcgagctttagctttagaagaagctacacattttccgatgagagccggagaatatagttattcgtcggagaagtgagttttttctttaggggattccggcatgaccgaaaaggacgttgttccgaggacgtttcgcgcgttggtggagagcgcggaccggaagttcgctagggttcgtgacgtgcctgcgtacggacgggtccataaccagcactacttccagaaagtgttcaaggcgtacatgcggctatggaagtaccaacaggagaaccggtccaggctcgttgagacagggcttaaccgatgggaaatcggtgagatcgctagccggatcggccagctctacttcggtcagtacatgaggaccagcgaggctaggtttctcgtcgaggcttacgttttctatgaagcaattctcaaccgtagatactttgagggatcaaaaggcttgggtaaggatctgggtgtgaggttcaaggaattgaggttctacgccagatttttgatggtttctttcatcttgagccgtacggatatggtgaaccatcttttggaccggttcaaagctctcgttgatgagtgtaaagccaattacagggtacttaattttattcaagtatttatttattttgttttattgttgaatgaatatcaattgtttgtgttgatacttaaattttcgaatttcgattcctccgtcttcttctttcttcccctaaattcacagtcagagcatagttctgataccaaagttcttgtagtgatagttactgtaattagatcggtataattttgtgtttgtctataaacatttcctggttgatagttaacagcattttattttattttacatttttctactaacttatttctttttacgggtaattgtgatttttgattttttttttctttttcttt

SEQ ID NO: 36820 - DNA, 3402 bp, Cannabis sativa
gccttattgggcctaataatgttgggtttattattgatttgtctgacttacatatcgagcttctcaaatatgtcgtaaatattaagtaaatttttacctctacaagaacctaatttttatatgacgatttacattacaattatagtcgttaattgctttttcttaaaaaaaaaagtaacaatactgacaataaaatttaaatagttgattcacgcatgtaaaatatatatatatatatatttatatgtgtacaaccgaatgtttgaattcctttttaagcacaatatattaatctaaatttttcaaagtgtcgccaatctcttattacaatcttttaatcaacatccatacctaaaaatacataccaaattttttgttccaattttttttcatggtagtgttcgttatagttacaacatcttccttgtaaatttttaaaaaatttcaaataatttatagtgctaaaaataagtttaaatttttttgaacatgtatgataaactaaaatatcaaaaattctatttttattattgtaaattattcgaaatttttaaaaaatttacaaagataatattataactataaagaataccgctatgaaaaaaaaaaatattccgacatgtgatttcaaacctaaaaattattatgaaattataattagtactcttcataaattatctatacacattgataatcatagttataaaaagaaaagtaataatgaaagaaaaaaggtgagtttgcatattggcaaaatgttgtagtcatggctaacatttacaaacgtcctaatcaaaatcaagtttgaatggtcatggatagtgtttgtggtgatggtagtggtggctataatcaataatataatactatacttatacaagtgcactagactaatacggcactagtacttagatcactcatcaattgatcattttgatcagtttcaattcaattcaattcaatggtctctttctttcaatacccttcttctacttacaactttttctcataattaataataataaagaattaaattcaaatcatcatcaaaaactattatgcagtccttgttatacttctcccccattaaggggtaatctgttttattacaaatattaatgccatgaccaattcaaaagactttgacccagaaatttcaaacttttttatacacttcattaatgtgcagagaatgtaacataattgagttatatcatcaattaagagtggaagaacaactgaaatgaactgactctgtttagtggattttgaactgaaaaatgtacaataatttcaaattaattataaaaatcatcctcaaatggctgcaagttgtcattttttttattttctattctttctagagattctttgatctttggcttcctatttctatagcacatcagtttggtttcaatgaaaaaaaaaaaaggtccacacggttttttttatcccttgctacaaccagtttcccactaagaccgctaagagtaatcttatataatatataaatatatatatatgtgtatgtatatatgatcctaaaattcttgctatgtttccactatcaatgactttaagcccttcaaattggtatgtgttaatagtagttttgagcttttgagtggaggaagtttgagcccactttggacaagtgtcattttcctcttgaagaaaatgtgttaatgggcatatccaagaacaggcttattttttgaatttgtggagcatatttctataaatatatatatatataaaataaatatatatcatgttatggggtaaaggaaaacagaggcaaaatttgccactaaaatcaaagacatgtgccaaagtagaaagaaagaataaacattctctctttaaagctttcttcatttgagtaataaataagagaatttctaaaaagtataattattgcctagtactttctttggtgtcatactcatataatttaaaaaaatagcttttagaaaatataaaacgtcacttataaaaagtgctagacactactggtgtcccaataacaatgctcaataaataattcacattcttacttctaaccaagtaacagtaataactgtcgtttaaagggttgggattatggaaatggaacatcaaaaaaagagtaggtaaaaagacacaaaacaaattttcaacgataactaaatactgttcagctaaaatttaatcaaagtaaaagatttaggtatgtaaacaggcaaaaaatagttagaacccttaagaaaagatttaggtgtgtacacgtggcactaatttatagtatagtttattctatattcacataccaaccaacagcattatcctaataattaactacaaaatggcaccaataattaattgtcattctctaagtctctggaaagtcctgctaatttagttgaggtaggtttggattgaccactttctaatgtagtagagaatgagattaggaagcatagtgtcattataataatagtcttttgcttagacttcacattatcctaaaacaaattatagaccataattgctaattaaaatatacttattttatattaaggcaaatgtaagaattaacaacaatctcttctagcaaaacatgtaagaacaaagacccaatatagatcacctttaactcaaaagtgattaactgattatattgtccgttttgggcctaagctctcacggttttattcttggacattttcccgaaaagcttcataccaatggagatagtgttcatccttatatacctataattttttctatttctagctaatgtaggactttagttgcaaatccaatacattcatttaggcaaattaagttgagacaacaaaataaactaaatgtcttttttaccaatttaggaagggattcagttatcacttactactgttggcagtttcggactcgacattgaagaagtcttgaagcgcaatcatcttaatggtgttagtcttcaaactcttgattgccaagaaccttgtaagctagagccattctcctcagctgtcgtccatcgatctgatctaatgcatcacctgaacttgtgattaccattaacaggatttgcccatttgataccatatcaccagcatgtggtcgaccctctcgtgcgactagaactcgttccacactgggatgcctgataattcaaggacatgagctgttcctgaagttgaaacaatcttaaatccgaggccttggaacgcctttataatcctttccagatgaggttttgtcaaatagtggtggcaaatgcaatgggaaattcataatcaacatctcgggccctagtaatacatcacaaccttgaaacttttcgaatggaagaacagcttcctttactgacatgtgagcagggactacctcttttgtgaaatttaagtcataaagaga

SEQ ID NO: 36821 - DNA, 3737 bp, Cannabis sativa
taattaattataattattagataaataattttgacatttgtaggattgaaattgaaaaatataacattagtgaaataaaagataaaatgttgaataaaatagtaaaattctaactaatggggtccactatgtatggtcagacacttaagcccttgctgatttcattctcaaatttccaaatgaacaggtggctttcatcactgaagaccgagttaatctgaaggtgccaccagacgcagattggacctcatacgtagacggggcatcaaatagtgaaggctcaggtggcgggattatattgataagtccatgcactttaaggtttgaatttagcgcctccaataataaagctgaatacgaagccctaatcgttggattaaaactcgctctagagatgaaagttgagtaccttgaagcttttagcgattctcaaatcgtggtttatcaagtcaatagcgaatatttggctcgaggaggacgattggccaaatatttctcttacaccgatgagttgttgtctaaatttaaaaaagttattgtcagtagaataattcgtgcttataactctcatgcaaatgccttggtccgactggcctcaaccagagaagcaaaattactcgatgtaattcttgtagacctattagcccctccaataattgatcgcaaagaagttatgcaaattgatgttatggagcaaaccacttggatgacctaaatcgttacttacttaaaaactggcaaactccctggtgataagctcgaagccaaaagattacgttatcgagttgctcgatatgtgatctatgatgataagctatatcgcaggagtttcaatcagcctcttctcaagtgtatcaatggggatgaatgcaattatatccttcgagaagtacatggaggcatatgcggcaaccatactggtaaaaattccttgaatctaaagattatgtgacaaggttattgttggccaactttacgagtagatgcgattaattttgccaaaaaatacgacaaatgtcagtgaattgccacgtatgtgaataggccactaagccattaaaattctatcactagctcgtggccattcgcagtccggggcatagatttaattggtgatttactaaaggaaaaaggaagagttaaatatgcagtggtcgcagtagactactttaccaagtgggttgaggctgaagccttagccacaataacaccagtaaaactacgtgagtttgtctatcgagcaatcatttgtaggtttggtattccttacaagttaatttttgataatggaaaaaaaatttgattataaagatatgcggaaattgtgcaacgatttggggatacaaaaggctttttcagcagtcacatatcctcaaagtaacgggcaaactaaagcggtcaacaaaatcattaagcataccataaaaggaaaactcgaggagtggaaaggtgtttagcgagaagaactaccatatattttatggtcatacaacacaactcctcgctccacgattggcgaaacccccttttcactttcttatgggtgtgaagccatggtcccagtcgaggtaggagttagatccttgagaagagatgtttttaacattgagagcaacgaggagaatcagttactccaacttgatctactagaagaaaagcgtgatcaggctcagatgaaaaacgcggcctatcaacagcacacaacacgttattttaactctaaggttaaagaaaagagtttgcgagtaggagatttggtgttgcgaaaagtcatgcccaatacacgtaattctacgcatgggatttttggcgacaattgggaaggtccttacctaatcattgaaaagattagaaacacaatgtagcggtcatccgatctcaatgactcagtcttcgatagagcctagaacgaagaatatttgaagtattattattaatagtacctatatgtatatacttagtcaatttatctatgctctaaattatctaagtataggggtatatgcatatcttgccattgtactattgattatccaatgaattgttaatttttgaaacattaaaatttttcattttcttcgcaattgtatacttagaaattttgtaaattttttcactttaaatatgaacatcgaaatgttcatatatcgtcacatcaagctgtgaaggatggttacatagataaaacaacaaccatatgaatatgcgtttaaaggcatcaagttgtaattataaatgcataaaaaattcacaaggaatataaaaatacttagaagcaaaagagtattcctgaagaatacattgttcttacagagcaacataaaaagataaatataaatgtcttaaaaaccaagtacaaagcgtgaatacccttgtattgctcaaaaaaagtttgaagaaaggaaaaaagattaagtagcaggggcattgagttcttctgcgactttattagtgacatccgtgacttcagcagtatttgtgacctcagcctcctcagggaaaaggctccctcctagtccttgagtcttagtaggagatatggtgtgaaaagcattagccatctaaacagcctctggactaaaaaatacgaatcgaagtctggcaacttggtcagggtggtatagatgtaatcaaaaacagcctgatcataagctttcttcgcattttccttttcagcctcaagattgtgaataagattaacgatctcttcctctaacttcttagtcttctcctctgacttcttggccttctcctctgcctgatttttggccttgctgagatcctcgacttctttgtctttggcaacaatgtctagctttgccttcttgaagagttgagttttgtttcttcagaagtttaaagtcattgagacccacaacggaagcccgcgagtatacattcatgaactgtgaggcaagtttgattgagcgagacatgagatctttgaaaggagccccctcaactttcgcgacaaaattaccacttgcgaacctttcctacaaagtaatgaagtcgtgagctttggttgtgggctctatcatgacctttttccctttgtcctgggtgactttctggtgtttctttgacaaatcaacctcgagagtggtggtgactttgctcttcctcttttgaggtgtcgcggcagagggagtcgcaatgttgaccttcatttgcagttaaaagagggagcttgcttcaggaaagtcatatctacgaggaggtacaaagaagagcaagaatttgaggagttaaaagagcattatcaataatcattaagttgcattacctgatacttgtcttgaagtctgtttggaaggcacttgtctatctttttcttttgtttctcagaaggctccttgtatattggttcttgctggagtttagcgtcgactggaatcaacttgtgttcttgcaactttgcagaagtacacagtagacgccagtcatattcttgaactggaaggctgctcaacacttagtgatttccacactatttttgtctaacacatattgagttgttctatctgcatacatagataaatgttagcatttacaaaataataaaaataatagtcgtgtaaaaatacgcaacgtacgaggtcagcaattgaagtttatcctaacccctagcatctcaaatgtgcaaacccacttcgacttctaatctcccataatagaaaccgtgccttctaccccattaaccttagaactgtccctttttctaaagcagtagaagc

SEQ ID NO: 36822 - DNA, 2547 bp, Cannabis sativa
aggcagaaatcacagattatgacgaactactaatcacagatccgcaacatcctgaaatagaagaagcacaaatatacaaggacaaaaaacaattcaaagtgtgcttgggttctatgcaattagaaacaatttccaattcaaagtgaaaaagtcttgcgcaacatacaaaatttgttgtttggatccaaaatgcaagtgggcactaacgacatctagatgaattcaacttcttttctgctcaaattagctcccactagctcacttgaagaaatgttaagacaagtcagatggaaatgatgcttgcacgaaatctttgtcttaactcaataattcacataaatatttaatttttgatttacagagggcttaaccatggattttgaggattcccaaccaatcttggaattcattaatcttttttgtcgaggaggatgaaagaaaaaattttgctacctgatgatctaaaatctttaagtagcgagaagaaaaactaccagagctctcctggatactatataggtgtgtggaatattgtgaggagcaaatgaggggtgttatctatttataatagaatctctcctattcctaagtccattaggatttcatctaaattcaaaaaagtcaaaaaaatcgcgcaattttttattttttcgaaaaaatttcaaagtctcccagatcaaagggaatcactcaagacaacctaagataattttcagatgtcaacaaatgatgtctgataggtagtttcaaaggaaatggatggagttcaaaactaacttgagggcaaatatttacccagaactagccctaatgatgtggacatcatttttgacacgtggcaagaaggaaaaaaatcttgaagcctcgcatttcaagaaaagataatcaacttgagagttgagccctagcccagtgcccaagttgacataaggggcatctgagtaggtatttcccacaaagtcgttttcactatttctaatgtatcgtccttcaaaagtctaagcaaataagaaaagaagactccaaaaaataggccaagaagttgagcatgttacctcgacatcccaggaatcaacatggtgccatgggccttgccgagcaccctagatgacattttgtgctctagaatgcattagttttggtccccgaatccattatctttgtgaaaacttctcaatctttgcactctgacacatgagagacatgccataagcaagctgcaagccctagaaccaatattggaacactttcggtttggagtgccggagtaactgacgcctaagttgacaatctcagtcaacctaggaagcatgatagctagggcttgggttttcaagaacttctttgcatcttgattcctcaaattcaacaaggaacaaagctaggacttgagtttttgtaaactctacacatggggacaaacgctatacccagcacctaggttgacatagaaggtcatctggacaccgagttatcaactaaagttttctgagtaacacccgtgcaaatttgaggaaactaaatgtatgcaagtactttccaaaagaaagaagaccaaacactagaaagacgagttttgggtatgtgcaacctggaaccaagcgcctaggtttacacaacctcactcctattgtaggcattttctttgttttcatcaacaatgaagatacaactgctttcaaataacaaacgtggcaagaatccctagccaacgcccaaattgacataggcactagcttcaactgcccaggttgacattcaactgcccgggttgacattcaatatggtgtgcgtggttttgtttgtcaaatatcaattttgtttcgggaattcttcatattttggttccaaatgggggaggagacctcatgttcacactaaaataagatcaaagtaccaaaacaacacccggaggggttgggaacagcttcgagcgcccaagttgacgttcaacctaatgtgcatggttctacatgttcaatttcagtttcatcttgggcatcgggctagttttccatcactaataagatgtacaaatgttggcaaatataattcatagtttgatattttaccttacaacaatgtagaatatctgcaaactattcgcaaattgggtagccgtaaatcacttgatttcgcaaactagcaaaatctctgaaaactagagaacgactttactagaatcaacaaattagttaaattatgcgacaatatcacttaaacttttttaaatttggtttcagcacaagtactcccaacaatttttctactctatcctttaaaatatattactaaaatactattttttttattattttacatcaaatttttacaatacacatatatgagtctattttttttttatattttctccatattatttaaataatatattttaatatatataatatattatatatattaataaaaatagaataaaatataattaaagtattattaaaattaaaatatatttaaaagtagaatagtagtttgaaaaaaaaaatactttaaaatagagaatgaatttatatcatttgttgaatt

SEQ ID NO: 36823 - DNA, 5402 bp, Cannabis sativa
  modified_base (4791)..(4797): a, c, t, g, unknown or other
  modified_base (4942)..(4958): a, c, t, g, unknown or other
ataatattttagtataaattaaagtttaacatagtattatataaaaatataatatatataatttaattcaatacaatacaatagacgttccaaaggagcccttcataaataaaactctatgattagttagcgatattgtttattttattaagttataagagatccgatacttaattgcaccaatagcacaccaaataaagtgctagatacattttaacaattctcttttaataatctaacaattgctatgctaagatagaagagagttcaaaagtactttcagctctgaattacacaaatcagcagaatacaattcaataattcgtaaaagaaaatacatggaatacaataataatacagaaatattacaggaattttgaaccaaaagaaaagcgaatctgattaggcatcgggaagatcagggtcccatagcaaaagagaaaacaataacagattgggaagtagaataggaatgaaagggttgatattggtgagaagaggtttccttctgagtcttttcccgaaatattgtcttctctgttcttcaccccactgagcttcttcaactcctttggccagaatcaatggcggtggctgaaggaatgggcatttggacctccaagaagtctcagggacaccaattctggaaacccttttcaggaacagggatataccccatttcaaatcaagagatgggaaagtttttgaatatttggtacaaaggactggtgggtagtcccagtttaggtagcatggtatttgggtggagatgaaaaactgtgagtgaagagatggtgaatttgtggggcttgttaggacatgagttagggcatgaattctctcttcccatgttatctcttcgtccatttctctctctcgccaaagatggaggtgagaggttaagacaagagaagttggataatagcttaaaaaaaacaagagattatttaagattctttgaattaaatcccttaatttgtaaaaacttatgcaggcctccttttgatgatagtgagattgatttagtgttagacatatggataatactctccaatttttttaatcagatttgcccagataatgttttggggtatatttagacttttatttttattttagctacgctactcttttgagcctttgaaatgtatgatttccatttgacattaaatccccaaacaaatggacaagtcttgtctaatttttccaacttatttttttccacactacaagaaaatattaaatggttaaggatggaccataaccaattactttcaagtttcaccgaccctaatcaataactcttaaattgttattactaccacttgcttctgacatcaattgaaagatttaaatttcagtaaatgattggtttagttaggatcattctatccaccccaaatcagaattaggaacattaaaagcagagcgaccaatgtcaataccagttaggtaacacgtccactgtttcattacctgcttaatatattatctacagtctactaacaacagctgagattagtgaagtggttaagctgccataatggtatcaaagctcaaaagtcaagacaaaaggggcaaacaaaactaatacatgcacgatatatttagctagcttctactctattacatgtaaaattttaactagtgaagattctagtagattcatatattgtaaaagaagtacactaagtcaaacttgaataagtaaaacctataacagtggttgagatccttattttcaaccagtaagcatccaattacatcagccagtatccctatttaaaccttttcaaataatccaagctagcgcagctgtgacgagagtagtacccaagcactaaatattgggaaagtaattagagcagaagcctggaaatttgcagataagaatgtgttaccaactaaaaaatgaaattgttaatgtaaccaaagttcaataaacaaaacagggaaccacttccacttgatgacataccatgaaaaacactaattcccagttggcaagagccgctgtaaatttgttcttctccatttcgcgtttgatgaagcgttgtaactgcagtaaaaagaaagaattagataatctaattacatcatatcataaaattgaaaattggattaaagcaagaaaaataaaactatcttttcatgatgaaaaagtggcatagttgttactgcaaattgacttcagaatcgacacaaaactgttggataaacatttttgctttcaaaaaagatcaattacatgcttaagaatcagagattttgaaagtacagacctcatggtgatattctttagccactgcaaagactcttttagactgaagtatatacgggtccagtatttctaacccattttcaagatgaccgcccaatactttgtttatgaactacaaaccacatacaacttgattaaaattaaagatttaacatctagttgtcaagaatgcgcattttgcataattccaggataacttaatctaaattaaagaaaaccattgttatgaaatgttcacttacctttaagaatgagcatctagagtaaattaagctcctcctagctttcaaagtccgcctctgttcaatgcaattgaatatagagagcttaaaaaaagaagaaaaaaaaaaacattcctgaaacagcatagtatagactatgaagttccaggaaaatttatcataacgtggtaacaaatggcgaaatcatttgagtgagatatatacttcagcaatatgaagagcctgctcaagttgctgaatttgaatccattgttctgtaacaatgtcagccatctgaaagcaaaaacaaaagaagtgaacgacaaatttcatagtcatgaccgtttcttaacagttaacaggaaataacaaaaaaaatcaaattgagcaacaaccttctcagctttagaggcaacctttttcaatttttcctcagcctcatatgctttagactttaaaacatgaatatcaaagttgttgtttcttgaagaagcccagagttgtgacacctaagtacccccaaagcctacttctcaaatcagctatgcttattgatataaattgaattggaaaaccaacatcaaataaaaattaatttaataacagcaattgaaaagtgataaacctcttcttccaatgccttaatcctttcttccagtgcattaatcctttcattgctctgaaatcagaatcacatatatgggtcataccataccgcacaaaccagttctgtttaaacattcatatgcactcacctatacatatacatatatgttcatatataaggtgtattaccttaaaatttgagacagtagactgcagaagctggatcttatgagacagttgctccacaagtttttcctgttcttcaatgtgaaatcctctttcattcagaatgcgtattatttcctcatgtcttgactctacattaagatttaagctatcaatcatttgattcatttcgtaagttataaaaaatgaaattgagattgttttttttttttacgaattttgcagtagcgttaaagctcatttctcattttccattgaagctgaaaatcgagcaatatgaaagcaaggaaatggaaatagaagtaagacctaagtgagccatgttgagcttaatctgctgcaaatctcggaagctgtcgttctctgaaatcgtagtcgtttcggagagagcgaagaggggagaaggaaaggcaggaaagagaaagaagaagagtaattgaagggtcgccatttcttgagattgggagctgttctgcttcccaatctctggtttttcacagacccctatcggatcgagatctctttccccggcagctactttggctgcaacgacggcgtttccgttttttttttccttacggtaacgtgttttaaatatgtcgttcgagtcgttttacaaccgacggagaacactcaaaacgacattaagtagtaaggaaatgtaaaaaaaacgacgcgacaatttataccgaaaacacaaaaaacactgcgtcccatatcaacaagtgttcatcaccacacctcatggcacatgcggtttgaaatttttgacggcgcgcttaaagtttatattttcgtcaaattatattagtgtagtttttagttttaaatttaacatatcttttttatcgtgattagcattttttttttatcgtgattcgcatttttttttttcatgtttattcttttttcttttcttatttatttttttacgaggtcaagttctttagaaaatggagaccgctcactttgtgccggtgagaggaggatgcaccattaggcacttaaaaagttttttttttttttttgataaactattgtcagatttcctttttgtttttcttttatttattgaaagttaaaaaagtaaaagtaatataaaataatattaattaaattattttatttttataaaaaataattagattagttatttaaaaaagaatgagagatataacttgtgaatatactcacttatttttttttttttaaaaaaatactttacttttattattttttttattttttttcaataatatttacaaattaaatctaacattaaaatattgtcaaatacaaacaaattgtattaatttcataaaaaaatgttagatcgaattaatttttatttttatttttactcatataaatacttatgaatatttttaaggtaatgtacaacttatttatgttattattttatgtatttttttttcaatatttattttgagctttgacttaatttttagtgtctaattaattttcatataaaagttnnnnnnntatctaattttttgttagttgttatttagttgttcaacgaaaaaaaaatatgtaagcttaatttttcagagtacatatatacttttgagttagtatataagtattttgtaattgttttaaagtttttatattattattattattnnnnnnnnnnnnnnnnntattattattattattatatttgtgagatattagtgtgttgttttacaatttttatttttgttgtcacaacatgatgatgtatattaagtcgggttgttatacagttatttgtgtgttgttattagttgtgcaaatagtagaaaaattaaaatatttagtttttttttcataagtacatgtattatgattgtttttgtgttgtgtttatatttttttaaggttgtcaccaacatattttgttgtctaattaatttatatatttaattagtgttgttttctagttgtatttttgttgtatatttaattaatttttctcgctaaattgcagtttaccaacaaaataactacataattcaaacgatagatacaagtacattattaatatgcaacaacacacatacaactatattatcaagttaaaaagctctactcactattaaaaa

SEQ ID NO: 36824 - DNA, 7151 bp, Cannabis sativa
  modified_base (2156)..(2158): a, c, t, g, unknown or other
tctaccaaatagaatcataagtctaatttagtggtattcagttcaattccttgtggttcgacctcacctgcgtgagtttactacttgattacgtgcacgggcgtattttttttatattttttgtaacaagtaggaagagggacatcagcatctacccctcttcccaaccttcttcttcgaagcaacataagtagcagggatgacctggaccacttgccttattagaggctcagtttcattcgacatcggaatcgtcctcttcaagttagaacaacatgccataacagtcgcaagctcatattgtctgcaaaaaacaaagacatgaggatagtataaaattaaaaagaaaaacaagataacaaggtgaactacatagcatggagcatccatcacctgctgattccccatccttctccggagtagttcgagtggtattagcttatctatcttcctggtttaagagcacaaatattctccataaatattatgtgttttttcaaactgaagacacttcttccgtcactgtctgagataagatgacagttgcactttgagcatctcatcatcttgctcgagtggcactatccaagattcgtcggcaaagcaagtgtgagcatacacacactgcatgcatgatcaacctaaccttttgaagattttcagtacaaaacaaagattgcccatctctctcccatgccttaatttcaaacaacatggcatcagctcttctcttcgtgtcaataagaggagcaagtcttatgaaagggctagctttttggaaagtaatgtgtcttggcagaagaatatgagtatagaagtacccctaatggtaaaggccacagttgttttttgtaatgttcttgatgtataggctaaattggtggaagtggtagaagcagccttcttatttgtgggttggactccttttcaagtcgcaaagaatgtttatttcatgaggagttggaatagcctagtttgtaaggcgataaaatatgaagaaggtagctagaatcctatagccatttggatatatctggtaagggtagacaccaaagaaattatctacggatatgaaccatgcatatgcaagggcaagtaagcacccgcattcatgtggaatcttgactaggcactacaacaagtgttctaggagccattaggaccaccgtattgtggcttccagacaacagtttcagggagatagtaatcatactgtatcaattaagcttgatgttcagtaagagttctaaacataagaggccttagcttgaaggctcgatctcttagatcatcactctcaatggcagttttgagaagctcagttgccatcacctttccaccacgggccttgtctaagttcttagacttaagcacatttatcttagctctaatgaattgagtcatatgggggtcatacttatcaagaaatcttctacttctcttcatcctagctatgacaatctcagcagcataagttgcttacaatctaagaaaagtcaaaactgggttgaaaaagtcaaagcaattttaaaagaatttattcaaggcaataggaaggtgttttggagttttttggagatcttggaaaattatttcaaatatttttgggaagtataaaaatccttggagtaagaccaacaaaggaggagaatgagaaaaattcaaaaaaaaaaaaaaaatagcgacacccacaaaaaaaaaaatatgttttttttaccttgaaaaggagaatgcttacgggcttgatgaagatgaattccaaaggctttttaaaggctataggaaagtggaataagaatgagggagtatgaaaattttggttttcacctcacttaattttatgttagctcaaactcttaatcctaaagttcatgggaatcttttcaatttaaagcttttaaggaataggtaaataaaaagtaagagatgtaattttatctttttctttctcttttcaagctagattttgaaattcctatacaaataggaataggaatcccaatttaagaaatcctaatactatttatgattaagaaaaaattagagaattaaaagaaaatggtaaattataagcaaaagaccaaaagtcttttctcttctttttttttctctaatttttgaatggaatttacaaataggattaggattccaatccnnntaatcctaatgccataacaaaaaaaaaatatcaaattttcaaagaaaaaagtaaaagataagaaaaaaaaataagttttcctttttttctttgataattaatttttaaaattcccaatgacaaagaaaaggagttaaaattcctaattcaattaggaatgcttgaaaagcagatacaattgcttaagaatatcaaaactaatacccatctagtagtttcaagcgaaatgggatcgatttacgtcatcaagccaactctacacaagtgtaaagttgacttgggggaaaatgttaacccaaaaactttccctagtggcatggacatcaatgtttaatatgtgccaagaaggatgatgtcacagggttgagtaaacccgagtcatagcagttaacctgggagaggaccctagccttacgcccaggttgacctcaggatctttgggatggaagttcagatttctataacttgaattcaactcactatctttcagtattctgtaccataaatatatagagcaactaattcaagccccaagagctgaattacatgagtgctctgaatttaagatccaagaactgaattacacaagtgctcctaatttaagccctaagagctgaattacacgtacctgcaactctagatccaacatgggaacctagggttttcacccagcgtccaggttgactttcccaactagcattttggttttcgggaccgtcttagttaaaaagggtcaaaactttcattaagacatcaactagacatacgatgaacatatttgaggcatcagaattagaattaaaataagttcatttttcagcaccaagggccccgagcactaaacacccaggttgataatctgttaatttgggcaccttccaagtgtcagatcggagattggacttttgcatattctttgtcttcatcaaaaatggggaaataggtccttttggagaagaaacaacacttcttaggtgtcaaaaatagggcccagcacccaggttaacatttggggctagcgttgcgcccatgttaatattttgtaaacctaggccatttttgatggtgttttccaagattattttgagattctactatttatggggaccaaacagaatttaaagggtcggaactgggatcaagtgcctaggttgacacttggggctcgacccagcgcttaagttgacattttgtcaacttaggccattttcgatcaagttcacaaaaaagtgttccaagcatttttttcatcattagaaataataaatattcaagtaaatttggagagaaaaccacaaacttgagcccctagaaactggatgctaccttcaattgatcaaatgccaaatttgacttgacttatgaatctggaatggtcaaaaactagacaggagaccacattctcaagttctgaagtcttggaagtataaaaagcaagatcttaggagctcgggagtaagtacctagcgcctaggttaaaaaaaaggcctactaccctgagttctccttatttgattataatgccgtttcgaccgtccatctagattttcacaataacaaagatcgatgaagacagagaagtcaaattcacaactttgcatttctcatttctagctcactcggaaatgaagagtttcgagtctctcatttttgttaagcaacatctccgagaattggtgatcagcttcgccaaaatacaaaaataggctaagtgatgtcataatatcacataaacaccttaaaatacatctcatagacatttttgcacttatccagcatctaggttgacgtcacatgtacctgagcactggatgtcaacctagacgctaggtcatgaactgccttgagtaaaacagtcataactcactcaattttgatcagatttgcgcgatttaacttgcattttaaagctaatttaatgttcataaagtcaagtctcacattttaatcgtaattctaaaactatcgtcatcaaaattcacctacaacggagttacaaaaataagctttgggttactgcagtggggtatactcgccaggctccaaaatatggccattaccaccaagagctaattttcatcgttagatcatcatcaatggtcaaaaatatatttttttatttattttttccctatttttgtgagtctcattcacctataaaaggagagctccataagctcatttttcacattcaaaaaactacccacaaggtgagagcttctctctctagtttctctctctagaatttggaacttttgacacttagtctttttctgtaattaccatctcgtgagaaataaaaaacttaaagtagacgtagctccattaatgtcgcgatacagggagtgaactactataaaatttattgtgtctctcttataattacttaactacttttttaattctcgccaatttagcgagtgagtgtggcttagaaatttagtctaaatttctgagtcaaccgagctcattatgcctataagtttaaataagtatattagttcacttgtaataactaataaattaaaaaagcaaacaatactggtgaaaggtcaaatagctagcacagttaacatattaaatttttatattgttcaacaaacaacttgtactgtcttgaaaaattggggaaataacatataagaaaatatttatatattattttttattttttcatttcttaaatttattctctatattaattattttcttggattaagttaacgaaaaattgcatgaacaaggtttgattgttacagtatataaatatttgtagagggctttttttattattattttactgataattatcaaattaaatattttttaaaaatatttttaggtgattttttttagtgggagctagctacagctcctatggttcaatgtatgtccatctctaaatctgatgcaaaatttcaaaagaagtcaattgtgccaatttgagttgttgacttaggcgaaaaaactattttgtagttgaatgtaattagttggttataccatgtacatggtcagcttggtgtacaagcacactgcaagtggtcaagttggacaaaggataaactccattccattctatggtgccttaatattaaagttaggcgattaataacactctacagctcgatacgcctccttgtaaactattcaatagaattaggagaatgcgtaattatccaaatttttgtgtatcttatatggtgattaacagaataagtaacgttgattattcaaaaaaaaaaaaaataacgtaaccattgaatatagaatttggtaaaaatatatcactagtaaccaatcctatatatatatatatatatatattaaatatatcgcaagtgaaaattttgtgatgactaaaaacttccgtggatgttgttatgatcaattagggttcataaattacggtgaaggcgagagattaaaacagaaccttaattattggtgataatttgtaattaatattggagggtgtcttctagcatttctcatatatatttatagatatacatatacatatttgggccactttgttttgattacaaagttgtcagttatttattttttttttttccatttatcgatctctgcttaatatttattattaagcgaagaacatcttttcttaattaactaataatttaatgtccatccaaagttaatggatattaatcatatagtggtgcggaaaaaaatatgatataaaattacgtaactcatctttaatatcatcacattgctatttccacagtcaaaactacgggaagcactaatccggcctagacgcactttcttccttcggcccctaaaattaaaataaaatgaggatataaataaatactattttctgttattaaagccaccaacatatttttcttattagtctttaccatatataggctttgtttcattttatttatggtcaaaaaaaattaaaactgaaacaaaattgatcagaagtggagatcttttgattcttttcaaaatgttgtctaatatatatatatatatatatatataataggttctctaccctgttattattattatttagtatactatatacctacaaaagatgatatatttatggtcatgagactaaatctctaattagaatccttttgagaaagatcgtgggaaacacttggattgattagaacccatacaaacaaacacaataatgctctctacacatatgccctttcgattctttcaagagttctacatcgaagggtatactaattaagtttaattattccaatatttatttatatataacactacaaatatatttataaaaagaaaaagaaatttcacttacacactaagatgagaaacaattaatatagagtacataataatatatatactgatcagacggtagaataatatgccctaggggaatatatatatttatatatatttatatcttccatctgattgggtgggttaatgagtaggtttcccgtcagaaatattagtggagtttatactctctttatctttttttttttttttttttaattttcaaaagaaaaattaaattaaatttaattaaagtttttattttgttttgttaacgttatgggcagctagctagcttgttaaatagcgtatataggaactttgatatcatgggagcacatgatcgatcaaacaattgattagaaactttgtttcgcatgaattggcggtataattaagggaccctaattatatataaattattatattaattaaccctaaaaaatttatttatatagagattagagattgtttcagattcttacatactactgagcattttgttttagattcttatatactactgagcattcacactgatgaatcttaattattttctaaaattttgaattgtaaattacgacattaatgtgaatgaatgcttagcatgtttggtattgttttctgttttttgttttaaaaaattgtttttaaaaatgagaacaaaaatagtttttgaagtttt

SEQ ID NO: 36825 - DNA, 5619 bp, Cannabis sativa
aaaaaaacagtataaatgttgaaaatgccgtgcaacagtaaaaaagttataaattgggaaaaaacagtatagggtgtaaatttccctttattttaggccatttggcatataagcccaacccattaatcaccgtatacggcttacaagcccatagtatcccccaaacgaatcccttcccgcggtttaaaacagaaagaatcgacaaaaccctaactaaatctcagttacttaccatccattcactgagtcgaccaaactcgccgccatgggccgcgtccgaaccaagacagtgaagaaatcttcacgccaagtcatcgaacactactactctcgaatgaccctcgatttccacgtcaacaagaagctcctctgcgaggtctccaccatccccaccaagcgactccgaaacaaaatcgccggcttctccacccacctaatgaagcggatccagaagggacccgtccgcggaatctccctcaaactccaggaggaggagcgcgagcgtcgcatggactttgttcccgatgtatccgccatcaggaccgaccagatcgaggtcgacaaggagactctcgatatgctctcgtcgctcggaatgagcgacattcccggtttggttcgggtcgacccggtttccgtgcagactcaacctttaggatttggccgtgccggcggagctggaaagagatactgatttgaattttggggcagacataatggttctagattatattcttagtgggttttcagaaggtagttttttttttttttttttaacgattcttcattatttcataaaattctctcatttttatgttaatatttatgaattatatgtccaattttaatgaatcaaagtttttattagaatgaataattcaagtagggaaaattgagttgattttcaatgtaagcaaatttcattccaatattttatacaagaaacaactctgagtttttgcacaaatatatcaacaaatgtaagcaagagatttgggtttgattaaaagcttttgtattatagtttcattcacttgaatttgcaaggccaatcatgttgagcatgtggcgatcctctttgaatcggtccaagaccgtacctttaagtccttcgtgtttgtcttgctctgattttcctgcgacaacaccccagcattctataacttctggttgtattcgggtggttttggagagacaagggctgccaaatgtggtgcagctgaagctgtgcccttgatcaaaacttgccgataagaacagcccaaagtggtttgctcgtccaccaaaaccgataccattcgggatggactctgagctaaaattcgaagcacactgcaatatggagattaattaagcaagatcttatgataatcttaatcaattctaatgatcttcatgtaaggactgcataagaataggtaaaataatcaattgaaagacctttaaaaacgtgtttgattattattatggagggagtaagttgattttgatcttcttagaaaatggaaccacgttttcttttttagattgagaagtgggaaaaactcacccattgaagattggtgttagctcctgtaggcctgaataaagctgcatttggatagagttggaaaatgaaagacttcatatcaccatagaagtcaccatgtttctcccaaggttgagaagcatagcctccatatatgtaaccttctttatctttgataattaagactgttggcccttcatcatttctgcagttaaattgaagagttactgcttgcccagttgccatacttaaaaggaaccaagaaaactgaaatatgaaagaaccttaatcatttatgaatacaaatacatcacttaagggcagcaaagaagcacggtgcaaaatggtacaggaataaataaataaatgaggcttaaccaaggtataagatgaaaactagtgtataacccaagaaaatcaggcaccagaagatagtattatagaaatgagcaaatggccaatccaagcacaatcaggatataacaatgcaatccctctaataactaaccttactaattgttagccactctagtgttgtgaagaaaattaacataaaagctaaggcattaattgaaaccagttcttatcatagccaagaagaaacagtgaataataagtaatatgtgatattccaaaggatgttttcttggtactaggctactagctccattattatgaaaagaaactcaaccaaaatggaatatgcatagcctgcgtgaatactatcaaataaaatttagaagcatgttactcacgatatgtggcccaagaatgtgctgaaactcaaaccgttaaatgaactatggtataatagtttccactcctccagctcgtgctggggaagtgctcctcctatatgccaagcaaactcctttcttagtagtatcaagttagaatctacattctccccttgcaatagacgaggaacttcaaaacctggcctccctgcacaaaacgttccagcaccaaaattcagaaataacagctatttctgtttcaatcaaagtatcggctctccaatcctcgaaaggaagaagaaacaggactaaccaaaaaaagacaaggacaccaggttagcaattaacagacaagcaaaaaagagtgagacaatatgctttctcaataaatttctttagcttgtagaaccagcaagcttgttattgtatgtttcttcgttcggaggtaaaaattaccacaatgacaattgtcccctgtttgattctatcagaaaaaactacaaatgtctgctatcttagggccatttaaattccctagacaaaataatatgtctgctactttaatcatacataaaaacagacaaggcatgaaacttttcagagtacctgggttcggtggcatcaataagcttccaagaagtttcctcactgatgggaggatagagcaccaacttctgaagtcttcaaaagacatactttcttcaggatggctttcatcatgctttgaaaatttagcagcatcaagaaatatgcctacactatccttggatgagctcaaatgagattcagaagaatccggttgatcatgaaataaaatttcaaatattgtaaccaaaacagtttctagatcagacctgaattaaaaatagaaagttacattcatcagtaacaaactacaagaagaagaagaagaaaatatagcaaggctagtcatttcctgaaagttctgacagtattctaaatggaaagtaccaacccattctataattatgcaaagaaaaagaatcaaaaaagtatcaaaccatcatccaatgcttgcttaaagaagcaaccttgaaaagaataaaagctaacataatacaagaactgagtatttccatagttataacatacttaagccaagagagtactagttccactagttaaattaaaatggtataacactacctccccacaattccatccccagagacatccaataactgatagataaactcttcaatctcatctttggttcccttctcataggtcccctgcaatacaaccaaaaacaagcacaagggtatgtttagtacatgatcatgtattaaagaaaacccgtatcaaggtttttgtgataaaaagataaaaattagaaaataattataaatatccattcccctttgcctattgaagtgagattgataaacatgtacctttgcaattatgaggtcttcaaaggtgagtttatgatccttccgtttctgggtaaccaaatcaaaaaacctttccccaagaggaccgtgaattccaaaatatgtctgtgaatgtaaaaatatataattcagtaaggatgatacaagatttataatttttgaagttgatgatgttgtgttggtgctatgaaatactacccacctggaaaactgatggagagatgtatttaccattggtttgggatttttctactaaagattcaaacaaggatttaaggtcttccagcttttttggagtaaaagctctgcaaaagtcattgttcaatcgattcttaattgtcatacattcatacatacatctataaatatataattacatacacacatatagacatatatatatatatatatataactataactagatagagatatacctggaagcagtagcaaaacgaagatctgcagctgtacgaggtgagtgagcgttgcccatctttggccctgaagttaatgcttctacgctcaagctttcttcttccccgtcgtcgtgcttagttcttctttttttttttttttggacaaatatcagactatcaacaaaaaatatcaaactttttttttttggtaaaaaacaaacaaaattaatatcaaactatacttttaaaataaaaaataaaataaaataaagggagataaagtgggcttgcacatgcaattcagttttacacaagggtattttacaaaaatataaaattttgggcaaaagtttaaaattttaccacaatgttttttacaaaattactgtttttataaaactacagtaaaataacaaaatagaaccgttaaaataataatagaataactaaaaaataaatgtaaaatgacagtgaaaacttaacacagtatacagtataaaacttacacaatattttaaaaaaaaatttgccacatagtaaaaaagttaaaaggttagatatttttgggatataaaaagttataaacctctttacacaatacacttaaaagtaatttttttttttttatattttgcaaactttttatatatattttacacaatatcacgaaactctagaagataagtgaaaaggcatgtagtttgatactttgtttgacgtttacgatgatgtcgagttattggttgatccttgcttgagataatggcttgagttgaataagaatgaatagcgtacattacacaagtgagagagggactgaatgccaatttaaaaacaggctcggtaggatctttgtccacaaattttgacatgtattaaattatactttcgaaattttttaaaccgttaaatttttttttccaaattattaagattagattttttttttccttttgaaagatgaattttattaaggaaaaccagaactacataatatcagaacagtcgaccttacaaacttggccaaccattcagggatagaatgagtaaaaatttgtgaggttttagtagctaggcatttcctagctaacatattagcacattcgttatggtttctatttacaaaactgatattagaatccttagaatcctccaaccgagcctttatttgatgcagaagtgttccagcagcactcaaatggttgtcctggtttttgatcgcttccaccacagctttgcaatccgattggatctcgaagggtctggtatctgtactcagccgcccctttaaagcttctagaatggcccaagcttcagccacagtcaccgaacagctgctggggatgtaaaccatcccagcagtaagcacattcccactccagtcacaccataaaaagcctatacccactccaatttggtcaggattcatcgcagcatcacaatttgcgcataattttccccaatgaggagcctgccaatgtgtcgggttagatggggaagtcactctagtctttactgtt

SEQ ID NO: 36826 - DNA, 3651 bp, Cannabis sativa
tgtatttataatttggtggggtgcaaataaaagtcccctaaaaatattatttagcatatatttaaaggaaaaaaaaaagaagagggagagatgacatatggtttgatgtggctgacctttacaactttagaaaattggttaagcacatcaggaacataagccttaacttgttcagtggtgagattgagtttgtaaccagcagtgagatcattttggccaatgtcaaaagtgtatagacccttagaaaagtcctcttccttgggtaacaatttctcaaattgatgtcctacaccaaaacaaacaaccactttcattaatttatgcccaatttcatttaaaacaaaatccaaacacaaaaacaaatgatcacctttctttcgaagacttaaggttctgcttcgaaaatctgagaattgaacaaattggacatccaaggaaattggactatacccactttgtgaaatggttgtgttttgaggtctaatggttgatccagctgtggcaaaattggctccatggctaaagcttgaacccaatgagtccaaataagcactcagatgaggtaatcccaacttctcagcttctcaaaacaaattccaaataaaatcatttcaaccaattttattttaatatgtaaaataattgagtcacgagtttttctgcaccatgtttaaatacatttatgttgttattatctaaattcaattttgaatgcagtaacacaaacaaaattcaaatgttattattattattatgtgtgaaaagaaaaatgtagtcacatgcacacatttcaaattttggacagagaccctttaaagatttgagtttgaattttatatatagtgaggccaaaaatgtatttattagaattttaaaatatgatgaaaggatattgatcttgagatctatgcttatgatatctcagaggcagacacagaaaacagtccaaatccaataatgccacatttttgttttcttctataaagttatttttctttttaaaaagcaaagcaaagaatttgtaacaagaaagaggagaaaagattgagaatggatgaaataccaatgaaatcaatgacaagacgaccatcagaaaatcgcccagaaggggtgtgaaaataggtctctccattgggaaaaggggcttgtccaaatgcagctgagagaccacctgtgtctgaatttgagtctccaaagttgaatatggccggaaaatggcaccacctatcatcagtttttgcctcaacactttgagccaaagccacccatattagcaccaacactaccctaaaaacaacacttaatcttgagaaggagcattgagattccatttgtatgtgaacagagtgtagtaataatacagagaaagaaggctggcttatattatgtcacaacctaatataatgaagaaaataaaaaatccccactagatatcatattgattttaaaggactgttttggatttgatatttttgtttttttttttttttttttttctataaaaccttccttctctattaggaggttttggttgataaatttaacttcttttggattataaaaggactttttagtattggttggtccacctttactataggacttttttggcattactatttgttgttgtcttaactaaattaatttacatagacccgtatatcaagcaatggaatgctcttggtttaaaggcaaaatcaactaaaacaatacaaaaatggggataattcagaacttaaaatattttattaccaagacaaaaaagatactaagtttcatgtgaatagatcaaatatttctatggcaagccatgttcaatggaataggtgggtctgaaaatgccccattaacaatttgatcataaacccatttattagctgcctcagtgaaatgtattccatcccaattcacccaaacagatggatcttcacatgattttcccaacaaaatttcttttcctttcactataatctttccccatccacaccctatgttcttgtcatagttaaattttcctccatgaccacaacatgctaccaatggttgcttaaatcctgcatattaacacatattcacattataccatatcatatcagtaatttgagttttatttgtcaacaaagtaagtgagtaattcattttatgtaccatatttttttggctcactaatgatggagtacttggctgagtaaacatcaacataagtaattgcagccaatggtaaatcttttctcaattgaatcacaacttcctttaatgcttggttgaaaaacttagctacttcattataaggagaagcacatccagctttatcaatttctgaaactttgtatggtaaacgttctaaaacatatggtaaacaaccaaaaggaccagtgttgtgtatccaaaagtatcttcctccttgactatatatattctacaaaatcaacccaaatcatattaaaacactaattattaaactaaaattgaaaaagggtcatcttcatttacctcaacaatcttcttgaactggtctaacacatcaggtacataagccttaacttcactactagtcatgttcaaaaagtaacctgctgttaaatcattctgaccaatatcaatggtgtaaagggcatcagagaaaacctctgcctttggcaaaagctttttgaaaacttcatctgtaagtacacaacaaacattattcttctatatgtataaaaaatagcagaatcgacctagtaaaacaaaaattaaaaattggacctttggctcgaaaagtttgagatctagtgtgaaaatcataatactcattgtattgaacatccaaagagatgggactataaccagtctgacgaaatgttgtgttctggggtctgactgttgaccctgctgtcgcaaagttgaccccatgactgaagttacttccgattgaatcaaggtatgcactcagatatggcaatccaaagctctcagctgagattgggatagagaaaaatatcatcttttagttcttagtacatttaatttttacatatggaatggtatagcatacatacatatatatatacctatgaaatcaatgacaaggcggccatcacagtaacgtccggcaggtctgtggaaaaaggtctcgccgtgaggtagagggacttgtccataaacggcagataagccgccggtgtctgaattggaatcgccgaagttaaatatggctgggaacttacatggactggttgtggttgttgttgttgttgttggcaagcatggtggcaataacaaactcaagctcagtgtcaatgctgcaaaaattacagtcagttccattggacaagttaatgagagagaaagaaggaaaaacgacagagatgagtggctgagtttaagtccaagtccaagtccaaatatgtgtgttttgttgtgtggggccttttgtagacttgtagttatggatgtgaatgaattatgatatcctatgcgattttgtgagaattcctgaaactttaatcagtgtgttgttataagtttaggtgccgtacttttttaattttttaatagaaaataaagggaaatttgattttctatacttaaaaaacttttttttttttttctctagatgcatacttaataatattgaccaattggatcccatggtccgaccatcggacc

SEQ ID NO: 36827 - DNA, 2340 bp, Cannabis sativa
taaaaactgaccataaccgaccgattttcacctctagaaagcagcttagggataaggaacatttgttatggaacattgatgcgttaggcaaatacatttaggctatttcaacaaaacaaaacaagacaatctgtgagtaaggtagattcacagtgtttatatggaaaaggcagattggtgaagctatacttctcctcatgacaataatagttgatattggaagctatacttctcagcaacaaatgcttagaggagatcaaaaattggctggtttggaaagtaatggcaagaccgctctcaagactgtttagatggatcttgagagcaaaaatgtcgaagtttaagaagcaagttacatcggcggtattgggagagctggtgtatcaaattggggcgaataagaataattgtctttagaatcaaaagatacaaacagctacaacttgtgtacagtcagtcaagaataacatttaaaattacatgtattagatctaaaaagatctcacaaagagaacaagcatgtttgatgttttataagttgtaattagtatatgataaggccaaatttggtgctacattgattgtaaaggttgattgaagcaatacaaacttactactaattcataagaaaaaaaatgagggtgtggtagtttaataataattaggactagacctgtcaaaattttgttagttttgttaaatattaaagggaaaaaaaaaaaaaagagatcaaaagtatttcaagtaattctaatttgagctcatagtacatttttttttatattttatttatttattaatatctcaattttattttttaaattattatacaatttctttatgacactgtcaaatataacccttttcacaaaatttcattgaccaaattctttctatctcttactcaatgcactaggataactaatatagtaataataaaaactttaatacaaatcccatgttcaatatgtctttaaaagtgcaattatgcagtatattagaaaatatatccacacatagtaatagtacaatatagacttgtaatccatataagaccacttttttggcctccaaaatcaactttgtccattggaaattaagctatatacattgcagattatagaacactacctatgaagaccttggaattttgttaagtatgacactagtgaagtgatcaatagaccaatcatatccttgcccaagaattagggcatgactttatgtggggatgccaatattgaaatcaaactatgatttttatagtgaaattaacctatatgattgacttatagtgccatgccatgacaaaggatgcctttagaatagtgtggtctcatattattatatatatctcaaatctaaatataaaatagtcaacacaaattaatatatatgtatatatattttgaaaagtaaatggaaatttttattgatgtgtatattggacataatttattagatggagtatgacttatcaagcagaaataataataaaaataagctaattaagttatttacaaatataaaaatgaaaactttaacgtaacaacactttaaactaaaaatttaataaatcatcaacgatgaaatattaaaagaatgtgaagagtactatatttataaccaaaataaataatgacaaatcatacatattaatcaataactatcattcaaaaatgataatagcaaccctgtgtacatatatattttttactatgcattccctactatgcgtatttaattttagcaatatatgttttttatatataaaaaaaaaataaaataataataaaaaaaaaagaatagtagttatatataggtttaagtggggaccatataatttctaattatagggttgatcaattacaaattattgtgttaaaaattgtgtataatttaagggtgtgtttagtaaatttttttctttttaaaaatttttgaaaccacaaatatgaaaagacaatcttttatttttatttatttaaatgagaatattaaaaataaagtgaaagaaaatgtggtgaaagaatataaaatgagagaaagtgaggtggaagaaaataatgagtgaaaaataaagtatagagtaatttgtggtataaatatcatactttaaattgtcacgtgtcaattcttaattagttcaggttattaaatttttaatttttatttaatatatcaataagaaaataatgacttgacatttaacaattaatacctacgaaaattctaaaaatataacttaatttttattatcgtaaaaattaaaggaattatttcacaaaaacaagaaaaaaaaaattacaaaaatacggtttcatagaattttaaatattt

SEQ ID NO: 36828 - DNA, 3818 bp, Cannabis sativa
  modified_base (1031)..(1033): a, c, t, g, unknown or other
  modified_base (1708)..(1711): a, c, t, g, unknown or other
  modified_base (1923)..(1930): a, c, t, g, unknown or other
  modified_base (3397)..(3399): a, c, t, g, unknown or other
gagagagagagagagagaccaaaaataccttacgtgtgcgatggctccgctgtggtttggtgcgtggtctaacaacgccaccaccccgaacctataaaaaatcaaaccgacgttttcaaaataaaatgaggaatgagagagaaagagagaataagaaagagacccctcattttttgattttgtggagatgaagacggtggtagggtgctctgtctgctagtggcgatgagccgatgtctgccaaacatcgaaggggcagcgccatcaactgctggcactgagtcgacgtcttagagagagacggggagagttagggccaactatgttgtgtgagttaagttatattacgtttttatttaggtttttctaaatgggcacgaagcccatacgtgtttctgtaattttttttaagtaatttatgcattagtttttcactgacaaaaaaatcttgtaaactaactctaaatgctgtgtcgaagcaaaattgacgcaaaatttaacccttaatttgtgttattttttaaaatttcatctttagcgttagtttttgttttagtatcgaagtaacaactgacgcaattaattattatttccgtcagttaacaaccgaagcaaaaaaaatgagggctgacttttttgtcggtcgactagtttgaactgacgcgttgatcgatgtaaaaacccttttttgtagcagtgagtttactgaaatatcatttataatcaactaagtattttaaagataaaatacatcgaaggtaaaacattaattttttccttactcgattgatgtaaaaacccctttttgtagcagtgactttactgaaatatcatttataatcagctaagtgttttaaggataaaatacattgaaggtaaaacattaattttttttcctactcgatgtaaactgtctatagagaatcattgattatttagattaaaataatagataattaatagcgtatctatattagatatgttgagtgttctttgtaattaaaagcgcaattctgaatctatagtggagnnnggaggaattaataagttatgaaatatagttagtaaatgatctacttattgggagcttgatttcataggctcatggtccccacattatttgggataatattgccttgtagagtcaattaattgatttaataagtcaattaaaattcaaaattttagactatcttatttaaaaaatttcactaagcttgggcaaatttgaaaaaaaatagagaaatgatgtttatttgttaataaaggaactgtgtgagtattaataaatatatttaaataatattttgtttgataattatttgtagttattaaattaaaattgatatgaatttcaaaaaaaaaaaaatttgatatgtaaataattagattagattaatggcaaaattggaaaaaagcttgttgtttcattaagttaaaaaattaagtggcaaaaatcaaatctatgggccttcacttggtgaattcggccatgattgagattatgagcccattagtcttttgtctagcccatctcattctaatctaaccttgaagaaagcctatatgtaaggaataagataacaagcttaccagataactcattccttggcctagactattcaaagagactaaagtggcatttagttgttggtaatgaaatagaatggaattgaaaggaaataatttttattctattcttttgttnnnntgcatattaaagtattggaatgtcattcaaatggaatgacctttctactattttagtgggatgactatttcattttgaaatagaaggaaagaccgtttcaatgcatgacaagaaaaaattgaataatgtttgtatcaatttttttatgcattttaaattttattccattctattcctattctttttcccattctcattcctattcttatatnnnnnnnnctcccaaccaaacgccacctaatttcattagcctaatttgaaattccttagcccttttctctctcatattttgttgaaacttattttactaggatcttaatttactaataagtatgtttgattatatacattataatttaatttgaaattccatagccattttctctctcattagcctaatttgaaattctatagcccttttctctctcatattttgttgaacttattaggatcttaatttactaataaatatgtttgattatatacattacaatctaatgtcctaaaatatgaaattaatgaaacgataaataaacacataaaaagaatagaatcattacattagtcgcaaccgaaattaatgactcctttcgttcaatcactctaacccttagttcccgttctgtagcagggtattgccaagtgatgagcttggataactttcttaaattcgacacgtgacaaaactacacgatcttccataaggatctaagtaccacttagaatagcatgggatgatactcaaatcactaatggaataaaataattacaacgtatagtatacgaaaaaaatagactaaaaaactttcatgaatgtcgaaactaataaaaagtgtacgaaaacattccttttaatagatgtacaataaatttgcaaatcacattggaaattaatcgtgaaacattgcaaaatcatctcaaatcacactcaagctttcatttttttagtcacgcattgcaaatatatcgcaaaagcatcgcaaaaagttgaaaagtatgaaaaagtaaaatgttttagtcaaatatcgcacaacatcaagaattattgcaaaatgtcatcattaattttaaatttagtctactataacaaatatatcgcaaaatattataaaatatcacaaaaaattggaaaattaaaagaaaaaaatacaaaaaaaaaaaaattaatatccaatttttgagcaaaaaataacaaaatacaagcacaaatatgtagatttgttaaaaacaaactatatatatatataaataatcaactccaacaatatttttttagtcaatgacagtggtggtggctgctcgcagcagtggtgggggtagatcatggtggtggtggcggcaactgttttggcaaatggtggtggttttggcaagcagaaagagagagatggaggtaggaaaaaataaaaggaaaaaatggaaagttaggttaggaagatattgagactagtatttttggtagaatgagaaagaatagcataaatttttaatgtgtattatggtatatgtatatatctcacgttataaataaaaaaaacaaattaatgatatttatacagggaaatttgaatctatgtttaatcacaccatataattaaaaaaaaattattcctctattattcattatatttttttttttttgaaaaactattattcattagatttaaagggtgactattcaatggnnncatttttattgtaaccatatagttccattttttttaatttgtaataataggttatgaataggtaaaaattctatttttaaaattaattaattataattaactatttttttaagtaattaaataaatatttaacaagaccatttttagcaattaaatttataaataatttttttattcatatataaatccatactataattattttaacagttaagtcatttaattataatatttacaattttttttttttacgaaaattaaacttatttttatataaattaaaattctgtccttataataaatttttaaataattaattttttttacaattagatgatgaggcctcaagctagtgctgggtctcaagctttaataaatttttaaataattatttttttttacaataaaatggctcttga

SEQ ID NO: 36829 - DNA, 6435 bp, Cannabis sativa
gatgcatctaataattgaggaactctttgttctgtctttatgagcaagcttatgaacaaagataaattattttaatctagcaactggcaacaatcaatagtgatcaatttaatccccatatctttttgcatatatggtgtaagttaaatttgtatgatttttgatcattaaattattaagaccattgatttacaactacatacaactacaaaggataaaaaaaaaagaaaatagattaaaaaaattgatcaaatttatagtagaaattcttgtgtgattcgggaggcctagtgcatggagtgatttactccaatctcttttcacatctttttgttgactatgttctagcacaccaaattaatccttgctctaacatacatctttaatttctaaccgatcatattcgtaattgtttatatgaagattgtgtgttgaatttgacaattaagcaagttatattatttacagggtagatttgttagctttacttacaatgaaggatggagaattatagtaattctctgatgaataataatatgctgcagtcaaaatattacactaataatatggtatacgtttaaaatgagaaatggtaagaggcattttaagatattatattgttaatagtaagttttacactttttgttttaataaatattttgtttatatagtgttagcaccttaatgtgtttaatatcaatactctctttaaaatagtgagtgacaatttacagtacacaaatgtgatacattaaaaaaataattacatatgtaatgtttcaatatatattttgagttaatgaatataataaaatgtaaccatacaatggtttagtctttctcttatattattgtgtaaaaagtgtacaaaaaaatagcatgtttagtaacaaaaaaataatttttaaagttttcaaaacataaacagtttagtttagttattgtattctgaaaacaatattgactgaattattttttgaaatagaacgaaacattttgttgttttcaaaattcttactttttataactttattttttaaaaaattattttaaaaaaataaggccaaataaacctaattgtttcaatgaaacaattttctgttattaaaaataaaaaacaattttttgttaatcatgatcaaattttgaagagcctactgtaaccaaatgaatcaaatttcctaaagttgattggagaggagagaaagatgatacgatcggtaatggtgataaatacccaaggcaagcctcgccttgctaaattctacgatgttcaggttctctctctcttctctgatattccgttactaccatttcatttggcttctcagtaaccgcatttcctgttttctgacttcagccaccggagaaacagcaggacctcattcgcaacatctatgcaggttatcactcttcattatgatctctcttctaattcattttcattttcatattctgttttgcttcatttttctttctccattgctacagtactttccagtagggctgagaatgtaagcaatttcatggatgccgagccctttttcggtcctgtaagttactctgatctttgaatttctgattgttctttgaatttgagcattttattcatgtttttgattatggtgcgatctgttatttcaggatactcgtcttgtgtacaaacactttgcaactttgtactttgtgtttgtatttgatagttctgaaaatgagcttgccatgcttgatttgatacaaggtttgtccctaagcttcaaacctaaattcttatgtactcttagcaatgaaagagattgtgtatcttccgccattgatgcaggccaatcccaactaaaatttagtggttatgaaagaatgatcaataccctaaagtttacaacttttaatcaaaatttctgttataattaattatcaaataacacaataaatgtcaacaatttttagaattttatgtcaattaaaataaggtataaaattctagcagttagcacataaataaatttcaaggatcaaattcgtttgcagaaagtcacatgctatgtaaataaattctattctcttcttttaatttcttgctttgataattacttacccttactttcataactttcagtatttgtggaaacattggacaaatgcttcagagatgtttgtgagcttgacatagtgttcaaccacagcaaggtacttgtaactctcctatttgtcttctgtattttttaaggaaaataatttagtttaatcattgtccttcctttctaagtgaaactagtattagctatgactcattttgtgcctgcctaataccctatgaattatacactcacactaccttatgactctaacttgctagattttccaaataaacaccaagttccacattgtgaacattgtttgttaaattactgattcatacagattggatagaaacaatttttgaatgaggtattcaatttcaggaatgaatcgaaaaagaaatatttattggttattatatgtgatgtgatcttattagagaaagggtttaaattcaatgtagtacttctctaaatgtctgtatcaattaatgcagagatctcttttcaactaaagactgagataaattgttgttactttttcagatgcataccatattagatgagattgtatttggaggtctagtgttggaaacaagctctacagaagtaatgaaggtcgttgaagagatatccaagtactctcgctctctctcactttgtcgatacttttgttctgatttctttctggggtgctgccaagtttgtgaactttattactgttttatctcaattgctacatacataatggcaggttagaaacagcctcgaattccatttctctcgtcccgaaatctgtttctagttggcggagttagcgtaagcttttcgatgatatgcagcagatattttcccggttttcagtcgcaggtgctcccttaaccaatccaatcctcaaagttttagacttggtgcaaatagttcatatatttgtgtacatctataagtttgtgttgtgactttaatagctcaatgttgccttttatgtgaatagtttatgagctcagctgatttatttggaaatttactagagaaaggaaggtaattaaaagcttttaatcatggctattacatttttctctctaggaatgagattatctaagttacaaaataaaactcatagtttttagattggatagaaacaatttttgaatgaggtattctattgcaccaaatatagtagacgacagccgccataaaccgaagcagtcacaaaattgatcagaccaggcttcaaagttttcattctagctttctactccacaagattacaagaccaatcaattgaccccatccaactagtgacttcaatgatcactttctttgaaaagatacagtcaaaaaacaaatgggattgggattccggggctgcttcacacacacaggagatctcttattaacagatgatcattcaaagccatccacaaaatgtacctgtgtttctataacaagcttggtttgtgtaagaaacaagctttaaactccatattcaataaagtagttaatagactcatcaataatcttcaaagcaaactgagtgttcaaatcattaacaacctttaagatttgggtcttgttattccacgtagatatttgcatttgcaaggccattttcagtttgttaaactaggcacgagaagcttgtttcaaagttcaaacctatagagttgtgacaaacatgattaggatgattagcatcacacaaatccacttggctgcttcatctacacaagttttttcaaatcactatttactaaaacattgcttacatttttttttgaatggagaaaattttatttaacaagaacgttcattcattacaatagataataaatcagaaggagcattaagctcactaaagatacaacctgacaaaaaataagactttctcgcaacgcagtgcgcgcttttatttgcaaatcgcttaacaaaagaaattaacacattattcagagaagagaccatcatacgacaatcttgtactatcattccaaattgggatgacatttgaacctctctattaatagcttgcaccactaccaatgaatcagtttcaatttcaacatcagaaaaactatgagtcttaatccaacttagagcctctttgaccccaataacttcaatttctttactagttgacacagcttcaactagatgaccgtctaatccctaatgactattcccacaagaatagaacaagaactaaaatgtcttaagtattttccaaaagggcgagcacgtaataatattgccaatgatcaataaatttataatacggacactacgaataatttaataatgtaaaaaatatatatgatcttttaaataattgagaaataagagtttggtagtgcactactaaccttctaagttttctaactatttaaaacaaaggagatcaataattcaataaaattatataattaaataatatatatttatagagttacaaaaggattcaacaattacaaaaacacacttttattttaattaaattttatacaaatattaagtccatcaactataaattactaacactataaactaaaaggataaaaaaaatattaatcaatttatattttaataaaataattaaaagcttaaataaaaatataagatatagtaatgtatttatagccataattattataagtaccacactattattaccttagaacgaaacatttggataaggatcgagtaaagagaaagaaaaaggaaataaaataatatattttaacatctaatgtttaaggttttttcttaagaaaaagctggcctcattaaattctcaaactcagtgaaaaaaaaaacaaaaaaaatagtactcattaaaagtggcatcaaccaaaattaaattctgaaaacataatgctgccaccaaccaaacaatacttgttaaagtacttaacattttatatgtaaaaaaaaatcttaataatagtgggaaacatatatagaaaaatcgagatttagttgactcattcaaataccataatcactttatatatttcccaatatattttctaatatgcagcttattttttgccacgtggtttactgtgaatggttaatagtttttaaacataaattattgttttgttagtagaattgagatgggctcagtattttatttttaaacatttaaagctttattatctagctttcttaaagtatttctctcttatattaactataatattgaggctatagatgaattaagaacatctctaatcgtaacattggtgttatatatttttacatcatcgaaagatataatattttattttatgttttttacacattatttgtagcatttatttctaaaaaacatttagctatgtttggtaggagggagggagagtaggatggatggagaggttagagagaatgaggagtaagaggaatcgagaggattgttaatctcttttgtattagatgtgaggtgggaaggatggagaaaaaattgattagtaaaattacaaaattatccttttaaaaataaaattttattatttttttaagggtaactattgtactttgcaaaatatattttgtctttctatataatccttctaaatttggaggaattaaattttgaaagtttggagggagaatgtctccctctatctctcctctccctcattctctccctcttgccaaacaagtgatttaatctaaccttccatcactctcaatccacccatctccccctcctactaaacatagtgttaaataatataatacattttaaaaatactataattataattatgatctcacatattattatatatatataaatctttttctttattaaattattatggtccacatttagttttttatttttttaaaaaatataacatcaatgtcattgtatgatatcatacaaatcttaagaataacattcttttatttcaaatggtataacatccttatattttaacacctaaattttttttctcatcaaatattttttagatactatcattggagatactctaagtatgcttttaagataaataatgagttttattggatgaaatagacgcctcatctttaagtattttcttttctcatcaaataaagtggtccctaaaaaaagtgtgagtcctgacattaaattgtaccaaactactttaaagttaaaaaaagtaatttatggtataaatacttaagtttaattgacagtttcaaataaatacttaatttaatttttaatggtaataatctttgacatatggtaattccattaatattattgggtgattctagaatgcaccctctcaaaagggatgtactgatacacccttgacttgtttcgggatcgagaaattttttttagtctattttt

SEQ ID NO: 36830 - DNA, 3405 bp, Cannabis sativa
  modified_base (369)..(373): a, c, t, g, unknown or other
  modified_base (3338)..(3341): a, c, t, g, unknown or other
ttgcgtatacttgcgtagtaatcataaaattcgtaacatattttgggcaggtgcatgatctaaagctgggctcaatgattgactggttttccaagttcctcgagtcttcatttgctccttttgcttccaaaattgccagctaggggtgttcacgaactggtttggtccagattttcatagtttttgaaccaaatcagtataacaactttttgaatattggaaaccaaaccagaccaataaatttctcaaaccaaatcaaaccaaaccattaagaaagctttaattttgtttaacaccacggtttaagtagaatttataattattcatatttttttaagtaattgtactatttttactaagtttttaatnnnnnttttcaaaatatatatttaacatgataagtaacatataaatattatcaaaagtcaaatattctaaaattcatgcaataaaaaccttgatacacaaaaagttttaaaattatacatatagtcatatataaaaatatatataaatcaattatttatcatacacggtccggtccggtttaaccgttaactatgtattacaaaccgcaaccgaaccattatgccgtaaatggtccggtttaaccaaactaccaaaaataattttcccgattacggtctacaatgggttagattgtcacggtctgcatttaaaccgcagttttccagtttatatgaacagccctattgccagcaacttggtggtcgatcttgtccaactccctactaaacggttcatagcatgtgtatcttccaacacaattttttcagcctcaaaacttaagcttggtgttggcttcggtgagttgaatcgtcgttatcatttgttcttttatttcttagtttcctaaactcattattatattgtttgcggtatgattaggctgctgctgaggctggctgactatccctaaacttgattgaccaagggcacatggctgctaccttgggagggctgacggaggtacatgccatgttaaagcatgcaaaggaacacgtggaggctttgaaggacaatgtcttggcctagaagacgtggagggaataagattaaaaggcagtggctgatgcggagaaggccatgaaagagggtcaagacttgatgatgcatgctcagactcagctgttggcggctaaataggcctgtcttttgaaggaggctgatttatgcaaggcctagctagagaatgaaaacctcaaaatgcgtctgtctaagttcgaggaacttcatcaagctgatttatagtatgtttccaatatgtctgcagagttgaaggagctttatttgcttcaggactctaacaaattggttaatgaagtctcatataagaagaccatttgacttccttctccagccacctgcaagcactgcaagagcgctatgaggatggggttttcatatgttggagattgaacaacttccagcctcgtcttcactttttgcctgatcttgaagccactatgaagcgctacatggagaaggaaaaaaagatagatccaactctgccagcaaagatggagggatctcgtcctccttatcccatgtttctcacaaaatttcgtgaaataattactatttaactgttttccattgtttgatactatcttatgtggaactccatatcaacaacaatattcgtaacaacgaagtccaatgtctttttggtagtgattgaattcatgggttcaacttccacccactaggtgaagtaatctactgcaaccactgtgtttttaacccctccttttcctattgggagggatctgataagatcgattccccatattacaaatgaccatgggttggtcatcatggtaatctcatttggtggagccctgggcatgtttacaaatatttggcatggatcacattttcggacatagtctatacaatctttttcatggtaggccaaaagtatccttgccttaagattttcttggataaactagcacccctagtgtgctctttacagaacccctcatgaacttcttgtgtaatttcctcgatctcaaacctcgctgcgcatttaagatattatagagacactcctcttcgatacaacttgtcatccattatgatacattgcgaagcctgatactggagtttcctagagggggcactctctgcaggtaattctcttattgtcaagtacttgattataaggtccatccatgtgggtccttggtgggtaactttgactttggctttggccaggatgctaggctccatgaggtaatttaccgagactaatcctagttcttctacttctttatttgaggccaacttttctaggcaatcagcttgggaatttccttctctaaggatttgttcaattttgtagcctttgaattcctgaagtatttctcacattgttgagacatacgaagatatctgttctctgtaggtttgacattctcccaacacctgtttgataatcaattgagagtcactgaatatatcaatatgggtagcttccactgctttggacaaccttaatcttgtaagtaaagcctcatacttgacctcattattggaggcgttaaacttgaactactagggcgctttgaagccttagaccttcaggtgatacaaacactattcccgctcttgacctattttcattcgttgcttgtctacttacaccttccaggtaggtgcaattatttctgaatcattgatgtttatcttactttgttgcattccacgatgaaatttgctagatcattcccttgatcaaaatgtgagggacatattggatgtaaaaatggctcaactccatggtccatttaagaaatctatcggaggattcaagattttggattacttggtggtgtgggtgattagtgaagacttttattgcataggctttgaagtacaggtgtagctttcgagacaagataagcaaacagtagcctaagttttcaattagcaggtatcgaatctctgtacctatcattctcttactaatatagtaaacatgatgctatgtcatatcttcctcttggactagtgtcgcactaatgacgtgttctgatactgccaagtagagatataatcttccccttctacaagtttggacaagattagagcctttgatatgtgttcctttaggctctaaactgctgctttgcactcatttgtccattcaatttctttactttttctcaaaatgtttaagaacggggtgcacttgtttatcgacctagagatgaagcgacttaaagttgctactttctgtaacgtccccgcttcaagcctcattgggttcttgcacccatggaataattggctcttatacacgagtacgtcannnnggctgcttcatggactgacgactgtccctacagaccaacgcgagtgtttccagcgtgctttgtc

SEQ ID NO: 36831 - DNA, 2176 bp, Cannabis sativa
  modified_base (2137)..(2138): a, c, t, g, unknown or other
ggggcatataaaattgcattcagtaagagagaagattttaaaaaaaaaaaacagagagagcattgtgataatgagaaattgcatataaaatttgagcttcagggcattcagtgatgttttagagataatagcatacgaaaataggtcaccagagacaatgttgttgttttggttcaaaacaaactcataaatgagttaagaaaaaaatggcgaagagagaccaagatgacaaaattatagtgaagtcaattatgggcataaattgacaccggtctcactgttgtatttagaggatacaacctatttataaacatgacgatatgatgcgtataaataataaaataagtgactaagcttactcactcatgccaatatgaggagaagaaagaaaaacaaagattaagagaaagagtataccaaggtgaggtctctctgcaacaacagcgattctagccatctcatatcgatctccaagtcttaatcggtgagagtgcaacccaaagaaataaattaaaaccataacttcattaccaagatcattaaccatgagcaacaaataagctttaaatataaaagtataagattaccatccaaatgaaagaaaccatgatttacaacgataataagatgaacacatccaaatgaagaaacctgactgacatggtcaaaatataagtagattccacaaatgacattataatgaatatttttcttaagcttgtaaatatatacagttgaacaagtacataaaataagtatcataacatgcaaatcatgcagagtacattacagtatatatcactgactgtgcacaagaaagaaaaaaaatagattgaaacttgacaaaaacataaagttgcacgaccttgaataaagatgtatattctaacagaagaataaggaaaggaaactcaccatctcaaagccatcttaataggtgttgtgagacaagatgtaaatacatcagcaagaaagtcagcactttgtggaagagtctcatgtgctttcagaggagctataagtaatctaatcatgaagttgccaaacaattaaatcaagtcattatactaaaatatatccaagttacataatgaattcatgcaacatagtaatattaattaccaatatatacatgatacatcaagtcagtatatgtttgagttgatattttatcttaattaaagcattcccaatattcaaaggagcatagcaatcaaaaactcatatggagggtgtcttcaaccatgaatcaaggtcattgattggcaaagggatatagcatatatggaggtgtcttcaaaaaaaattaaaatccaaaaataaaattatcggatagagaaaaaaatcaataatcaaagtaaagtttaattaattaattgaaacgagtcttgtggaagagaccttgatggttcggacttgttcggaggtgaaggaggctttggcaaaagtttctttgtcaataaaaacgactttcttatacagaagcttttgaaggggctctaaattggaagacaactcggtgagatctgttccatctttcgcgacctttctcttccattattgttctacttcaccctccttcaacactgcttttataaagagtataataaaattatttatttaataataatttcaaaattgataaacgtgctgcaaaattgatggaaatttcttatacttctcaactgcacactcataaaaacttaaaaattattaatattttcaatggggcaaaacattaaacaggtaaagtgcggtacaaaagtgaagtggtacatacaagacatcatacctatgaagaagaaaggtcttggtaatgagattgtagaagatataaacaaactgaatgtaattgttgggaaggacgagataggtgatcttggagtagtaatccaaggcatggtagagtcgacgagggagacgattggaatgcggagatgatgtgcctccaggaaacttctatcaatctcaaatgtttcaaaatttaacacaacaaagaaaataataaaaaaataattacggagctgaaagcaattacaattttttaggaaattaggtttactatctttttaattttcctggtttccagtttgttggagagatacgtgggtaagatgatttttttttaatttaaaannagattgtttaattttttaggtttatttgttaacgggag

SEQ ID NO: 36832 - DNA, 9519 bp, Cannabis sativa
cataaatggaaaaattattttgtcacctaacttgccaaaaaaagactttacatatataaaagtgtatcataatttatttaacattttaaaatatatacttaattaggtcttctacgacagccaaagtggggtcatttaaaggagttgcatgatgtaataagaaattgttctcaaactttactagcgggagcaccaacaaatatttccttaggccaaaatcaatcggtaataaaaatcaccaatagcataatccatttagtttgttagaaatataatcgtttttctttttttaatattttggaactatacttcaggcatttattttcagtgaagaagaaagatgtattgcatttctcatcaacagtgatataagaaataactatactgtacaatttcaaaatcaatcctacatgttgatgccaaaatctataagtattcttccagattgtgaaaatgttattttcaacacagcacaggttagtccatatatacaaacatatataatatatgtatatagctaatttaaacttttttataatttatagtataataagtaattaattagtgtacatagaaatatcaatttggttcaatgtatatgttgaattataatatttacaggtaagaacaaattccaacatgagaattacaagaccaattctgagatttgaattaatggaaagatggacagaatataaggaagttattccaaattttgaagataccaaaataagagctagtacactacttgagcatatgaatatgaccaaagatcaaacagattatatttggtatactttgaggtaaatattccaacactaagagcctaaaaataatgtacttatatgcacaaaattaattattagtctgtaatagttaataattgttgtgattggtcatcaagtgaagatgttcttagatctaacagtttataactgttttaactaactgtttgttatgacagttagtatcagtccaagaaccaaaagctatatatagccatcccttcccatatcattgccaccaattttaagagagatcgttagatgagttagtgagctagttcagagagaaaagaaagttgtaatggcctatcgtgtgtttgatctttagtgccacaagtgagttttgtgtaaattgaagaaaagcttcattgagtgattgtgtcaagaacacattagtgtacaactgctttgtaatcgattctttttagctcaataaagatcaaagccactggggttgctctggctgaagagtagacagatgatattacgatcacactgttcaaacgtcgttatttctgtgtgttgcatctagttttatgttctcttgtccactgttctaagttctgtttttcagttctttgtgtgtgtcaactaattgatctagatcaattgttctactatttttgtttatcatgattgtccatgagttccatgatcttgctattgatcacaataattggcataagagctcagtcgagggaatatcaaagaatcaagtcaagacatcaagaagaattaaggtctgattagtaatggcttctgcacgttttgaaattgacaaattcaatggcaacaataatttttgtttatggaggatcaagatgaaggctttccttgtgcatcaaggaatttcagaagccattgattgagaagcgcttgttgctcttggagaagacatgaagaaaataaaagaagtactaaacaaggcacatagtgcaatacttttgagtttgcaggatgaagtactcagggaagtttcgaatgaagaaaccgtagtaggattatgggagaaattggcttcaatatatctgaaaaagtccctggccaacaaactttatctgaagaaaattacacaatgagaatgaatgaaataaaggatctcaaaaaatatcttgatgagtttaacaggataatcttggatctcagtaccataggagtcaagattgaagatgaggaccaaagaatcctattgctgagttcattataccaaagagttatgaagattttgtagacactattctatattgaaaagaatcattaaccatgacagaagttaagtcaacatcaaactcaaaagagattcagaaaaggagtgaagaaaaatcaatggctatggtgaagagctgtttgttagaggcagatcaaaaacaacaaaaaatagaggttgttttcacaagacaagtcacaaaggcaagcaatacgaaggctcaaatcaaattcacaaaccaagatcaaattccaagataggaaaacagtgtcactattgcaagaaagagggtcattatagggatgaatgcagagcattaaaggtcaaacttcagagacaaaaataatgaaagaggagatacatgggtagtgacagatggttatgagtcagcagatattttggttgtatctagccaagaatttggagactcatggatacatgattcaggatttcattccacatgacacccaaaacagaactgtttcacagtttcaagaagcttgatgggggagcaatcctattaggagataataaagtatgcagagttgctggaattggaactataagaatcaagctccatgatgatcaagtcaaaaccatccaagatgtcaggtatgttcctgacttgaaaataaattttctttccattggagaactaattgaaatgggtcatactataaagatagactgttcatttaaggtcatgaaaggatccctagttatcatcaaaggagaattgagaaatggtatctattatctaaaaggtaaaacagtcactagtgagagtggcatgtttgtcaaaaatctagatatggaaagcactagactatgtcatctaagacttggacatgtgactgaaagggatatcagtgaattagaaaaacaagggatactcaaagacgaattaggtgagaaacttgagttctatgatgattgtgtctatagaaaatgctacaaattaatgttcacaccagggaaacacacaacacagggaaagcttgattacatacactctaatctatgggggctttcaagactaaaacattaggaggtgcaagttacttcatgagtatagttgatgactatactagaaaagtctaggttttcttactcaaaacaaagaatgaggatttcaacacctttgtcacttggaaaagactcattgaaaaccagacagtgaagaaaataaagaagctcagaactgataatggattagaattctatttagatgagttcactaggtctgtcaacataaaggaattgataaacacaaaacagttgtgaaaaaaccacaacaaaatagacttactgaaagaatgaataggtctttattagaaagggtgagatgcatgctcaagggagctggccttgaaagaaattttggggtgaagcactaaagacagcatgctaactaataaataggtatccctcaactgcactaaagtttaaaactgatcctcaagagatctggacaggtaatgttccaacaattgatcatctcagaatttttggatgcacaacttttgctcataccagacaggataaactagagccaagggctcacaagtgtttgttccttggataccttgaagaagtaaaaggatacaagatgtggtgtttagaagaaggacataagaaatgcataattagcatggatgtagtgcttaaggaacataaaatggctatgaaaactgcagcaaccaatagttgtcaaaataattaaagtgtgacaggcatggaaatacaagatgataaggaagaagaagagaaattagttcagttggatacattggaaccaacacatttagagattgatctagaagaaattgaagaagaaacatctccaacaaactcacaagactatcatcttgttagagacagagaaagaagacagataaaacaaccagaacgatttggatttgatgactacacatcctttgtacttgcatcagcagacgaaaatgaaagctctataccaagtacttaccaagaagctattagttctaagaattggaagaagtggcttgctgcaattgatgaagagatgacttccttaaaaagaacaagacttggaagacagtcacaaggccaccgggacaaaatttgattggatgtaaatgaaccttgaaagagaaaaaatgattgatgggtgaagaagtgagatacaaggcaagattagtggtaaaaggctttaactaaagggaaggtatcgatttcagtgatattttctctccagttgttagacagacctttataagaattatgatgaccaaggtagcaaaagtttaccttgaaatggatcaaatggatatcaagacatcatttttgcatggtagacttaaagaataaatctacatggaagaaccagatggttagtaaagcagcaaatctgatcaagtttgcctattacaaaaatcacttcattggctcaagcaagctctaaggcagtagaatctgagattttatgaattcatggtcagcattggttataacaggagtgactatgacccttgtgtttattataatagtgaatcaattcggttactgttatatgttgatgatattctcatcattggaaacaaaaaaaaaaagccatagacaaactgaaatagagcttaaatgtagaatttgaaatgaaagataggtgaagcaaggagaatacttggcattgacataaaaaatgacagactagaaaaattatctctctctcaaaggagctagatacagaaaatgattgacaaattttgcatgagtgaagcaaaaccagtaagcacacttttggcacaacatttcaaactcgctcaaggtcaatctcccaaaatagaagaagacaatatgtacatggatacgataccttatgcatcttgtgttgggagtctcatgtactgtatggtgtgcacaagatctgatctggcttatgcattaagcatggtaagaagatttatattagatccaagaaaagagcatttgtcagctatgaaatggatacttaggtatctgcaaggttctatggatgtgggacttgtctatgataacaagtctaaagatgaaattgaagtgaatggttatgtggattcagactatgctggaagcatagacacaaagagatccatcactggatatgcttttacagttctaggtggatgtgttacctggaaatccaacctacaaaaggtagttgctttgtcatcaactaaggtagaatacatggctacaacagagaccataaaagaggttatttggctcaaaggtttcacaaaagagttggggttcaaatcagacaggataacagttcactgtgacaaccaaagtgcattgtattggatgagaaatctaatatttcatgagaggtgctaacatatagatatcaaattacatttcataagagacatcatagctgagaaggaagtgagtgtgaagaaaattggaaaaaaagaaaaccctacagacacgatgacaaaatatgtgaatttagctaagtttagacttttctaaacttgctaaacatcctcaagtactagttgaggattcatgactagttcagcctcaaatttaaatggcttactcctctcttaatgaccaaggtggataattattgtgattggtcatcaagtgaggatatttgtggctctaataatttataattattttaactaattatttgttaccactgttagtatcagtccaagaaccaaaggctatatatagccatcccttcccatatcattggcaccaattttaagagagatcattagatgagttaatgagctagttcggagagaaaaagatgagagaaaagaaagttgtaatggcctatggtgtgtttgatccttagtgccacaaatgaggtttgtgtaaattgaagcaaggcttcattgagtgattgtgtctgggaacacattggtgaacaactacttagtaatcgattctttctagcttaataaatatcaaagccactggggttgttctggccgaggagtaggcatgtgatattacaatcacacagtttgaacctcgttacttttttgtgttgcatctggttttaagttttcttgtccactgttctaagttctatttttcagttctttatgtgtcaactaattggtctttatcacttgttttattgtttttgtttatcttgattgtgcatgaatttcatggtcgaactatcgatcacaacaataatgtatattcattcatttgttacttactaacatataatttctagagtacataattcggtaataacaataataatgaacataaaatatgatacatatatgtaattttaaaaatgtactaaataatcctttatttggttgtatacaggttcgaccacaatatttcttcaaatgaagcaatgcttcatgtagagtctcttgcacatgttgcacatgcttttttgaatgatgactatctgggtaagatattgaactactttacacattcattagcattttattatttaaatattattattacaatataattatatcaattttgtttgtgactctaaaaatatgcagtgtttaaaaattttctcgaattataatatttttataattatattccttcctttaagtttgaaatttttgtactcttaaaataataaataattaaccgctttcatcttaattcttcaactagtacaaaatttatcattctttgttaaaataaattaattaaaaaaatctaatttttttattcatttataaaaactctagaaattaaattaaagaaaacatattcaaaatctaaaaaaaaaatatttaatatttaatttttaagaaaaaaaaataaatttacttaaattaacaaacatatataattcttaagaaaataatagattaagtcaaattaacttgttgatattcaaaaactaatatttacaaataattcaattatatacctaaattattatttccataaaaaaatacaacatacaaatttcttatttaaaattaaaaataatcaattaattcataaattcacaaatcttatatacttgaataatcttaaatttgtacacaaatatgcatatcgaagccttgggtggtgggattgttggaacttattttaccgtgatcttaatttaccaatatgtatgtttgattatatatctataatttaacatcttaaatatgaaaatcctaaaatgataaataaacatgtaaaagttcaagaaaccttacattggttgcagcaaaaacaatatgactcattccattaagcattccaacccttgttcctttttgtcgcagaatagttacaagtattgaacatgaatgctcctttaaattgacaaacaccttctacagagtcttccacagtgatctaagtattgccttgaattatgtgggcaatacctttatcactaaacgcatgaatttgagaatgagagagagacaaagattcaaaattttctaaaggtaagaaaaatcttttctttgatttagctttttaggttttgatagacaatttaaagagaattagtgaatcaaagcctttacgttcattttatagagcctctctaagtttaggattttagagtagagtgagctttagaaaaagataacaaatccaaaactaaagccttggccaaaatcaccatgtggacctcaaggttttgatgtttgccattttgtttcatttaatgaaacgtttttatattttcccaaaatactatttttttttatgaatcagagaaattctattacaccaatcatcaatttgtacaacctaaatgacatcttgtaaaataaggcctatatgactatatacaagagagactaattacaataattcaaacgaataaacatctttttgggttacaaacttaggcataacaaaagttatcttaattttgatttgccactttgtttgttatactaactgttgcgagcttgtactagttgagttccaaatcttgttgtttctagcttgccatatgtagtacactagagttgtgatggaagcagctgaaacctccttaaacttgctttctttagtcctatatatcctcctaaatagcccctgcaatgagttcaaattgaatttccagccaagccattatcccagctgcattagacaatcttgagaaaaatagattcaaaaaacagatggtccacagtttcagcagccctactagaaaataaacaactcgggtcatcagtgatgtggaatccgtggagcctctccttagtttttaatctcttcagcaatgcaatccataaaacaaagctatacttaggagtattaagtctacaccaagcatgtttgctccagtggaaatgctcttctgtgtagtttagtagcttgtatccagaggaaataagatactttcttattgtgaattggacaggatccatcaagcttttgatctcatcttcgatctccaccaatttcctccaataccagctactctgaggtggggcattgtaaccccaccaatcctcttccttgatgtacacattgtgcatgcacttgacccacatattatctttctttattgtattgactagatgtttttgattaaggtagctcgattccagtcaaagatgtttaaaagtcctattccaccagctttcttaggcttgcacaccttgtcccaagctaagctccctgatcctatcatttggcttttacctttccatagaaaacttctatcgatgtcttgtatttctttgaataactttgttggaagtatcataatttgactccaataagtatggatagtcaaaagcacagaattaatcaagaccctccttcctacaaaagacaaatttctggaactccataccttgattttaccggtcattttctcaacaagcactctacaattagaagaagatatcctcttaacacaaataggcatgcctaggtacttaaaaggaataccttccttactgaatcctaagatgtcaataacttttttgatctcattttcctccatgccactgcataaatagcagattaactactcttaggctaaagaccagaggagattgaaaacagttttaaccctacaacataagatagatgcttttaaaatcacctctgcaaaataggggcacatcatctacaaaactcagatgatgaagcttcatatccccacatctttcatgaaatcagaaagctcttttccttcaaacttctctcataatcctacttaggtattccattctaagaacaaaatgttgaggagacattgggtctcctcctctcagtcctcgttagctttaaagaagccatgtagggttctattaaacataagagagaacttaagagttgtgacacattgcataacaagttgaataaacttgataggaaaatgaaaagcatgaagcatctcctcaagaatccccattccatggtatcataagctttttggatgtacaattttatcatacagttaggcttggtgttgcgatatttagcacacgcaagtgtacgtatcgtttcaagtagtagactcactatgagtgaggtcgatcccacagggagtgtagttaagtactttgaaattaa

SEQ ID NO: 36833 - DNA, 3409 bp, Cannabis sativa
  modified_base (3234)..(3240): a, c, t, g, unknown or other
gtaaaataatttccaacagcaatgccaattcctgagatgaagagttagaaggggctccgagatttgacatttttatctcagagtgaagtttgaggattttgtgatcgaatgcgtagaagtcatgcgcgtgtagatctctcaaaacttctctcatctgaaaaataagaatatactcagtagttagcccccacatcaagccctaagttaagaaatagaatgggggtcccctaaccactgagaagaggccccctccggatgatagcatattcatgaaattagaaatttcctatgtcgagcatcgggtgctaattgcaccatacagaagaagaaatggtacaagaggcaaagaaaaggaaaaaaggcatgttctctaaaccttaggtatggtagccatagcccaagaaataaacagaagatggtcgataaaaactctcaaacgaaggtcatgtagtaaaaatattgtatttatacaaaaaaatcaccaattgaaaaaataaaaatgaaaaataattacaaatgggagaagtttaaacggtcaaaggaactagtacacggtgcctaaaatttttgctagtttaggattctaagagatggcgtgaaagtaaagatttgaaaaaaggggagatgaaagacatttatacacccataaagcgatttgcatcgttgcccatccaacaattctaaattgaactcacttaaaccccccatgatttgatagctagggcaagttgtcagaagcatgagaataaacaaactattacactactcaagcctcagtctgacaccctacaattaataggagtatcaaaatcaaataagtaggaaaaatgagtcggttctaccagatgcaagggaaaaatattgaatgacattaaaaagcctatcacgcgtggaagcatgacatcaatagtgagagatgagttggaaagtaacatttcacaaaaattaagaatttgaacttggggtaaatgttgcctaggatttttcccaaaatacgtgatacttcaggaaagaaccatgtggcaatgggacccttggtataggacaaactatgttaaaccacattaagagcttgataatcaagaagagctacaaaagagtagtcatctccagaaggatcctctgggaggatagttggtttgtctttttctctctagaagggagctccacctagagaagagatattaggattgtacaaaatatggcgtgtagcctaaggttaagttactgtgcataaattttatgcagcatggggaagaacaacttaccccttaccacaaaaggcgtgctagagggttcaaacccataattgtttgacttcacgatatcctatgcctcatttgacggctacatcatgaactgtcaagtcatcagtaagagagagacaagtctagtctcatcaaacaaatacctatatcaagcccaggaacatactatatattaggcaatcatgccctataatcaagtttggaaaattgtacaaagcatggttcatgcgaacatgacaatggtgaccttttccccaccactatgaacctacaaatatcccaaagatgtaggaaaaaaggatagaagcattgactctctgtaacacaattcataaatataaatagttcatggactaagactcattaatggcccaaccacctaaaaaaatctcttctttaatttgcattacttttttaattaattgttgtcgaaatctcggtcaacgtattttaattaatgagaaaatttatttaatttaaaaatgaatattattttaattaaccaataattaaatataattaatttaaaaataatttaaaaactaattagttagttaattcactcatttttatcagctaaccaaaatattctgattttttaatttatttataaaataataataattttaatgatatataaaaataattaattatttaatttgatatttaataatcaaaattcattttttgggaacatgttgtatgtgtgtaacacatagtgacagggcgatgtgttacacacatatgttatatgctaaggagggcttatgtatctttagattctctaattttttaattaataaaatacgaaatatctcaaaataaattacgcataattaattatatttatgtatttaaattaattctaaattaaattagatactcataattatctaataattatatttatcacatagtaaaataatatcatataagtccttttgttcattgtttgtatttacatttgtcagtttttaattgagctgtctcgggaaccatggacttataacattaagcttcaataaatcaaaactaaagaattaaattatttcattatatcggttaatttattatttctgatatttctccactttgaattcaaaattgaactctttatgttatagatatatttttatagaaatattttcttaagttgtctatcaatataatcatcttacaatagtcaaccctccaataaattggttcctaaattagaatagaataattattattttacccttttaatttaattcttattctttaagtatcattaattcactagtgtataattaatctataatctgattatagatttgagctcaaaatcattaattaccagaattatctcttaagggaaccaatatacaatctgttaagaaggattggattcttttttgttaattcatgttcctagtcatccatgtaattaaatttccaaaacaaaagtcactagtctcactctatggaaagaccttaataaatgaattaaaatttcatttaacatgaactggggttcacgaacactcaagatttggattaatctataaacaatcatctgttatgatatgaacactagtctttattattaaattgcttttgtataaagacttttattcgtatcgacccttgctatatataatcatattatataaaatgtctttactgagatatctaactacatcaataatctaaatctagatatttataccaacatgatgttggaatatattttactaggatctagatttactaactagtatgtttattaacatcctaaatatgaattctctataataatgtaaataaacacatacaaagtttaagtaatattacattgattgcagtggaataacatgtgtcctcccactcagatctctaacccttgttcatttttgtcgcagagtattatcaagatatgagccaaattctccttcaggtgttagattcttcatagtcttacacactnnnnnnnagtacttgacttgctatgggtgggcatgcactctttcactataggctcgaaatttatgaagagggagagagaggatttcgaataggagaaggaataggggctctcagaaacactagttgtctaacagaatgtaaactaggttataagagttggatgagaatgagaccat

SEQ ID NO: 36834 - DNA, 6331 bp, Cannabis sativa
tttctttttaataatcgcaacataatatgaaaggtgttgaaaaatgtaagtatagttacacttttcaatatgttgaaaaaaaaaagttacattttttaatatattattaagtagtcaccataaattaatttatgtatatgttattattactgtattaatggatgatgttagcaaatagcaatgaataatgccaagtcaatgcaacgcatttgggctttttacaacctagtttgagctacaacgttaaggccaatacaaatcatataataatagaaaattttacactttacgttcaaaatttattttttataattttacaatattctataaaaacacaaaaaaattacatgaaaataacataaaaacaaaaacaaaaaaacatcaaaataacacaacataaaaatacatcaatagactattatctataaataaaatcttaaaaattgtaaaaataaataaaattcagcagggccgtattttttatatgacttttttattattatttgtgtgtatttataaaattaccctataacaatatttgatcaaatttcacttgcatcaaccagctatgaggtctccataccttcctttccctccattaaattaaactttctacaagtacaagctaaatgataaaaacgattaggctacaaaatcaaatctctattctatttctctaccacactggagaattgagctctttagtaataaatgtccaaagagcaacccagaatttcacctatccaatattccagtttatcttcaaacacttacaatatctttctaactagcaacagccaaaacagaaaagttccaagcacttctagtcaagccattagacaatatcctgagattagtataaggatgaggctcatgcataatgcttttcagttaccacgattggggcagttatttgcaaaatgtgaaggatcaccgcaaacaaaacaccttctaccagaaactggatcaccagttgctgacacaaaagttacaccagcaccacgtgctgctccacggccacccctgccccgaccactgccctgccttgaattagatgccgaggctcttatggttgaacgctggccacttcttcctacagaaccattattgaggctatcctcccacctgtgcaagaaaagaggccacatttatcaaccagtgatataatcaaggtttccatcaacacacaagttacattcgttgttttcccctttttgtttactctgcccaagtcatatatctagatgccgaaaaaactcactagagcagctgaagtaatttcttaatttgcaattatatatttactttaagaaacaaacttgtattaatcgtcaagctaatacaagaaaaatgtggcatgaacccacaatatgaaatacaaactttcgaatcacaatgaaacattgtgacagagcacatcctcatcaattttagtgccagctacgatttcatcatcctcttaacttttcttttaaattgtaaatcatgctgcagcagcacatcctatctaattatctatcacttcctaaagagaaatgcctgcgtaccattctatcctcatgtaatctttattgtgcggatgcgtactgattattaaccatgtataatgctgcatactaaaatattcagaagaacaggacgtaacacattgcaccaggaaatgcaaattttactaatcagcctaatcagattgcattacattttattggtttcaagaaataatatggcctaaagatctattaaagataaatggaccaatgagaaaggaaaaggtacagcaattaatttggaccagtgactaaaagtcaggaaaaaaaaactttttagtctctagttcgagtaatgtgtacatacacaaagaagttgcattcttgcgactggcatgagtagaacttccgtcctctgttatttgctgtattggcagtccgcaaagcacatggtgctccgcaaatatcacatgagattgtggattcatctgcacaagatgaagttcattatagtgaaaccatatatggaaacaaaatgtaaactgaaatcatcaaatgtatattagaaaccaacatttgaaatggtgcattaacttgtccatttcctaaaattgagttttaatgcttcaagattaacggtgagtgtcccagtattaaggctaggaaagtaggcttgctgatatgataatttatgcagccataactaattgcgtaatagtactaaaaaatagaaaaagatatatgagaatggaaagagacggcaggtatgaagtaacatacaagacttcgaaagaacaaggcaacagaggcatgtgaaaaatttcgagcatgtcagaaagagatacacgggaaagcaaaacaattcacccattctttcaacaaaaaatgttacttcataacaactgcatctctacattttaaggaacatcgaaaatattaaggaaacaaaagaatctactacctcaacaagtaaacataaattacaaattacaattttataaaaattattagatacatgcaatcttgcaaagacagattctctaggtgagcatgaatattctgtacagtggctggactgggtgtgaaaggttttttattattattagacactcaccactctgctgcacgttccttccacgtgatctagccccttgatggcctgaaaactgggaagggcaatcagttgaagaatgcccaccctgatgacagtatatgcaagcaccttgtcgactattactttgttgggcactgcctgatgatgcagtgggtactcgccctcttgctgaagataatattaaactaatgatcatattagattggtttcaaatttcttccatagtgacaagtcatttcagataagaatgtggagaatgtgggtgtgtgtgtctttgtttagggtatttttgtgttatttacttgggttttaaactcactccaaggtataatgcccaaaacatttgcaaggaatttgtcaggtgagtagatatcgtttttgtataataaatgaatgattcaatctatgatcctcaaatactgacctccactctattcactagttatgtaaaatattatatggaagtctacatacataattatatgcatgcacatattgttgaaaaagcaataaaactacattgtgattatttgtacagcttctagaaactcaaatgagattgtctcagaccttctggttaccttttctgtacagttttattttcctattaccttgtacatgtctcctatattttgttcaattccaaggtcaattccattaaagaagaaattggtttcattgtgtgacaccaaaagtgtagatattttataggtgtgccaattataattgataatatcaaaccttgtaatgtatatctcaagattgtgaatagatacaacactcaacgaaattactagtgtatcattgcgtactagttcagaatggaaataaatctatattatttgacatggcgagatgaattatctggacagctaattgagtttaagtatatagcttaaagactcctacattgtgaatgaagaacccctagagatgtagtataaaatatctctggtctctctctgaacttccctgtaggttttgcagagaaaagagagggccgagatcagatctacagaattgctgccccctgaaatgggaatagccttactgtggatatcttctactgatgagaaagatcaaagctagcataataaagacctcaaaaagaaatggcatggcatacatcttcaattcgagaatctatcccctttctcagaagtgatataagaacatcaatattaaacaaattctgatttggttggatgctttatttatatatattttttcatgtatacacaacaaaatattgcagagacgacgaataattcggaataaattagataacgaagaaaagtaactataatgataggtatatcaagttaaatactattgtgcagagatttctcaggaactaacacacaactacacaagtgtacaaattattgttgcacatattatgttatcaaaataagaaaactacttttcttcatgtagagtccaattgaaaaattcagaattccatttaaaacacaaaaattagagcttgagaattttgcatcatgtgtcttagtgaaatatgttcacaaactaactaaaaaataaaacaaacctgacgtccggttaccggttccacaaatttcaattaactgtttaagaatctcatcacagcctccaatgcaacctaatttatgtcaagaaatgcagggttcaacttggtcaaataaggctctttaaaaaaaaaagtattctttactactatgcaataatgtcaacacattaatagttaatgactggtatcaatataaaattcgtccaaatacagccaccatagtattcctataatttgtacatacccaaatggctagcattgtagtcaggaggaatttccagccggcgaaacttaaactgaatcaagtaaactggacctattgaaacaaaaattgatatgattaaggaataaatgagatttcaaatagtaaccacataccaaactagaaaatagtgagtaaatgctttctagaactatgctataaacaataatcatatagggggtatcaaaaatcaacacaattatggtgttttaatctcgtttttttgttcatgttagtactatttgtagttatagcaaacctcctgtaagttttcatcctttatggcgtccaaaacaaagttcaaacagcttcttgcactcgtgctcttcatttatttattgttttgaattctgtttttagccgggtaaactattcacaatttttcggaaacttacaagagggttactataactacaatgaacactaattaaaacaaatttggattaagacaccatatttctcaattatatatcgatacattattttattttgtcagctgaaaccttacaatctttgggaggtaagggccgctggaactttacagcccatgggttggaaaaatcaccccagtgcaaaatattgatagggcaggaaataagatgtactaacccggaatttgttggtgaacacttctaagtatatgcgtattttaattacttccaaatgacttctattaacagttgattataattcaaatatcataccaatagaaaaaataaaaaatataccaataaatcattggactttgccattactcacaggggatactatacacagtttccacattttaaagtatacatcaaaggatgaaaatcagattaagacaagaaacaaaaacctaaactggcattcccatttggacaaacactagaaataatagtagcaaattcaacgtggattaagtaagcatttaaataagtgagcgaactttaagcattaacaataacaagaaacctggagtgcacgagttgcaaatgttggttgttacagctgcttcagatactgatccaggaagccacacaacattcctgcactaaatcatgtaatacatagatgtaaaatttgtcccaaatgtgaacaatgaaaatgattattaagagagttgagaagtttcgatttcagttacagtgaacacatgtcgtgaaaatacaataaactcagctccctaatgttttttcactcaaaatgtgagttccttgatagcaacaaataggggtgggcaagagccatattagctgtaaattagctagaaaatagggtcaattgtaattattttgtttctcctaggttgtataaatacttgacatttacatgaagcatacacacgattctattcaccattttctacaacaactaaacaaagaaatagaataaaaattatttcatttccattgcattccatttcctccaaccaaacgtcaccttaatgtttttttgctaatatgaaaattaaaatccaagtaagataccaatccaattagattttgaagcttaattggattggatcagatggtgatttttatctcaataaattcttccaactaaataaaacaagtggagtatctttcaactttatggtgggcaaatatcatactgccaatgggaaaagtctttacttttcattccctagtgttttagtactttcccaaccagattaccttgaagccaatataaactataaagtattttatcaaccacctgagttgtaaattaagtgcattagattcatagactaggtcaccaacctgaggataacctaagcatccaaccatgaaattgccatcctgcatggaggaacaaaaatagtttaatgagaagttgaaaagctaatcacacacatgcataaacataagaaggacgaagaggatgccatattcctttgtgttatattttcgaaaaggaaatttgggggcaag

SEQ ID NO: 36835 - DNA, 7437 bp, Cannabis sativa
  modified_base (3742)..(3757): a, c, t, g, unknown or other
  modified_base (3825)..(3829): a, c, t, g, unknown or other
agtttaggaaaatcattaaagtggtcatatatgaccaattttaatgattatacatttaggggaaaaattatagggtatttaaagcatggaatttcaaatttcccattcccaaggtgtttacgtaaacaatattttttaaaattgggaccataataatcactagcatgattaatcgatctcagcagtcggcaccctatgatcaatcatttttagaaagaataaataaataaatatgagaaattataagagcaaaaggtggcaaaatcgtgctatttgtataaataatatttttatttaataaataatataataaatagttaactaattgtaaaatgatacatttatatcgtggtgaataatttaagatgctaaataacaatgaacaataaataaataaaaatgttaaaaatggtgtttagtactacctaatatatcatgtaactatatataattaagtattgagttttatataatttaatttaataaatattatataaaaaattactaattatttacaatgcaatactttataatgatattgttatctaatagtattaaataaataaataatatacaaaggctgaggagggacaattaatgaagagagaaaagtattgggtggtgttagaggtagaggtgggcacaacaacacaagtgcgcctttttacttgaataaaaatccttttttataaaaagaaaatttctcatttttcaagtgagggcgtctggccgtttgtgttatcgaaagagtgcttcaacttgtcctgtgtaaatgttttacttaattgcctcacaatttgtcaacgccaataatgtacatgtaatgtgaattatcaaatgaaattcatatattatcaacttgaatcaatcaattttgtcaatattgatgcaatttacttgtgttgctaagggttatatataatatggtgtctaatgtcatatgatacatcatgcactcccactaaatagctggcccaagttctaattttctctcttctagtataatattctatattccaagaccctgcccttggccaaccatttttcttttgttgataaaaattacttgttaataactttctatctaggtatatctctctggcgacatgttttccaaaactcatacttgacaatttccaagatctcaaatttcttgggcaatcttatttactccaattaagtattggagacccaagaacacaacttgtaattacctacaactcaaagccaaatacctattattatttgtatatatgttgatgttatcccaaaatttgtcaaggacatacatatttccctacctattggccaggttagataccaaaagcattagtcaaacctattccaggaagaggttttcccaaaggtaagtctcaagatgtctgttaaaagcataatgtgttcacccattggggtcatcagtgtctaggagacacaggcctttgccactaagataagataattgggaagatgcgctttcgaattactactcattttgcgaggaagattctatatgtaatgccctaatatctaagctacgttacgtgatttttaattattctactaatatttgctaattaatggaattttgaattgaaagtgtaattattataacatttagtaatagttaaaaatttcttaagagtaaactttgttgaacatttacaattcagaatctcgtaaaatacatacatactatattaattctcaaaagagttgtctaacgacaaaacaaaagttgcgccagctgatttttcatatatttcaaccatctaagtctagatgccaaggtatgtacaatctttattggagttcttgacagactcagtaagaaaatcacacatatagcaacataaataaataatttgtaactgagcgcttatatacttatttaccataaatcaactaattgtgtctagcgtgtaaattgagatatgaactttcgtacctgtagtatgattaaccataataccaacctaattctaatactctagtcgtactgatgttggaatcattattctatattattcaatgccctctagaatcattatatatcagtatctaagtgtatccataagtacatccatattactatccctagtatactaggtaaacgatatcataaacatgtataactaaatatgtgcatatgtgcatctgaatactaggaacatgttatacaataagtgaaatacaagcttttcgaaatgatcgaatattacttcctttgaagtgttaattatgggaatgaattcaattattgagctcaaatctataattggattatagattaattgctcattatgaattaggaattcgagggataattaaaaaaggtaaaatagtaattttgaccagctctaattatgaactaatatattggagggtgaactacttatattaattatattaatggactacaagaaagaattctttaaatataattatatattgtctaagagtgcaattttatatttatagtaagcaataatacaagtaataaatgcaagctttagatatttagagaattttggatacttcagggtttgtcaaaaactcattgcattcaaatacttggggttcctaatgctctaaaatactttcaactttcaattactcattgagaaattaactatgcatataagaagttggcgctcaagaaacatctcttttacaggtaatgtcattttaatcaattcggtgttattatcaattcattcctactcgaaccaaatcatgataattctgaagagattgttaaaaaagatcatgggcatctgtagagcttttctttggaccaggaaagttgcatctattagtcctggtagtatttcttgaaagaatttgtgtaaaccgaaattagcaggaatccttggctttgaggatagttttaactagaatattcctgccataggtaagtaactttgggtaatttccaccaaaaaagataatttttaggtcaactggattcataatatttatatgaacactactacaaatgtgccttttagcaacactctttagtgatccgcacaaatgtgcaggtcactaaaaggttaggactgcacaaaaagactctaaaaatgcagctttagtgtcctacaatgtgggtcactaaaaaatatgtaggttcactaaagagtaactctggtaatttctataactattttttagaaaaatatatatattgacctatagtgattcgctaggtgcgattgggtaaacgtgtcttaacctgcctggtgagtcactaaaaattatttatttatttattttttaaaaataatttatttgtgtgtccccaaaagcatgactgagaaaatgttcccaaacctgcatagagcatcactatacctgccagacttaattaataataataaataaaaaataaaaaaggacacattatatacattcgtccctccctcttaagtcacacccagatgaaaaaaaaaaaccctagctatgtctcccctcttcttcttcccttttatctaatcgcctcttaatttatttctcatggcagttactactgctactctagcgaccagcttccaaaatgccccactaaggcccgacttgctttctctccaaaaccttaaggactagcttgctttctctttcttacagtgtctctccactcgtcgcctctttgccttgtcttttctctgccttgctcaagataacacaacctccagcgaggttaaaatttgaactttgttatcatttctctctctctctctcnnnnnnnnnnnnnnnntctctctctctctctctttcctatttctatcgccctttctctctcccccctttctctctctctctctnnnnntctctctctctctctgtctgtcttatgtgcagtggagcttgcagcttgatgttagaggttggggcttagtgttttggctttggatttgaacaacttttttaggtttattttgattctaaaatttaaaatgtataagtgatcttagcttttatttgtttgaatagaaactagagtttgttttagctcatacttttgacctcacttctagccaacgacagtgagtcataaataaagcgattaaataagataaataaaagaaagcaaaaatagtaaagtgaacatcatattttaaagagattcagccccgtgagaatggtaatagtctactcccattgtatttgtattgacttaagagaaggaataaagtgttcttcctctcgaaagctcttataattgatctctgagttatttcccctcttagatgtaaagaataggaaactaaagtgtgttgcctctattctctgactcaatcccacaattatagggattgtcttcgtgtcttggaaacgacaagattgatctctagaattgccattttacacgcttcactcggcataagcatgtctgcatcttggtcggacatcttctcgaccatcctgtttggctatcctagtgttacagatgttaaatgaccattaatgggctgctaggaatactttcctctgccaaggtattaaaaatgtgggacacgtgtcatccattcttattgccacgtcaaggtgtaaaaaataggataacatttcccccaaagtctgcacgagaccttcttggtcgcacgtggacttcactcagcttggagtcttgtccagatgggtgacgtgtgtctttttccgatgtgactctgacaaggggtctcttcgatatctgaccatttaatgcttattgacggctacaccttgaatgacgattcgatacttgagcacacttgacggttgtactccttgcaatgagtgcttaacgtctacttttgggaagaaacccaaaaattcaaaatttgaaatgactaattctgtttttagattgcttataaataggactaggaacccttagtaatcctttttagccattttaattctcaaaaaccaaagcaaaatattttcagccaagttttctcccaaattctttgagaaattcataggaaaactcttgacgataccatcagagcagggcaagaaagcttcaaatcaatgagtaagttctttattcctttcttttacacatttgtaatgaaatacatgtatgctttcttaaattttttgctgtgaattttgcttgttcttgaactattctaggtttaccatagaataactaggtttaggatttggaaatttcattcatgtctaaccataacatctgattatttgattgtgctttaattttaaccttacaatgtttatttccactcgtccataagattttagggaaaatcagattccaattcgaagtttcgaacttctaggattgaaaattctatttctgggtgaaacatttgcttttggttctcaatcaggcctggtcgacatatacaatctgtttttcattcgtaacttcgaccatttcttattctcttgtctcccaccttttgtagatgaaccctggtgagttttggggaggcaagcatcatatcgatcaggatttgctttaactcctatacgaagattacccccgtcttcgtgctagtccatcctcgtctagtgacgatctttcaaattctagctttgaagattgggaagtaagtagcgatcatacaccttccttggagcctgaggtgcaacatgattcccatcgcgaccaaatttgtggtgagggatacaatcgtttcatctgggaacttaagaaaggttggaggcgttatcttcttactaactagacgtataaggtccatccgagcgtggttgacaccttgcccgatggccgctcagtcctagcccctaagggcaaacatgttgccaatttcgctgtgactattacaaggcatacctctaataaagatccatccaaacgtaggatgattgcgcaaaccaaatagattgttaggaaaccatctaccaaccctcatattgcttgtctatctactctggccagggcaatataggcctatccttccatcgaggaggaagaaactactggagatgttgaagtccaggaagtggaggactagggtgaggtccgtcttgctactccttctgaggctaaagacgatggggaagagggggtagctcgggtgctaccatttggcagttataataaggaaggagaacatgtgtttatagtaggtgatgtcttggaagctggtcgggactacatcgaggaggagtacatcgaggctcatcccatgagaaggagagatctgaagggagatcgatggatttctccgccatttatcttgaccatgaaaagattgactatcttttttaggacggtctcttatggaatgtcgaatgcttccttccctcccgcgatcaattagctaccgacccttgagagggttattgtgcttggtcgcgagctcataccaaacagggtgcaatgctgcctttgctcccacacttcaagaagatggccgactattaccacattagtccaacccaattcactccgaagggcctcaagtatctatatgtcctagtcgtgttatatgcctcacaaggatggggtgagccatcccctcatgataccaactggctgtttgacttgaaatcaagccccaagaaaaataggtcggggtatttctacttctctcaaattgaggagtcgtggctgacgggcaccatggatacaaaggtgacaaaaataggtggcttcgcggaggactactattttgtcaaggggatagacaccaatcatactagtttccagcacattctatcctactgtcatcctctgttcacgatggaacttaggaagagggcttaggtaatttttcaactcctttcagatgaacgaaatatctttctatgccattgacaccaactttgtcaagtataaactctatctgactagctttgtaccaaagactggggaggcaacaagggaggttgtgcccgaacaggaggcttcgagcaagaagaagaagaagaggaagactcctccaagtggccaagcacccattgagcggtccatcaggatcagggatggttctgagagggttactcgatcttttgccctggtggctggaaagggaaaggccattgtggtcgagcaggaggaggaggattcttcaaatgatgatgctccttctgtgcttgttcgggagggtgctcctgcccacgtgcagggtacttatccagttttttaagcttatttgcacttacgtagctcgtacttattctaacctccttattttatttatgtgcagccatgtctcagaggatgttgcacgctttgaagaagcaatcgggtgatgcctctggccagaagtctattgtaaaatggtcaaaggtggatgaccttccgcccaagaacgtagactcgagtaccaaaacacctcaactgactgctaagaagggtttgttgtcgagtaaaatttgacaacaccaaatatatgtaataatattaatgacaagaagaaaattgcttgaagaacagatgcgagtattcaacctaga

SEQ ID NO: 36836 - DNA, 5015 bp, Cannabis sativa
aaaatattcacaattttcatgccatttccatttttcaattagttgtaaattcactaaccaatgcagtcaacggaaaatagtcaaagaggtctgtaaaagtcttccagacattggcatttccatacctgtaaataaatgatcaaaaatgatgtcattgatttgcaaaacagaaagtacaaagtatgactaagaaatgcatcaaggtgacccacatgattcaatattctaatgtagaatcaaggcatccatacactatccttccttatgtccagtgacatcaaatttaagtacctaaagaacaaagatcttctatacaagctttcaaacttcagcaaatgttttcaaaataagcataaaggaacaatatgaatgcttatgcaagtaaataaatcatcataagtaacattaagagcattaaatttatagtgatactctggttagcaatctaaagcaaagtcatgtatagaaaacttactttcgtagacattcatcataaaacccataaacttgagtaatctgccacaaaatagtaaggattagttcaatgttcagtatagaagcttcccacagcaaaaataaataaataaaaatttattttgaggtattttgtccaaatttgagcaacttaaattttaacttcttccaccaagcctatatgcagcataagggctaattaggcaaaaaaaaaaaacatgaaacccagcatataaaagaacttctgaatcttaaatcggatagtttaatgtcgaaaatattgaccttgtaaccattatcatccaagcctctattactattagaggaaagagaaaaatagatagataaaaatcaacatacaaacctgacgactttcatggtttcctctaagaatggtgatgcgctgtggataacgcacttttaaggccaccagaagctgaagaatgcagcaaacactgcatgagtgccaaggtttttttatagaagcataaaatatcagagaaaccacttgctcttttccaatcgtgcacgtacatttacttattgataattaatatgcttgctgaataggtcattcgatacttggcatccaatttcacatagtaaaaacaatgaaaccacaaaatttacattgatgcttcgttaagaatagtataaattaaagcaactaatcctgagaactttcacgtaccgtcacagtttcaacagaataatatccacggtccacatagtctcccataaacaaataattagtatccagacactgccaatgaaaattattgcataaaattagttggatgaattttacttgaatgtggactttttaactaaataaaaaaagaaaaagatcaattacatagataagccaaattcgtttgggaacgtggactctttcgtttctgttctttttcaactttctatctaaaactatttcttttcttaccaaactgttagaagtgcaacttgtagtcataagggccactctcataaaagaaatatatttaaaaagattactaacaaaagaacatttattgaagaaattgacttacaaaaaagtcaaaacaaaatgtaaatagtgaagcccaaagagaaaacataactccagggtattaaaaataataattattagtgttactattatttcttatttttaataaaaggtacaataaagatctgaatcaaacagataccttccctccaattcgaaaaagttcagcaagatcatgaaactgcccatgaatatcaccacaaatggtcacaggacttttaacgggctgcataacaggaaaaaaaacaaataatttagtttatcacacttaaataaagttttactgctttctgcactaataaaaatatatctaatgacttcaacagcatataagaaactaaagaaccgaagaggaaaaaaaaaaggaattaattctaaacaacaacaatagacacaattcctaccaatccaacattgaaaatttgagaacaaagttttctttaaccgcatcagcatgaaaggagaccaaacttacagaaaaaacagcaaaaaagctgacttttgcacatttaatccaaaaaaaaaaaaaagaaaaagaagatgttcattaaaactaaactaattaagtttcaattgtgtaaagcttgttgtacctgaacgttgctttcatccattaagacttccttggccttgtcacatagggctctaacctgcagccaagcaaagcaaacaagattacgttaacttgttgatttacaaatgcgttcttaagtccaagaatcacactgcttaaaaagattcctaacatagagatagtaggaagagactcagaattaagagaaacattccaaaaataaatgaagtaaaaaacttaacggattgaatttggcattcaaatcttgcccatattcaaacactgccaatttaaacatgacattctttatgcaggcagatctccttatccaataaatattaaggtaaaaaaatgcactgtaactgggcaaaatcgtttcaatcacttgctccgaaaaattcaattcaggacataaaatgctgtcaaaaaactcatacaaacccaatgacgataacacccatgtattcattttaaaagaagaaaaaaaaaatctcatttctacgcatcttggaactgaattagccttaaatcaactcatttccccctaaaaaaaacaaaactttacacagaacccagaaaaccagtccctttaattttctgggtaaccaaacggaatttttaagttaatattttaacttggggggaaaatcgttcaacaagaagaaagacaagacattaaaacctgttgctcggagagtggcttgcactccataagctgcgagatctgctcattgaggtcgatattggactctgtggatatagaattcatgcccatctcgctcgctcgctaccaccctctccttcgtgaatatgcaccagaataacgctattccgattagggattttacccttaaccacccaagctgggagatcagtcctcgaaaactggttctgctctaggcagaagagtggaacgaagaagaatgggagttggggagaaaggcagagaccaattttggaacggaggagcgcgtggatgagcgcgagtgggatttgtagttttaaggcctcagcgcccagctaaccagtggtttttatttatttatttttttttttatttgtaaagtctaattatttttggaaaattatttggtgcacagttttaaagtgcactctctgtctttttcaaaattcaagaaaatattttattttatctttttatagttatataccttctaattatttaagatatttagtaaaatttgtgtttataagtaagggtgtccataaatcatctaatttaataacaaccgaccgattgattcaattataatcgaccgttaaacattaaatattcaattgtgatcgaatcggattgaatgttatttttatatatccaattagatcggatcggatattggatgaggtgttcaaaatttaatacatcaaacattcaatcgaactaattaatattttcatttagtttagatacgtaattagatttaatattgttatacataaaatatatatgtacataaaaaaaattaaatttaaaattttactttttttttcatggattgtggatggatccaattcaatctaatacatactcgacctaaaatattagatggatccgatccaatccaaaaaatactaggtctaaaatattgaataaacttaaattaaaccaataaataaatatgaaatacatccaacagatagaaccgatctaatccaacaaccaatgaatgttggatcgattggatgactgaaattaattggatcgaatcagatggtaatatcttacatccaatatataattggattggatctagataagcttaaaaatattacatgtggtccaatgaacacctctattaatcataggcataatttagtagttacacactttttctataaagaggaggtcccaaattcgaattctcctcccaatatcaaaaaaaaaacacatttagttaaattttgataaatttaaaaaaaaaaaaaaaattatcacaccaaaaaaaagttcaaagaatttattgcattggttcaccctttttttaagtacattgtagaagcattattttttaaggttttttttttttggaatttttatatgaaaaatataaattgatactttacttacaaaaatatttttataaggtatgggcaacaattttatctttaatgagcttttatttaccaaaatatcacttatacatatccattcatgtcagcccaaaccatcttctagccattactcttttgaaacccacgttcaaaacccacgaaaactacctcccagccataacctttgtcatcttcttcttccaactgcctcatttattaattttttttatataaatcatcttctgcttctccatctctattgccaaaaaaagcttcaaaatgggtcataaatcatttgctaacaaggctaaagggaaacgcccagtcatcgacgatgatgactctgattttgctcccctcgtggctaaaggtggtcgtcgtccagtgaagaagaagtcgaaggtgtctttgcctgaaaataatttcaacttcaacagccagaagggaaagaagaagtcaactttaagacaactgtgatgaaactataatgcaatagttatatctgttgcgagccaactaatataatactacaaaacaattactaattccagatatttaatacaaaagaatattacaacaatcgtatttatctattcagatcgcgtatttgataattttgagccttatttttataatattgtgatattgtagcaaaaccattattcaactaacgtgcaacttaattgcaactaaaaatgttaaatgtgaatgtatatctataagaaattatttatcagtgtttttttcgtcactggtcgataattatttgtaccttaatagtaatatgtggagaaacaactgttagcaaaatatttatgcaaatataatgcaactgttatgaaacat

SEQ ID NO: 36837 - DNA, 4720 bp, Cannabis sativa
actacaggtacagccccttttttcctttcacatcctctatttctttcggttatttaattttatgtttaacgtttcaatgtttgtattggcagggggcaggagattttgagcttttcaatattacaggaaagttgaaacaaataatactgatggcaatggtaaaacataactggttcagacaactcattcttataacccagagagaaagacagcaaagttaaaataaatatcaaactcgaccaatatgttgaaatgttgatacctgaaacaaactcgagaactaaatccaagcaatcgacgccagcagcaacaattgaggaaacttttccgccatttgcacttccagtctgtatgtcataaatcattgtggatctttcctgcacaccaactaaggctctctcgatagcttgtattgcagatagcaggtgcaactctgatggcttctgtatgaacactgtaaatgacgatcgcaaccttgatttaaattcatcgaaaccacatggcttgcgaggaagagaagcttcggaaagtcttgaataatcataaagtaatttggtgttcgactctgtttcgtgagatgcaagggtagctcttttcccttggtaagttatgcactttcctatggcccttaactgcagctctaccatcttgacataaagacttcttgacaaggtgggatcagtcataggaaaatgatttcctatttcctctatgtacttcacagtaccatctagccaaacgaaagataagggtcgtggcacatgaattgtgtctactaattctgatagcaagaactgtgaaatgccagtaagaattttcatcaagcttgcagacaagggagcacaatcgatgtgcaaattgagcctcaaaatagctgaagaggcaatcaacaactgcctgagtagatatgctgcttcagtacaatcacctgttaccatgctcctaaggaaagacttgtttagaggtagacgatcaagtgaatcgacctcagtcagaaaactagcagtaaagtttaaagcttttgaccgcaacttcttcttcttgcgtacactgccaattccagaattagcatcaatgtcttgtgattccaagcatgtcattacatcaccagaactttcgcattgcttatcgcaagaaatatcattcttcccaacattagttttagctaaaagctccttttcacccaatagatcggaattgttgttcgctttttcaaaatactgagcatcatttatagccaatatgcctaccagtagactagagaactccacaaaaacagttatacaaaggttaatttcagattcaccattgtctctccctgataatatctctttaagataggcacttctcacgtcagtttgattcataatcgatgccaagccccataaaaacccactaaagcaagtcatgatggtagagtacctactaatatccacaactttggcattaaaagccactttttgatcggaaatggcaaacttcaaggaggtaagtccgtcctgcatctgctctctgaagcttttagcgacacagaacacacttttccaggcttgagtataatcagaggttaagggttgatcgggttctactaaatcactctgctcacagtcaactccgtcattttgttgctcttcacaagagttctgagcatttttaattgctttgtagaaatgatatttgttcaatgtcaaaaaaacatataatgtgtgatccaataatgaaaatatcatatcatcaacttgaagagaatcattctttttggaaagtgactcctgaataccaacaacaacatataatgacttgaacagccataaaacaggaagcgacttcccagagtacatgagacaaagtgacgtttggtttgattctgtcttcccctcacaagaagccataacaatacttttcaagaccttccggcaacacaagaacaatcggaaaagctcataaccattttgtgagtttgaagagccctcacgatctaataaggtgccaataacaagcctgtaatatccagtacagatcaaattggtaaaaatagagattactctgccaaattatgctaaaataaataaataaataaaaggaagaaaaaaaaaacatgttgattgaaaactttcctaaactaaatagaacttgcattgtaagatttttctaaaaaagaacacagtacacttgtaaatagaaaaactactttgaacaaaaagccgaaggacgatggcaacatatcatacaaatgacatcatctagataggaatggaaaacatacctttcaagattgagaatagatgtcatcaaaattgaaaatgattttgcattgaaatattcttttggaatccagcctatgagattgagcaaactttgagaaactgcaaattccgtactgagcaatggaaaggtactcaggtcattcccgtttcctgaacaaagcttggcagaagaacgagtgtatggttttttggctgagtcctgacagtatgggacatgcttgtttcccagaacaattgccgatgacttctctaggtcgcttaagacatcagaccaattaggaggtgacataaaatcaacattcccggatgaaatacaattagatggtaatgcaaatttctccagtgcatggcaaagcctcgatgccaaatgtctgcgaacaaactaagacaagaccgaatgaacattcaggaattggaatgaaaatattttcaaataatgattcagtacagattcggataaaaagaactcaagaaatatataacagaatacaatgaccatacaaacaataaaagcaaacatataaacaaagtaaaatgtaagtatgtgttgtgtgcatttaagaagggattataggaaactaactcgttgttcatataggatggagttattgaagagttctagtgagatttgccacacggtcaccctattcagctggttgtttttatcgctgcggtgctctctgacccgcccaaagctgtttctcccacacaaaatggaagtttggatcagaacagtaaggtacatcttcaatttctttttagtagcataagtacaccaaagatcaatattttggcacagaatccaccaaactgcagtaggcaatgaattcttgttcacagaagtaacactaaaatcccattcaccactttcgcgggcagatttttccttacaagtcgtatcatctgaagcgaaacttggttgttgagagttagatactaatgatagatgctccatcatgaaaccagtaaggccttctgcctcttgcatcagagtagagatgcacttttctagttttttgtttctttttttataacgtgacaagtcaccatcatcaagcaacccaatctgaaccaaattattattattttgcaacagatactcatgagcttttatctgcctgttcaaatcaacaagcctttgaagagccatagcatgcattacataaatcagaggactataatcttcagcaccaggcacaaagatgttcgaaatagcttgaatgacagtaagaagaggagctgaaggttgtagaaagcaagaaaaatacacatcactcatccagtcagtcctattcatccaatctccaccagagagtgccataaatgaatcccccattgctgctgacatctttctcgaggaatctggcggcataaagctggcagcttgcctatataaaattctacaggacatgaacaactgaaagaagaatacaaagatccaatgagttgaatatttaatactctgcaaatcagtgttgtttccagccaggtcaaagtcaacagatattcccgtgacagaagagaggaacttgttggcagcatctggctgtagtccaactagattactcatgtacggacacaatacagttatcaagtcctttacagacgctccaactagcttgctattacccgttgtgacaggcagtgagtttagcactaatgcatacacttcagacaatcctctacccaaaagttcagctcgcaattcaaagctattttgagaatctggtttgacagatttctttttacgaacaaccaaatcatcagtctttatccatttcaaagattctgatatatctttaatcaaatgttgaagacacgcactagcctgtccttctggcatggttttaagagctctatgaatggcatatttaaactcatgcgagcataataacattccaactgactttgcgtgaccttcattatgttgaggggtcaagaatctagtataattcacttcttcatccccatcatgtaaagctaaaagccttattgctttagacattgtgaaaatagcattattcacctgcattaggatcattatgtcagagctcgaatcccagtctaacgaaaacaaaaaacaaaataataagaaacaagatttagctggcaggatattgataaggtttttgaaaattcctaatgcccaaaagagactaaatgctcttgttttgatgggtaatgccagggattcacacatgagttacatacaataaagtacgtaattttaacaacacaatttaaaatgatgtggtctcacttgacaatagtaatgcctaagattaattacacatcaatgtgcaacttttgtgtgtcctagcattactctattttgatagatgtagttaaaattctatatctataagtacataaatatatgtgtatgtgtgttttgtctcatgtatctatactttagcaaaaacttagagcacacagggaagaaagaaaacaaa

SEQ ID NO: 36838 - DNA, 2697 bp, Cannabis sativa
  modified_base (592)..(592): a, c, t, g, unknown or other
atagagatttaataagtaaacatatatgattcatgatatatataaatatatctataattattataaatcatttttcactttcaaaatcgtaaataataatattataattgtaatatgcacgcagactttgataaagatttcagatgatatataaatactattaacttttttattcttaattaaataataacatattattttattatatatatatataacattgtttatttatttaaacttcatatatgataattgaaaaatgtaataacaatataatataatatttttttaaaaaataaataaattaagcaaatgtgcataaatactattttagaccatctgttttagaaaacttactgattagattattagttttgttaaatgataaattagaccttatattttttaaaatagtacaaaatagtaagttgagctaatttttttgtcaaaataaaacttaatataacccgatctagaggtattataaaaagactgattacatttcactacaaaaaactgttacttttagtgacaatcttttagtcataacataaattttttgtgactaaaagtcacaacaaaaagttacttntgactaaaatatagtatttagttagaaattgtcgctaatttagttttagtcacaataaatattgtgactaatagcacatttcgtcacaacaaattgtaattatttttgtgactaatagccacggaccttttattagtcacaacacaataatgataatttatcattagccacaacttttatttttatctttagtcataaattttgttgtgaaaaagtaagattttttgtagttttttgttgtatttattcgtgctagaatttatcttcaagttggttatatatattagaaaaaaaatatcaaaaattaaattctaagtactattttgtattattataaaaaatacagaatctaatttatcattcaataaaataacaagtcaatattattaacccttaaaacttttacctagtatgtataatccatacctgcatggccatgtcattcaatgctcttcccaatatttccaaaatactctgaggagaatcacttttagtactgccaataattgtaaataccataacaccaccattgacaatttcttcagaacgacatcttaagaaatttgtgaaatccttttgaaattgctctaaatatattttgaaaaccataggaggacttgtgttcgaaacacaaatatttcctttgttatatgcttctcttgtttgtttatttactaactcctttggaaccttaagtagtaattataagattaaccacaagtaattaattagtcttaccaataataataaacctgaaattggaaattgtcttctaacaagagaatgacaaaggaaaaattatttgttatgcttacttgtgacaaccaatgcaaactactagaagaatgaacaatatgcattgaattattagggaaaagcctcccatagaaactccccggtgaagctgcgatgaagcaatgctcaaacttgtcgcctttttctttctttagcctttcatagaagctcgaaagagattggaagatggtgttgaaatcgttcccaggaagatcgttgaggaaaacttggaaggctcgaggtaggtttttcttgttcaaggattgggtgcatatggattcgatgatgtcaagaatatcggacaccacaattagtgtgttggggcctgaggagcaacccaagtccgctattcttaaacactctgggaacgctttgttgttacaataagcttcagtaatactttctttcattgtttgtttcgcagttgatatcatcactctctgttgttagggtttacattattttgaatctctcaactttatatatattgttaatgtattattaatgtgacactaatgtcgtgtagttcaagagtttagacaaaaaatacatgcataaataataatttaaaattgataatttatggaaatatttatttgcattcttataattattataaatttgtatatttagtgttaataaattaaatttttactatcttaaattagttaatagacccacattttactatatctgtggtctatgaccgcgtaagcaaattattaaaaatacgatcaagatatatgatttctatataaattagtgatttttttttttgttttaaaaaaaaattaaaggaaaaattatataatattattatagtttgaagtaaaaaataatatttattctttattgaactacaaaaacactcttaagagtaaaaacatgtagaaatattatatagaaatcatattatactctaaactataataacattcaatttcaaacatttacaaactctaaactatttggattgaaattgaatgttagcacaaaaatagaaaggacaaaaaatagtacaaactttttgtttgaacatgtagattatcaatcctacttgcaattatgttttgatgcaagtcatcaacataaatagataaaataatctcagagactaacttataaaaaaaatattaaaaaagtagaaataaataaaaataaaaatctagaataattgtttaaagggataatacaaataacgtctcatatatgtcactaaaaaaattaattttagtgacaaatttttaattacaacataattttttataactaaatataactattattcacaataaaaattcacttgtgac

SEQ ID NO: 36839 - DNA, 10693 bp, Cannabis sativa
tttttttttttttttttattctggttggtcagttaaaagtaatataattaaaaaataaaaaataagatccaccaaggtagctagcttattcttatactcgagtaagaagaagtgtcgagagactttgagagtatgatcactttgagttattggtgtttgatgtatttagacatcataaaataaatttttgaagaaaaaaaattaaaataacatagccatactgtatccataacaaatttatagagaaattttaagaagaatcttaaagtatcaagtactataagaggtggccgtggtgtattgctaatggtgctatatcgataaataatataaaaaacttgctaactactcacaacgtgctacatcgatatagtgttggtcttcagatgcctaataacaatgcacaaattcataatactctgatttgtgtggttggaaaaaacatacactttttgggacagaatttgagagttgtaaaattgtaattagcatttctttaatcatatgacccaacaaggctaaaagcacatatagtaattattcttctcaaacaagttatgtaacaaaaagaagagtggatagataattattgggaaactattatgctgttgcaatattagtactcagttttagatgaaccaacagagcatatattataaatgaagataaaacttatacaatatccttaaaccaatgttatcaaataccaattacacaaattttcttctcacacatgaaaagatccagttctcacaaaatctacttcaatatttagtaataataataataataagacaacacaaaagtgttagctaacagtcttgtaattgaattggccaaaactcactacaccccaccatcccttctgtacaaaagagaactcaagaaactttttcaccttaattttaacatataacaaagaaatagtctttttcatcttacccccaaagatattgatcttatctactgtttgatgttgatcagtggacaagccacagaagtgtagttatcccttggggtgaggaggatgacatatttttgtacttggtaggactcagtcacctgccctcagatttgaccagctgggagaacaccctgctcatggaaacacccgaaagatcatccacaccggtcatttcaacgcctgaaacagttgtgtcgaggttggtgaagttgttaacttgtggggagagctccccgatcacattggtactgttttcttcaggatcaccaagaattactgcctcttgaagttgaagagcatattccaaattccacaatacatctcccattgaaggcctatcaacaccatagtcagcaaggcatttctctgctgtttcagcaaactttctgagtgaatctggtctaatctttcctacaagagtagagtctatgatttgatccaattgcccttttgtttgccatttcattgcccattcagctaaattgaccatttctcttgggagtgttggatctatcactggccttgcacaaaggacttcaaacaaaaccaccccaaatgaataaacatctgatttttctgttagttgttgccttctgaaatattcgggatcaaggtacccaaaactccctttcactgcagtactcacatgagtttgatcaatttctggccctgctttggaaagaccgaaatcagcaactttggccatgagattttcatcaaccaaaatgtttgcagacttcacatcgcggtgaataactgctttagcatagccagtgtgaaggtaatggagtcctctagctgcaccaatgcatatttcaagcctttgtttccaacttaaacttggaagaccggaaccgtacagatgactcttcagtgtcccgttctccatgtattcataaaccaagatcatctcattcttctcatcacagtatccaatcaatgaaacaagatggcgatgacgaaactgagaaagcatctcaatttcggtttggaactcagcaagcccttgttgtgattttggatttcctctcttaacagccactttagtcccatcactcaaaacacctttgtaaaccttcccaaaaccaccaataccaataacccaattctcatcaaaactgtgtgtagcctcttgaagtgcattaaagggaattcgataaccatggttggaagcaatactagtggttgttctagtggaatatttgcttcccatggtgtgggaaccattaatggataaaggaatccatgtcttggagtggccttgttcagccattcttctccttcttctacacaagagaaagaaaaccaaagcaaataccactacaacaaaagctcccacactcacaccaacaattaatcctacattcttctttgagctcgaacccgaaggagaaaaatcagaattactgagacttcccttggaattgctcattttcatgatctccaatccattcaaaatgccattggggtcaacatcaggtaaagttgaaggtccaatactcacactaagattattgctaggtgctggaagtgtaacgaaatccgaataaattgcagtagccaaaacattaaatgcagcaccagtgagatcaagattaggagcaacattccaagagtccacatacacattgaaatagagtgaattaggtgaagaactaactatatcacaaaagtgaaaccttatgaagtaacgaaatcccggttccaccttgaacacccaagtcacattgtaattgttgtgtggatcattttcagcagccatggctgttgctgttccatagactgaacttggagcagtatcaggggttgccaaaccatcagtatacttgacagccttaatatttgagacatttcttacaccatttttggttacaagaaaattctgatcaggaacccaagttctccaaagggtatcattatcaaatgacaccattgagccacccatgttaaccctggcaacagtctccaaagccaaagaggtcaaaccattaaaatcttgccttgtatcagctgtgttggcatcatctgttataagcaaatcagggactgaaacaacctctatagcattcaagaaggcaaaggaattctctaaaggtgttaaggtgataacaagactattagaggttgtatttactgaaaattctttcacagaagcaccagaagcactgaaatggtttaggaggacatggttttctgttgaaacagcaaattttgctgtgttcaagttgtaagaattgtaaacaaatggaaagaaataaaggcggatccagagtctttcatttggggtgacagagaaagtgtattgtgaggtttcagtaaagactctagctgtttgataaaggggagaatcactagaagaagtgattgatttcaagttggtttttgcaagaacatcttgagaggttgataaatactttaaaccagacttatcagatacaaaaacacggctaccaactttagtatctgaggatgatccacagtctatgaggtaattatctgttggagtaaatccaatacaaaggcataataaacacaaaactaaccaaacccagatgagaagttctacctctctaactctacaacccatcatcaggaagaaaaatgaaagcttgaaactttacacacaaacaaaagaaaaaaaaaaaagattggatttttattcttttgttggtctcttgggaacttaaaaaaaacaaggaagagaaaaaggaatcacctttgatgaaatgactgtaattgagagagacccagatgcgtttcccctttatcagaggcaaaaatgaactgtgtataggcttttgagggtttgcagacagttttattgcaaatggggaaggtcaatcaatcattatgaataaatcttgggaaaacattataagctcagctgtaatgaacttgatgacaaccttagaaaccagatatgacaggctctcatggttctttccttttcttttttctttttttttttttttcaactcaacaaaaaacaatataatataacaacaacaacaacaactacaaaaacagtcaaagaaagatggtgggaatctgaatgaaataatgagagaagccggcttccatgtctgagagagctgaccttgtttaacaaaaaagagtgaaaaaccaaaaaagtaaaactaaaaaataaaaacagcccacaatttatgaggatgggtcttatttatattgtaatgtaaataagtttgtagcttattattagtttttgcaggttgggttgatggaatttactctttgtggtcctgcaaatgataaaagaaggaaggtaaagattatttggaaattgattaatttgtggtataaatatttaagtttcatttctcgttctaaataaatatttaagtttaattttttaaagtaataatatttaaattatatttttagaattttgtaaattattacgtgagaatctctaatagatacaagtctgtagataatgacttaacatttaattaatagttacctacaaagttttagaaaaataacttaagtattactgactgtaaaaattaaacttaaatatttattttcaattaagaattaaattattttaaatttatgaaaaaataaaatttgatgtgaatatctgaaatttaaaaaagagaaaaagaaagagtgtaatattaaattgagtgtggaaattgataaagtgagttggcctgtgattacggagaatttagcacatggaatcgtggagttgggtgactcatttgtgtaatctaagctgtaattgatgcaaaaatacaaagctttataaacaagtcgctttattgtgcccacaatataatttatacaaaattgcctcaccactcactctctcactaactaaattatttatagaagaaaaaaaaaataatctttacctaaaagatagagctcaaaaaggacgagaattagagattattgataaataatagtaaatataattttaagttttgtttttttttttttggtaaaaattatttattgaattttttattttattaaatcataattaaattttatattttttaaagtagtataagatagactataaaatcaatttttaacaatttattgtttcaatataaccaatctaaagtagtatttggcacaaatagatggaagaaaaaaaaatgtaattgtaataataaataacactaggtcagattattattaagttttgatttaacaaaaattaagtttagaatctatttttgtacaattttaaaaaatatgagatatgaattgtcatttaacaaaataaaaattttaactaataattttcataaaacacaaaatttaaaatagtattatcagatctcgttataatatttcacatgtaactttttgaaaagaaaatttgtacataattattttcatactcaaattttacacttttttactattaattttttttaaattaagtgtacattatcatatttaaaaaagtataattcaagtatgtgtctaatattatttgttgctaatatattataaaaatataaaaacttttatcttctatgattaagacccttctcactcgattgtgtgtcttgtctctatgacatgatcaggtattttttttttctctcaattgtgactattttttttttctagtgattcttctgatttcgattttcttacttgtctggtgtgcttttgtgctatggcttctagtagtcgtaataatagccagtggaaaaggtagttgaagagacagtatgcgagtattgatttaaaggaagaggaatgtgatgttttggcttattcagatctggctcaaactgagcctacttttaatgatcgttggtgtttagtgaggcaattaatgtaatgcaacatttgatggcttctttgtgcaacgtgggcgaggattgtttgttaaggaattggacactaatcactatttgttccagttattttatgaaattgatattcaaagggtgatgaaaaggagtccttagacatttaataaactcattttggttttccagtgtttgagactaggtgatgatcctaggacattgaatattgttgacatgtgagttcaacttcatgatcttagaccaggttttatgattgatagggtggtgaaagatgtagaaatttcattgagaagcttgtggagtcagaccccaagaacttcttgggtatgtggcatgattatcttcgtgtcagagtcactcatgatgccaataaactatcaaagcccacaaggaagatgaagaattctagtgtaattttaagtacgaacatgttcctttgttctattttatctgtggtgttatgggccattctaagagtttctgtctcaagcctttctttactccacgtgataagattgtcaagccttatggggattgcatgcgagctaaaccaagacttaagaatcaactgatttgtacaaaatggttgagaacttttactgatttttctagtcttgatggtggtggttccattgagcgggatggggaagatacacaaaaagaaactgttcatgcttctatgattatggggcagatcgtgggtgtgaatatgggagttaatgaaggagtggctaagtatggaaatacattaataaataaataaaaatatggagaaaattgtagatttatgggccatcccatggggatgggccacttatggccattgactctaaaaggcgtaaaattgatatgggcctaaaatttgggccaaatgacatatttgagaaagaccaagatgatgaggtttcagtggaatgggtgaatggatcaaaaaacaatttacatgtgggctctggtttctaggaccaccgagcattaggagtctattgagttagaattatcatgggcttgagaatccatgggcttttcaattgcttaaggatgttgtgttccaaaagatacccaaatttttatttttgtgtgagactctttgtaacgagatagtttagaaaggattcatttggcacttggttttgaaagtttatttgtagttgatgtacaaggtcatagtggtggtttggctttttttttttttaagatttgaggaggaagctaggttaattggctattctagttcccatattgatatgtgtattagtgttgaaggtcgtgtggtttggaggctaacagatatctatggtgagcccaataaaagtaaacggaagaagactattgggatttgctttgtgatccggtcactatttcccctcttccttggcatgtgatagggaaatcaataatgtcttagccatgaggataaagaggggatgaaatccctatcccgattaattaatttttgggtttcaaaaagaggtggatgaatgtggattgcgtgatttggagcttttgagatatccctttacttgggaacatgatcgaggtactcctaatttgattgaagtaaggctggaccatgcttcaacttcagagagctggctgaacctttttccttcttttaagttattcaatttagatacctctacttcaggccataaaccaattctacttgttccgacttttgaattatcttctactagtaggaagagttttaactttaaaaatgcttggttaaaggagcccttatgtttacaggttatgaatgattgttgagagctttgtgagaataaaattatttaggaaaaaataatgattgtagggaagttctgactgattgggtaaagcctatactggttaatttaaattttgaatttggagctgtaaggaggaggctaattgttggcgtaaaggtcgggatacagagtctatacagaagtttaaggatgtgaaaaaaagactttttgatattatgactcaaagtgagattttttttgcaacaaagatcaaaatagttgtggcttcaagcggggatcaaaacaagatttttttcataagtttgctactgcccgttgttaaaataatatgatttttgaattacaagattcttatggtaattggtttgaatgggattcagaactggaagatcttatgttgaattattttcgtattttattagcttcatttggtgtgaattgggctaaggtgacagagtgtattcaaccttgtatcaccattgagcaaaatgtggagttgttgaagccagttgaagcaattgaaattaagaaagtgctctttcaaatgaatcctgaaaagtcacttagtctggatagaatgactcccggttcctattaaaaatgttggtctatagtgagaaaagatgtggttaaacaagtacagaactcattttctatcggtgtgcttcctgatgtggttaaactggattcttcctaaggagaataatccaatttctatgggtgatttgagaatgatctctttgtgtaatgtcttgttgaagattgcttctaaagttttagcaaatagattgaaaattgttattccttttgcggtctttccttttgcggtcttcgatactaagagttcttttcttcaaggtagacttatttcttacaatataatagtttcttttgaaatcatgcactacttgaagaggaagcaaaaatgtgataatggtcatatggctttgaaactctatatgtgtaaagtatataataagataaagtggggttatcttcgagctatgctgctgcgtatgggctttgatggactcgaatgtgtaaacacaaacatgtcagaggtttgggatttaagagcatttgagacgttaatcttgctttattgggaaagcaagggtggcatactatggtcgcaggtgaaagttttattgtagctcggctattttggcttttcatagttataccttacataatgaatataatagctttgataggtataatgaatattaagagaggtttgacgtattctgtaatatcttaattgagttatatgatgctggctctaggtatgggatcttatcgaactactttgtttcatttgattactcacgcttattctaaggcgttgttgtttttaggatctagatgttagaatttatgccctaaaagtaagtaattaatgaataatatattacagaatatataaaatgcaattataagataaataaatacattaattatagaagtataattaataaatatttagaaaattccttatttatatggagatggtataatcttataaggtcgtacaagagaattaagattatacaatatgaataaaactagtcggtaatgtattaaagtaagggatctttaatatggaactactaagtacggtttactatacactatactctagtgtgcgtgattttgattcgaatcacatatgtggatagacatgtagtaaatgtgttgtgtataatttgattatacgtgattggaccgatatgtaataacatctttcattaacatgtcatttaccataaaagagttattcatatcacaatgattatcattggtagatctgtctgaatcctgagtattcattaactccagtttgtgttcattaggttttttgattcactctttaaagtttctcatagaatatgattcttacaacttctgttttgggaatctaataacatgagtgcatgggaacatgatatacaacaatagagtctaagctttcctaataatcgaatattagttcccttatagtgttaattttaaaagtgctaacaattggatctaaatttataataaattatagattaattgttcacattgaattaataatacataaagaattcaagagataattagaggagtgaaagggtaattttgacaaactctaattatgaactaataattagaagaaaaaaaactacttgtaatgattatatcaatggactactagtaataattttgtaaatataattctatactgtcaaagagtgcaattctatatttatagtagagtaataataaaattaataaatgagattattttattgatgagactcaatagtaattaagtgtttaatataactttaaaatataggtccatagtccccatatcacatctacacaacgatgtataagggaagatataatttgtaagataaattgagaaagaattaatttttaagagaaataattcttgaagataaaatagtaattttgtataaattattatttgtataattatgtcaattataaatttaataattaaatagaatataactatttagttttatttgataaaattatattaattaattaggtataatattattgttaaataatattatgagagagaagtttattattttagtgaaaataataattatttaatccaagctaaataagagattaatgagaattaatcaattatattttaaataataaatcttagttaaaagacacaatttagaaatcaattttgggttctaaaatatggcccatacatgtggagatataagtccacccgtgtagagtgacatataaggctcaatggacttttttaattattttattaattaaataaatcaaaataaataaagattattttttaattatttgaattatttataataaaatatactataaaataataaaaaattaattgaattcatttattcagttgatattatatttaaatttaaattttaaattaaatataatacatatttttattttaaagaattaaatatacaattatgaaagattatatatatgatatatataagtaagacaaattatgtaatccctcacttgattttgagggattagaaacctcaactagttttaaacccttagcttagttaagaatatttatttttggtatccaatggtgaggattgatttac

SEQ ID NO: 36840 - DNA, 2701 bp, Cannabis sativa
aaaaaaaaaaccattaagaataaatgtcattaataaaccaaaaggtacccaaattttggccttattcataaaagttagaaaaacaagaaagcggattgtccattctctaaaataattacactgcacttgcattgaatgcataaatatatttgtaaacagttcaaaaccaagtgccatgtttactaaatttaaagatataaattgaaacagtattgatcaaagtgtaataatctaaatacatgaacaaacatacagatctctcgtcttcatctaaaaaattgaaaatgctctgttgtttgacttcagccctgctcttccgtgaagatacaaatgtctggggtgtccatcctacatgaactcattaattagcaacacatttctcaggacaaaaacagcacattcttattcaaattcaaagtacggtcaagatgtaccctcttttgatcccactgtgttgtaataacctgcagaatacccccctgtaaatgctccatgaaatcttcttcttccttcttcatctctgacctgaccacaataaaatgtaagaataagtaaactatcagtactcttttaaacagagcagtattgacacaatatcagctttctctcatgaaaataatgggatattttgcaacatctgacgctaaggatcaatcacattcttcctacacaaactgagtgtcccctatacttgtcatacgctgctatgttccatagaaaaaaattgttacacataaaccccattgttatcaatagttaaatcctattcatctagcctctccaatatattttcatttcacattcattgttctagtatgagcatttcattctataatttgcccaaacaaacatgaaactccagtaaagcatataacgcaatatttgttgagaatgatttcgaagccaatccatactaaaactgaaatgatcgcagcacagaaaccaaccattccatatcgcttcctctctaatcgggaagcaagctaaaaagaaaattaaaagatacctcttgcttccatgaagggagggttcgtagctgaccagaggcctcagctacggcttttttcttacgagtggtgatatcttcttcacgctcaatcggggttccgaagaaaacgtagtcttcttcatccgaattcattttttagaacaaaattaattgatttaaacaattaatgaatgaaattgactgaaagagaaaagttgaaatcgaagatgaatatgatgaaattagggcttcagagcagcaaatgagtgaagcatttcttgcaaacgagtcctcgacctgtagggtagagtcggagtctagagacaagaaaagaagggcgtttttcttttctttttttttttttcaaagtaaagaaggggtgtgtttggaaataactcatttttattttaaggtgtgtgtggaagtaaccgttacactatattttaaaatgcaatgtatatttggatatgaggtggtaattatatataaatttctaatatattgtttggcaaaatagttagtaattacataggaaaataatatttttttagtagctcatgtttaatatggaaaatttttagtaattacacagtgtaattacattcaattctcatgggaggccatgagaattggagagtgtaatgggaacccctcaattacttccaattacaccgttacagtgtaattacatgatcagacaaacatgccaaattgtgtaattacctccaattacacacaaatccaattacattatggctttccaaacgcacccttaagcattcgtagagatcttttaatcaatgaatttcaatcttatatgtcgtctttttaaattttgatgtcggcaatcactttgtgaataagtatgcataatttaattaaatatgttagaattctcttgaaatgtattaagaagaatttggtgaaatgagttttaattctatctcttttaatttactctctttttagctaagtatcttcatagaaaactacttgtgttgatacttgttcattgagtgtaatggggtttatgccttaaaaatctataaagacatttctaattattaataaatagttgaacattttaatatatgcttgaatattaaattattaatatttattattgaataatttatatgtaaatatctaaaaaatttcttattcatatatgaggttgtggcttgtagctgtatagagaactaaaatcacttagccatgaataaaacagtaaaaaacatattaagtaatagaatatttaatcaatggttgctagtacggttcgctgatgcctgttctttggtataagtaatctcggtttggattacggatgtaagatgatatcaaagtgaaagtgttatatataatagagattatatatgacaatgaccgatataaataaagatgcatttatttaacatatcgtttactataaaaacctaattcatatcataacaatgatcatcagcctaaatcttgagttatcatgaactcttgtttatattattagtttctttgattcactcgttaaagtttttcagagaagatgattcttacaacttctgttttgggaagctaataacgtggatgaatgggaacatgatttacaattatggaatcttgattttcctaacggatcgaatgcgggttctctttaagtgttaaatctagaactagaaagttgtgcacaacttttgatgagatctaaattatact

SEQ ID NO: 36841 - DNA, 5743 bp, Cannabis sativa
taacctgctcagcataattctgtggaagagcttctatgatgctattacttagctccattgcaagatcatagcagcgaagattgttattaatctgcaattaattgcaaaaagtcatgggatgcaagttcctcataagctcaattttttcatttaatgtactagcgcatgtagataattacaaaccatagcacacaaaggttccaaaccaatttcagaagcaggttcttcgaatctccgcctttcagctgcttgaaagtcaatcattacctgaagaatcaagtgtacaggaacaaaatattaacaggatgcggaacaggtgggatcaaggaaattgataggaaaagtatgtctgaataaagatttccagcaagaataacatattattttctcaaagaaaaggtatgcataaacacaactaatgaacaaaagcaattcacatagatattaggaaccatttgcctgtaaaataaaaaaaaaaacacacacacaatttatgcgcaagtgataggctgtaccatatattagattactttttaaataatattgctcagaagaatgaaaggaacaatgaaaattacaatggaaattaatcaattattcttaaatggagactaaataacctgaataattgccaaagcaattctgtatagcatgagatcagtactattatctcgaacaatttgcacttgctctcctaggatcctgaacaaatcaacagcagctggtgtataaagctttccgtcttcatgtttctttggtggatgtatcttatcagcatctaggatattcaagtaccatttctagaaatagaacaagaaattagttgttggacaatacagcttaacaaaacaataaaagaaaagttaaaagttaaagtcctacctttgtattagcctgcattctctcgacatatgtattcataagagggtccattgcaccactctccgaacatacttgagcgagagagtcatcaacaccaaggccaataagattttcttggtattcaactacccaaccagttacctaattcgaaaaagtaagagatgcaactttaaccatgtaaacataattcataaataagaatattttacatattgaaaatgctagttgaattcaattcaatgcatgtcggaactttatttttactttttatgctattatttttataataaaaacaagcttctggcataactttttctctacattcccataatgtccggcaagatggggaaaaaatgattttgattatggacatatacaaggaaacaaaatcaaccaccccactttgatgtcttgtaaccaaacaagccatgtacggtcgcattatttatttcatttagccaaccgggctagttttcttatacaaggaattacagtctttgacaatgcaattaaatgtttgaaaaaacacaaggaaacagaagaatacctttaaaatctctatgtttgtcagatcatttgccctgtcactgagtaatctaagcatttgaataaacctctcagtatacagattcaccataagttggaatatctcgtatctgcgatcatagaaaaatcaggggaggaatttttctcctacttttattataagaacgataaactgaaacacagccacagcctattttaataccattttatgcaaaaaccaaaattacaaacaaaaaccagctttaaactgcatcaaacattatcaatcccttaacaattctgagggtgaaaataaaacagtttcttcgaaactctttgcccatatagtgaccctaagtttaactctctcccagagatgctccagctcattctctttttcttcaaaaattctatcattcttctccaaataaacttcctttttttattagagcctggtacaaactattggaccatcaacccataacgtgtcataagaaataataggagaggataactactacagatgtccctatatacagatgtctcttaaatagttcgctaatgaatgcttcaacataatcacaccaacatccaagtacccatacgggttagcatgtatagacatgtagaaacatatcctcaagtgaatcttaaatgctatatttgtcagatcagtcatactaattccatctacatgcactttgagttttagtgccactataatctgacctcataatatgtctacgaatatagaaatgaagcaaattgtagagcaagttgacatttcaaatccagcaaataaagaataaataagctgacaccttaaaaatcaagaaaactaacaaaatgttatatacaaaccttgggggaaagcaaggagccacgtagtcataaatatcaccaagctcttctccaatctaaaaaataataagaacaaaattaaaggatcttaatcttctaggtcaaaatagggaacaaggaattcaacaaacaagatcaggatagaatgaactgcatcaaacaaaagaagagataaactttctatcgaaaatatcagcaatataaaaaaccaattcactttaatgaaaagagaaatgacaatgttgacaaagatgctaattaagcaaacaaaactaaatatcacaaatttggagaaaaaagaacagtcgtgaataccattcgagcttcctctaatgctgctttaaggtcctcaaaaacaagctggtacacaaatcacagttgaaataagacatgtttttattaaataataatatacattcttcgatatagagaaaaaatttgttacactatttgcatttctggggcattacaaataaaatacctcggtgagaagcttgttaaatcgttcttcaacagtcattctaatttgctcatagcatttatccttatagccttttccctgagcctttagcttctgctgcgttagatttcttgaagaagccactgatgtgttagattttctgcagagggcagtggagcaaagaataaaagatgagaagaacagaaaaagaaaaaaaaaaactttcgatgcagttttgtgctaaagtgagtacaaaatgcatcatattattaacttacttctaaacaacacaatatgaattccccataatcacaaacgtgtatgcaaaacgttagaaggcaaactaagagaaaaatttaaaaccacatcagaatagttacttggccgttctacgaggatttgcaactgacgccatagcaccacctccttcagcctctgctgcttcctcagcaagttgttgatcaagaatttcttgcatttcaacaacccttgaaaagaagtgacagaaaaacctttaacaactacaagagtagcactaaagtaaacaaattaggaacttatgaaaaattgataagtcattttgtacccttatatgtatgtgaattttgataaggaaaatactcaatggaagtgtgttgtttagcatcaaatattaatacaaatgactcccacagagattaattcgcatgtagatcttacatttcagttagctgcgatgttggacagcattagtgctccacaacattgctctttaaagactaaagatgtgataatgaaatctctttctttccttagagctcatatgagaataaaataatgtaagcaccaagccatgatctccacttaagaaacgacaatgctacacatagttctccaactaatagcaatacaagttataatagtacatggagtgtcccctagattgtttcagcgggagctactagtcaccattcataaaaggtgtatctttttcaattactattgtttaaaagtgtagctttaagatagaagaaaggtaggttcaactatttgtggtaaatcctctacagcttgtgaattctattccatatgaaaagtcatttgctaataatctaccaataactagcataacatgaatatcaagaaaaaaggggccaaagctttcaaaagttctcgaatagtttatagtatgaaggaaattagaaagcaaatgaaaataagactacagtaaaacttaatatcgaaacagatcttgcattcaattaaactagtttaatcccataaatattaagaaaatgtatgaccatagggacaaaactaataccaaattcttagtagtactaaagtaaataaatcagcaacaaatgaaacactattcagcacttacttcaaagcacgaactagagtttgtgggctgcaaaacagaaaaaaaaaatacataacaccacgtgagaaacattaaattaaataagtatccaaaagttacaaccctaataaatttggtttaggactttacctttccttagaaagtttatagaagttagaaacgtggccccacaatgtcttctcaaatgtttcccaagtccggtcaacatcttcaaaatattctctgagatatatttcaaagaacaagtagataagcctcaacatgtaacaataatccttgaaaacaaaagagcatttaggaaatacaatgagaaagcatgacaatgtagcattctctgtaatcatctatatatcatgtttcaagttacattttagtgaactttagagataatttttatagtgaatagctccgatcgcaacttctaatatgtaatccaacgggatcaaataggaaacaatactctaaataatagaattatagtgaaatatatgatcagccgacatttctcaaatttgaaaaagagtcagagaaatggttccatccacttatttttatttctcaaactgagagatccatgaatctacaatatatcttctaattataaaccaaacaaagcaattcataggaaacaatgaaaattaaagagaaaatatgtcatcacaacccctaatccacatcatcggatttcaagaaataagaaaagtttgcaacatgtatttgagcaagattatattatatttctcttattaacgaaactataaatccaatgtaaatattggaattgcaaaaaccagaacaagagtgcaatattcttccttcttcacaactgaaatgagaacaaacacatgtaaatgcatcaacaagaaccaaaagagatgcactacaaaatcaagagaggaataccttagccttccaacttcttccttgtgagatgctgcagctgctaatgcaaacctccgttttccatcaagagcagttaatctctacaacaaattaaagaatgttgagtaaaaaaattatatatttgtgtgtgtctcaactggtaaacaaaaaggatatgtgaaattgataaacataattattgatcaatacgttaacttaaaacaatcaagtggcaccaagagacaacataaccttgacaaacgaaaagaaaaggggctatgttccaaaaacaaaataagcataaatgaaaggaagcaagacaaacacctcatatgtattaacaagttctttttcatcactcagggagtcccgtgcctcagctgcttcatcagaaatagacatcataccctcaacatcctatcaaaattgagaaattagtctaaagaatcatagagaaacgcatcacataaagtattttaacaattccttcacccctgcacataactagattataatattcttaatcaagttaaaatcaacacatatagattagtaggcttctagttcaaaagtatctcattcctttcctaccataagtaaaaaagtttcctgtgcaggcgtcatcatagtgaccaatacagcagcacttaaaagagtactgtgtacaaaaaaaacgagcatgaaaaagaaaaatgcgacctcatcttagcaattaaatttgattcacatacagctcaaacaagaaagataacatgcttacaagcaca

SEQ ID NO: 36842 - DNA, 5021 bp, Cannabis sativa
cagcagctccattggcagcagaaacagcagtagcaggagcagcgggagctgtggtctcactcacacgggtagcagcaagaggttcagagggcttagaaagtccatcggttgatctacccaacaaagcttctttcctcagcctttccttctcttctagttcccgttccctttggcgctgcttttcagcaatctcatccaacttcgctttccgttcagcttcttctttcttacgcctttcagcctctgcatatttaaaatacaataaaataaacaaccaaagcatgataaaaagaaatgcaccaaatttctttaaccaatattcttttatgacgtataccttcacgtttgcgagcttcctcctcttcacgaagctttctcagcctctcttcctcagtcctcacataaaatactttctttcttaaaatctctctttcttgtcgccgagcctgaatcatttggctgatttgctcctcgcgctcaactcttcttctggcaaactcttcttgcctacgactcatcacccgttcttgaaagataacctacagaagaaaagaacagtgtttgatattctgactcggagaaatcaattgtagaattgtagagtttcaaacaaaccttgtaatccaatatacgtgacagtctattcttctccttaaggtccccttgatgacgctgtttgctttccacaatctcccgctgcaaaccagagtaaaaagaacttatgtgaatacaagaatagtgtaatgcttaattaagatttacatatacacacgcacataatcccagataaaatacctcttgttcgcgctcatgaagaatcctctcttccaccaatcgctgctgaaacgcagcttcaatcagaggggcagattcctccctcttagctctttccaaataatccattgttttagcctgtttttgcagtttcttctccatttcttgcctctctctaagttgttcagtcaatgccagctccatcaacttttgttttgaaatcttttcatcctgtacaagaaattaatttgttaagatcgatcgctccaccaaggacaacaattacattaaatcaaattaactcactccttcaagaatccttttggcccacttcttgccagttattgtctcctgaagtagaacctgagcttcttcttgctccttctcttctatttccttacgaatcctgaaaatttttcgctgctctatttcatctgcaagcctcttcttctctgcttcttcagttttcttctgctctataagcctctttgattcttcaacacgttcctaatcaaagacaagatgatcaattcttacttaaacttcattaatttaacaataaaagactatttaaaacctgtggctgaagtagcaaaattgaaatgcataccatttccaaaagttggcgttcctgttcctccttcctcttctcaatgattgtttttctagcaagaagccttttatgttctttgtccacaacatcagctaaagaaggaagcacttcacccaatttagatgctttcttagcaggaggataaatcaaggctcttgctttatttaaattttcagcaagaatggtcaagtgatcacggagagcatccgactcaataccctgaagacccaattcgaaaagtacaaaatcagaagccaacaaataataaagaaatatacaagcaatatcacacaaacacagacacaccaagtactacaccgttcaaagtataaacaagcaagcgcttaaaacaaattccttgctcttcgtaggaatataaatttccctcagttttctccaagataaggacataaagaaaataaagtaaaagcaacaaaaaccacaatctattatccctttacaaaaatgaatggtttaggtaattgtattactacatccaagtatgatctctcatgccatggacaaaatcagtaacatacatcaaccaaaaagtacaacaatcttccaaaaggaaaaaacaaaaataaaagaaattaaaaccataagctaggaccaacttacaaggctaccaaagagtacaacacccttcatatgatcaaccttcattgcaacaaaattgtgcttaacagcatccacagaaatcttctctacaacagaaaaactatagaatgggatcatttgtgatagacattcaattttcattgtctgataaacctgagagacctgaaaatgcatacaaaaaataacaaatgttagaacaatcctatcaatttgagtataagacaagatgaattttaatacaatgcaagatcgaataaagaacaatcctattaatatgaatataaagacattaatatacctgctgaagcaacctcagtgcggcaagcttctccagagaaggaacatactgggacagttgaacttctggtacagaagaagcagaagacagcttacccccaacttttgaaattttcgccagcaaaggctgtaccttcaatgcaagatctaaaggtagaaagtcatgctccagcagtttgtaaagatcttttacttcctgggttgcacagcttagtacacctttagaaacctataagtaagaccatatcagcgtgcagatctatatatgagtagaaactatatcccaaatacatacacataaataatagtgttccggaaaaacacctaaatagtagaagcaatataatgacctacaaaaataaaagaaaatgatgatatacttatttctgcatcactgcctattggaattcgcaagcatcgaaatttaaatagaattaaaagcaacacatggtgaaaaaatattacttcttactaaccatcactaccaaagctttgatatatatacacacataatgaaaggaaaaatgaagggaactatgaagctacaaataatatggaacttaccagttcagacagaagagatgctcttgaaagctgaaccacaaaaacacattatcagaccagtcaatgtatgatgatacatgaaaaaaaaaacgactaattaagttaaagaaataccacttctcctctctcaaatttaggctcgagattaaaccctatgagatttgccatcctgaagttacgctctttctcattttcaagctccatatgagatgcaccacgccttcgatcatatggaggaacggaaagtgcagccagaacaactgatgatgcaattaactgcagatccttctggtttaagttcttattgaaactcttctgaagattgaaaagcttgacccatgcataagcatgatatagatggctagaagagatccaaaagatttcagatagtttggcatagtaaaccaccatcaatgatgctttgggagttttcttaaccaagcacatcaatccatgaatatcttcaacagagcgaaaagcttcctgtagaaatattattcatgataagtaggcataagttttatctcataacataatatatctgctacaacaaaagtttaatctgactaagatatgcttatcgttaaaagtacttcacagagacctgccatagctcgagttcagtggcaatctttagctgctcaaaccttgtatcaagatacagttgcaagctctctggtaatgtcagatcgggtcggtctctttgatctctgtatttgttcaaattggctaaatggttcctaataatttcacataatctgcgaaactcagttgttcttttgtattgcttgcagaattggaaagcccggtgtgctgtcatctatagataaataacaataaactgccaaatataaattatcactagataaaacaatcgcaaactacgaaatgcaatgcgtaaatggcaaataaacaaaaaaaagatcaaagtttcccaacaatatataaattagtaacaagaaccaaatagccctagataaaatcaaaacaataaaaccctcgatttctacagccaagtatgcctctagagcaccaaacagcactacagggactaacaattaagacaaacccagttcaacttcgacactaaattctagtgaaggaatagaaagccctatagataaataacaataaacaaccatatgttatttttcattagatagcacaatcgaaaactacaaaatgtaataaggatggcaagtaaacaaaaaagatgaatatttgtcaaacaacacacatgtaacaagaaccaagcagtccctagataaaaggataagaataaaaccctcaatttctacaagtacatctctcttgagcagagactaacaattaagacaaacccagataaagccctaataattaccgcatagagtgcctccaacttggagttgtttcttaaaatttccagcacggttctatatgtctcccacaaaaacttgaaccaaggtgtaacgagctcacgatccgatctatcctttcccttctctccactaacatagcttagcataagatcttcaggcctcttatcagcttcaagatcatcaacatcgagtgcttcttccaaggcttgggcctggctacgagcctgctcagctttctcagtagaaagatgcataaagtgcttgataacctcttccaaagaagacacattcacttgttggcatatgatacgatactgaatcaaaccgtccttagcgaatcgaccacgccttaagtccacacatagctcaacatacttgaacataatcctctccaatggcttctgccatgcccgatgcttcttcgacgtaataagatcatgcaaagcttgcagagcatcttgcttttgcccaacattaatcaactctgtatccacacattacgaccgcaaccaatttcagattattatacaaaactagaaaattaatatattacacgaagaaatatatacataccttcggcgcgcttcagagcattctcgggtttggcataggacgccataaccgaaaattttcttcaaatcttcttcgtcgatacaagaaaatgaaacctaatcaaagaagagcaggcggttcttggttggtatgagaaagatgatatgaaaccctaatcaaagaaatgggtattggctggactgggcttatcagggctgggctggactggactgggctta

SEQ ID NO: 36843 - DNA, 3098 bp, Cannabis sativa
  modified_base (1808)..(1815): a, c, t, g, unknown or other
tgattttggtagccatcaaaacttaactaagctcctttgtgtaaaataccgcaaatccctttttctacatcctctgttgctaaacttttctggaaagaattgagcatgcctcgggttctaaagggtggcacaatttatactgcattgtatgtcagaatgacattagtgttccataactatcaccatagtgtgcttgaatgtcgttaataatgttcttgctgattgcctgtcagtgagtcgtgacagatggtttccttattttcaaataacgaattcaaataggaatatcttaccgccttgatttcattatagttgtgtctttgaagtacttttaagatactctaaaactgttggatgattaccaattcctttgagatatatctactatagcctagatgcagcttgcagttaaatatatctagcaacaatgtccaactaaattattgtttttataagtaatagtagctatttcttttggtcaaagatttttgtttctgaaattgcctgagctcttataggttttgctccctgaaaatacagggttgattgctactagggaatgagacatgtcctggtagagatttataactggaatgggaaccatctttccttaagattgtaaatagatattgagaatcatcaccttcacctttgttttggtttgccacagaatttgtggaggatgttgatctcttgatcagaagagctgagagatgcttagaagcaggggcggacatgataatgattgattcagatgacatctgtaaacatgtggacgctgtaagagcagacataattgctaagatcattggtcgccttggaatagagaggacaatgtttgaagcttcaaatcccagaacctctgaatggtttgtcaaacagtatggcccaagggtatgctgctcacacacattctgcatgtatcgttttttcatttgaaaaattctattacatctcttgaactaattgtagtttgcccgtttgtgcaggtgaatctctttgtaaaccactctgatgtgatggatttggagtgcctccggggacgcaacttgggaaagaatcattcctccgtccttggttcctcatattttctcttctgaatttcttccaacttttgtttcaataaaacaaacatggaaaatggtgtgtacatgtatgtatgtgtaaccagttatatggttggattttttttttcttttttttttttctattaatgttgttgtccttatgagaggcattaagaaattattaaaaactttgctttgaaatgtgccgttataaaaagatgagatatgtagaataacaataagatgaataaagagcccaagaaaaatacaactttatgcaaaaagattacaactactatagattaaataaaggtattataaaaatacaaataaagagaggaaaagatgagaaggaatatattatatattaagtgtatgaggagaataatatagtgaatagaatagagaaaagagatgaaaagaagaaccaagtgatgatgggtcaccaaagtttgaataatgtttcaacacctttgttaaaaaaaattatttttctcctctgcaaaacgtttaggattttgtggaaatatttttgaaaattattaaaactaactctctaattttaagtggtgtttggtaataattttttaattaattttttatttttaaaattgaaaaagtaaaaatattttttaaaagcatattctataaaactgtttttactttttaattttttaattaaaaattaaaattttaaaaaacaaaaaaaagtcaccttcaatatttttttaaacaattttnnnnnnnnaatcaatattttagactccgacgagacccaaattcaaatcctccctccacggtcgtagcactgaacccgacctctgacccgaacccaaattcgacccctaatctaaaccctacttaaataaaataaaataaataaaaataaaaataaactttacggaacacacttttattttctatttttaaaattgaaaaacaaaagtggttgcagaacgcattttattttttaaaaacaaaatttttaaaagcaaaaactttatttttattttgtgattaaaaaattagaaaacaaaagtgttaccaaacgttatgtttaaaaaatagaagagaaaaaagtgtgtcttatgagtaaactataggatcttatttatagtgtttaggttagaccaaaatttgaaatttaaactccacttcgctttggctgttattgaaaatataggattaaatgagatgaaaagtggtttcaggtgacatgttgcctggagtgtttcccacaaaccacgcatcgagaaatcatcgctaaaccctgaagaacccacgacatccctactagtaaaatttcagcaactcaaattttaagttttgaaactcttcttcgagccaacttgccaccaagcatttcaatctttattttaatgatatagatgagatatgaacgttttccaataactataaactgatatctattaatccgataacctattgtgtaataattattcatagcataatcaaatatgattcttgagttacaaattcaaattcaaattttataactccccataagttacaagtttatgagtaattacattatatcacacactatatagctctcattcactttatatattaacctcttaataatatataatatcactcattttgatcttgtatggaaggttatttttcacaataaatcatttttaaaagacttggttgaaattccatattctaatattttctaggtaagtttgtcattctaactttgatgccacattaacttaaaacgtaaaaggggaatagaatctcgacataattagtattaatttatttatttatgttggaataagtttgtattactttattttgttctccaaatttggaacttttgaccataggtggtgataactttctttcctatatatcctgggattgaataacgtaagacatatacatagtatgtctgggtggctgctccaacaacaagagtgttataaattatttgcctgaagaagaatataaataatggaaacgagatttctcctaaaagctatggccgttccaagtcca

SEQ ID NO: 36844 - DNA, 7775 bp, Cannabis sativa
catgggaacatcgaccatgtaaggattttcatcagtggtagtagctaaaataattgcttgtgttcacaccatgattgttggaagaagagaatgaaatcttgaagatgcaatttgatttcttgcagcttcaatgtatgtttactaatacaatattagaaactcaaagagtaaaaaacactttattgaattaattttgaaatggtacaatgaagggtcctttatatatacaccaggagattggataataaaaccaactaaaataaaaaaaaaacaaaaaaaaactaactgacacctaactaatattaacaccgtttcacgtcttgggacaccaaagaacctcacattttattccatctaaggtctcataaaacttagtgaaaggagaaccaatagaccgattaggaactagttttgcagaaatggcgcgagtgagaacttgacaatctgagaggagaaagcattgccctacacaaaaatttttaatgactttcactccgtgaatcaagacttgaagtttcccagaaagagggtttgtgacaaatatcttactagcatacaatgctataatttaattacatgcatccttcacacaactcccacatcagccaacgactcctaaacaacatcattgacaaagaaacagtacccctctaggccaaaaggcagctctagcacagaagaaagaattgcaccgcgcattatcacctttgtctcacactttccattcctagagaaatttttctttagcttagccaaattgtcctactcaagttgaatctactataattaaattaagtataattttgaattaactatttttctatgccatcttaatatatattacttaattaggtaaacgtaattagtacacatatgcataatataatatgggcatccaaattaaaccaatggcctgaaaatcaatgtttaacttattgatcatactcatggaacccgtccttgagtaactttcaatataacttgtgcttgtactctctcgattagtactgtgatgagttctgtcccctccttgcatttattgactacaggttattgtgcgtcccgagctagaactcgtcttgtcacgtaccagccttgtcctttgggtacgtgttgttgcatgccccctgctagggttcgtatgtgcccctcccctgttggttcgagaaggacgttgacgatgtctcggtggcaacccacctgtgctaggttgagtcccaagatttccttcattatcacgagggatttcctgttccctagtcccgggtcgccttctattctcgtttctgcgagacggccctagttggtcatttggttgtcattttcagggggatcctcagtttcccaaggttgttcttcctggcgttctaagggtccttctaagccgtctcctgcctcatagtttgtgagctgcgaggtcggcctcgtggtttcctcattctaggatcaggttggttttgtgtgtggttttcctgtgtcgcccttgccgcggctccctcccgttccagctcaccgtctcgccggtttgcctcctccaaacattgccttagttaacgattttcaaactcaacaatcagtatatatctcgtgggatcataggcaccatcatccatgggttgagcaccatcaacacttatgttgggtacttcattccctgtttctgggttttggccaccttcacgtagggtccatcttgaacgtgtggactttgtagatcgtgttgtccatgaattgagaggccttcatgagcccattagctcttttccaggacggtgagtagtctcttcaagacgagtatcatcacttttcccattatcagccatggagaaagatttttcttttggttaggagggttttttctgagcttttttcatgtaggctctcaatgaaagtaccaaactgttaacacaaatttttgttaacgataataagcctatttcgtgataggattagcacaaaaataatagaaagtcaaagaagaaaatataacgcaaagctttttatgtgggttttcagttaaaattctgcatagtcaacgagtcagtcttattcagattattctgatataaactagggttcttttccctcaaggattttccgtccatttttcagtagattctgcccctatttatagtgacatagggtggaggttaattacaatcagatacgaatcccacaacaatatttccctgtatttgtggtcttcaattacgcaccacgtaaataaatgcggttattatttaaaaatcatatagttgtgatctatccgcttttaatgggtcaatgctgacgtgaatttagatacgctccaaagtgtatctccctgggaatttggatagtaacaataaccctggcagtgagctaaagcttttccaacgtcttttcaaagttaacaatgtaaatcccatcgtttctgcaattgaatacataagctccttctgataatcgcagctcttggtgacaaggtgaacttcagtagccaacatcatttgaatgtaaacttctttctaagagagctgactcgatatggcagtggaactcattgaaagatgtcttgagctgattagtgaaggtgccagtagtatgccttcctatagcgagatggatgccacactattcgtcactcaggttcttccagctgttatacttagttagtataatgatattatacgctaaattttctgactcccaacacatctcgtcaatacctttttatacagaacgaggttgacgccttgctatacattatcaatgtcatccttatgatcgtgtcttctgacgcgaaatggtttctcatcaatacgtgaatcaatagtttgtacatctttgtctcgcttaatactatacagtcagtgagttatagatgtgttctatcaactccgcatttaatgagttattccatttagtatctttcaatttaattgtcgtgatatttgttattcgtattcccgaaggttgacacgtgtcatcctctaaagtgtcagctgaattttgggtataacaataaggataaagtagtgagttggaggaaaaaaagcaccactaacaaaagagtgttgaagcaacaacctggtattttagataatgataaccacgagatgatgactaaagcaattgctgaggaaaaataagagggaagtatagatcttgatgataatctcgatggaaataatggaaataatatggtgaattttgaagctagcgaattaagagagatgaacagtaacaaaccagtttgtgaagagggtatagttggtgaagatggcaaatggataacaccaaaaagaaggaagacatgaacatcagtaaggaaaattcaggtaatggctatgaggttcttcaattaacaggggaatgagtcctgggtattatagtttttcaaaactgatggatagttggaatatagtagggtggaatgtgagggatatgaataaaagagaaaaggaaaatgctattcttgaggtgtgtaaggaaaataaagtaggtttgggagctcttttaaagacaaaagttaagaatgataaagtgaaggatatgatagaaaataattccccaaactgggatatttgcttgagttctactgctgttggtagaattttgttgatttggcaagctaagtttgtataggtggatgtgttaatttaggatcatcaatttgttcattgtaaagtgaaagtgtgcgaccaacaagattgtttgtatgtcactacagtttatgggagtaattccatagtggaaaggaaaaagttatgggatggtatagctaacattggtcatttgaaaaacccatggctgatttttagggattttaatgtcatgtttagctatgagaacagagttggggaaagacaaattcttgacaatgagatagaggatgctcaagattggcttgccttaggccaagtggaagaattcaaagctctggatctcatttcacctggactaataagcatgataaaggtgattgtattttctccaagtcagatagattttttgtgaattttcactggttagaaaatttcccaaaagctgaagcttgcttcaaattggactttattttttaccagaactattggttgattaaaaatcaagagtcaaagatgggttttatacaatttaggtattgttatcactgggtttcttgaaacggttataaagaaacagtgatgaatcactggaagcttaatacttatcagaatggtaatctgtaacagattgtttagaacatgtttcgaattaagcatgctttaaagagattcagtaaaaatactgtggggaacattgctttggagtacaaaaattcaaaggaggagttcagtgatatacatagtgaaaatcaagcagcaacaactcctggatctataggaaagtactcttgtttcctcaagcagcaaagcaaaataaattggcttaaaactaatgatgaaaactcaagatattttcgtactactacgaggaaaagaagaatggaaaatagaattacttcagtcataatcggggacacaatggttgatgattattcaaaggttgtcaagcactttcattcccatttcaaaaactttatggggaggagtagctcgaccaggaggaagcttgatattgactcccttaaccaaggaaacaaactagacattaagcaacaactaagtctaatcaggccttttactaaaagtgatgttaagaaggctctcttcagtattcactcatctaaaagaccgagtttaaatggcttcagttcatgcttctacaaaggactttaggataacttaggagatcaaatttcttatgctatccttgatttttttcaagaaggcctgctgcctaatgctcttaatgaaatagttatttccctaatcctgaaagtggctgacccgaaaaactgccaatgattacagacttatcgcttgttgtaacagtctttataagtgtatctcgaagatgctttatacaagactgtcagaagttcttacacttcttgttcatcataatcaacgagcgtttgttaagaataagctgcttgctcataacatccttattttttaggatctcctcaaaaggcatactaggaaaaacatctcagcctggtgcataatgaagattgacctaactaaagcctatgacactgttgattggaaatttttggaagattactaaaaaaatttttgctttccctagaggttcattaagttgaagaatggaagaatccatggttcattcaaaggtgaaaagaggcttcgtcagggggatcctatctctcccctcttatttgtgcttataatggaatctctaacgagacttctgtctcagctttcaggcgaaaaggctttgggtttcaccctatgtgcaagaatctgaaactaactaatctttgttttgcagatgatttgatcatgttttgcaaaggaattctgtaaggggtattcatgaatcattcacgatatttggtgaattagtaggccttagagcaaacaaattaaagtctcatatcttctttggaggggtgaaggaggctgtccaagacaaaatcctcaacttgattcaaatggattacggttctttccctctaaaatgtttgggagtttatcttcatccaaccaaatggaaagagactgattgtcgaggtattctggagaaattgaataagaatatcaattgttgggccagcgtgaacttctcttttgcatggtgtgctcaacttattcacttagtacttttgtggatcaaaattttttggatgagcattttaaacctcccaaacaaaatcaccactgccatagataaaaaatgtcgagactttttatggggagctaatggaaatagaagcaaactccatatcccctcttaacataaattttttcttcctaaaagttaggaggagttgggttcgagaaggcaagaaatggaatgtagctttgatggctaatatatttgggcaatttcttgtgatcaatattgtctttgggttaaatggattatttccatttaactcaaagggaaaagcttttcgggcatcaagatcaatcaagatatgagttggtacttcaaaaagttgctaaaattgagaaacatgattgatgaaacatccttgtaacttgctgaaaggagaggtaaattcaatgccaaaagcttttattactcttttgttgatggcccttgattatacaataattgtgttgagcgagatgcttgtacccaagcgtagattcttatattgtcaggttgttaactcctatttgctcacaagagaccaactgaatcgattcatgagcattcctaatgctaactagccagtttgtgaagaagatgttgaaactcatggtcaccttttcacgaagtgttgtttcactttaaatgtgtttgaggaggttgacaattgtctaggagacttcatttggtcgaaaactatcttggaggtgcttaattggtctaagcaatcgactaaggatttgaatagcacaatttttatcattgttctttctgctacattgtacttcatttgacaaaatagaaattcttgtatattttagttcttttgtttatcggctaagaaaattagctcgaaaattagacaaatatctaaatacagattgttgggtttgtggctcccaaagtgaagtaaaacggacagatatatgctgaatgtaattgagagtttggtaaggggtgtgttgcgctgcttttgcttttgttaagcgactatttgttgttggggcagtttcatctgctgccttgttttgtttttgtgctggtatttaaataaaatattccgtttgttaaaagaaaatctatataccaacaaccaacaacaactcataaaaaattaaaaaaaattaacatctttcaaacaaaaaagattttaacaaaactgatatagatataccataagattagtaatttagttctgattctaaaaaaaatatgaaaaaaagaattattaattttttttatgtggcaaaagacaatatgataataaatagtctaaaaaggatatttctctataagttttaaaatgaaaatatttactaatatagtgctataatttgggacaatttactaaaatttcccatttatttaagaaactagtttttgggcacgtgcaatgcacgtgctcccttaaattagtataaaattagaaaaatattgagaataataataaaagtaataatatatacataattaattaaagtggtcataggcatagtctagtggttccatactcctcttaaagaggaaatctcaagtttaaatctagtggcaaagccagctacaagatggcaaaaaaaaaaaaatggataaaaattagacttataaaaaatattatttttattataaggaaaaataaaaattttatagagattagagtagatatatgagactaaatatgaaaatatgtgaagataaaaatataaattataaatttatatgggcaaaattataatatgggatggcaaaactaaaataaaaattaaatttatggggacaaaactataaatatatatatataaaaaaaaatacatacaaaatataaattttaaaaaaaaattattggggtcatgtgcccccacatgaccccttatccttctgccaatgtttgaatccccctcgcccaatgaaaaaaaatactataaaaaatcttacttttagtcacaacaaaatttatggttaaaagtaaaaagttgtgacttattataaatcatcattcctatgttgtgactaaaaagtctgtgcctaaatgtattagtcacaaaaatcacaatttgtgtgtgactaaatgt

SEQ ID NO: 36845 - DNA, 4280 bp, Cannabis sativa
tatgtagtgctcttgttttaaaattcatattgcatcgaaagtggggtctttttttcaatctttttctttcataaaagtaatctccactgcagttcttaaccttttttattacctcaaaagaagccttggcttaggtttcttatgtgtcaacagtgtaatagtaactttagtctgtggacctttaaaatacaacgtaaatcttggtccttttcgacaacagaaaagtctttaacgattctaaaccgagaacaaaatgaacaaatatgggtgaagcaaattgaactacacaaatcccagttgtagaggctctagtcatacatggaagaaaagagtggaaaccccctaaatgggaaggcataaagtaccttcaaaggaaagaacgatagtctatagaaggatatattccttactttcggttttgtaaaagattcaccaacaaaccacacaaaccaagcgttttaaccacgccttatttgtctttccaaattacaccactacccttatttcaactgcaggtttctcttatcattttcaaaccaaagaagggcatggtagtaagtcacttcatgtcaaaagcaattccatgtttccatatattggtatggccaatatggggagtactgaaagaagagaggaattcaattaagatggatcaagaacaagttgaaatggttgggagaatgttcgtggaccggtactaccagctattcgacaacgatagagcttcggtttctttgttttatcagcctaactcaatgctcaactttgaaggccagaaaatacttggtgttgataacatatcttctaagcttaatcaattaccctttgagaaatgcagacatgatatcagcaccgtcgattcgcagccctcgtctacttcaaccggtagcattgtggtgtttgttagtggcagccttcagttggtaggggaagaacactccttaagattcaatcaggtaagtcatgttagtttatgttattaggtagagaaaaattagttaatattgagttttgaaatggtttattatttattgattggtgcagatgtttcatttggttccatttggacaagaaagtttctttgtgcagaacgatatatttcgcctcaattatggctgagattggcattactacactatatattgttgtcctaattgaataaacattatactatatatgatgcacagtttatttctctctaaggctttcctcaaaattatggttatgcgcttgtaatgtgtaaaaatgagtaaatttagccaaatataattaagaatgtgtgtagtagtagcaatatatggagataaattcttaaactacttactattattgttcatcaactgttaatcatgaaattcccttaaatatttgacagaagagtaagaaaattgaacattttaaagttcagggaccaatattgaatgatcaattttgtgtaccgtttgatatttgggggtgtgagtaaatctctaaaaaaaactatttgggggtgtgagtaaatctctaaaaaaaaaaaaaaactcaacacttttaattaaaactaaaaaatgacaaagttaaaagctttggggaaattagatagtatacctttttgtgtaaaccttttctggttgttcaggacccataccaaagtccaggccatctttaataggttgggccttggcccatatctaagaattaatttttataagtacgactatttttcttaaatgataaatttctcaaccagctttcaaattaaaactattttgctgtgacgaaatagatcttatatttttaaaatggtacaaataggactttgagtttaatttttaacaattttttttttaaatataaccaacttgaagataattcttaacacgcacaaatgtagaaaatttaactatttttgtcataacacctctagttcggattattattaagttttattttgataaaaattagtttagggacctaatttgtacaattttagaaaatactaaatctattttatcatttaacaaaacagatactccaatatgtaactttataaaatacaggatctaaaataatatttacctttatacaaagatttgcatgtgaacaattttgcctttatccaagttaaggtatttttgaaattgttttgcattttatgtatataattgaaaaaatcactatcataaattattatgacaattaattatttataaatacataatttttttacttataatatcttaaaatttaattatttatcgaaactaaataaaaatattaattagttcgattggatattggatattgaatgtatttaatttttgattacctcattcaacatccaatcatccaattagatatttgaaaaataacatctccaacctgatccaatgacgtttagatatccaatagttgatggttgattgtaattagattagtaagttattattgaatttgatcgatttatacacaccactaattatggaaagcgatcatttttttttttgacaaatataatttattggcttacaaaaaaaaataataattttttttataggcaaatgggaaagcaaaatatatcaataattgtatatcatcacttttcatgtaatgtaaaagcacaccatgcatgatataaaaacaaataaactcgtgcaatatatgtatatatatatttatacctttaattatttttggatgataaaatatactcaagttggagcaaatagagggttttaatattatagctttatcttctttattaacaaagaaagaaaaaagcttacaagttgttgaattatcatcagtttgtcgagaactataccattaaatattagtttcattaatttatacaatcttcaactacttgtactgatcataaacactatcctcgattattcctcgttgatcacaattgcttataatatatgtttatgtaaattaaaaacatgaggaaaacaaaacaaagctaataggcaagaaaaaaaaaacaatagaagaacaggaaaaagaaaaattattagaaattaatgatggaactcatgtgcttttatatttatatcagatctaattgtattcgatccaccttaattaaacaataaaatattacattattaattaatatacatatatggtgcgataattacttgttgtagagaaaaaaaatctggtatatatggtctaattaaaatgttttcaatattttaatttgtgttttcaatattttaatttgttcttaagtttcttatggcagtgttcatatactatattctgattttgggcacaattattcagaatattttttaaaaaaattatttgtaattatgattactatcatttgtagttataacaataatattaattgggaagaaaagataagtgtcgtgcttttaatttaatacttaactactacagtagatctgttaaacttatatccatcttactgtatttgaatgaataatgatatagtacttatatccttccttatcatagcaattaaattttgtttatcattattttttgaaagataattaaatatttgttagttgaagttataatttactgtaaaaaaatcttaatttgagtcacaataaaatttgtgattaaaaataaaaaaagttgtggttaattataaattatcattattgtattgtgactaaaaggtccgtaactaaaaatattagtcacaaaatttacaatcggtacgttattactaaatatacttgttaggattaaaattaaattagtgacaatttgtatctaaatactatgttttataattttttgatgtaactaaaaatcatatttagtcataaaaaatttatgttgtgactaaaagtttatcactaaaaataactgttttttttagtgattagaaataatgacaaacatcaacgacaaatttatcaaattaattttaacggaaaaggacacgtgtacatgtgattctctcttttggattaatcagatatcaacatatgtgatcaactttaatttttttggtccttaattataatttactgtaaatttaacataaataagtgtttaatttttactatcattatattattggctacgaatatatttactttctattattttattgttgttaaaacgtgcgtctatttgtgatccctttatataatatataattttagggacaggattttatcggtgatatacttttacgtaatgtattccgtgttacattaaatgggtctcagggtacattaaatgggtttcagggtaagttactattttttaattctaattactcctagatcaacttcagccctcagatc

SEQ ID NO: 36846 - DNA, 8223 bp, Cannabis sativa
  modified_base (4889)..(4895): a, c, t, g, unknown or other
aaaaaaaacagtataaaagttatatactccgtgcgacagtataaatgaaaaaaaaaatgaaaaaggcagtaatggatgttaatttcccaaaaaaaaaagcaaaaaagtattttcttgccatgtaaatattatttatattagttttataatgtaatgagattacaatatataatgtaattgcaatgtaaagctattacaattcttattatattaaactaaacatgctttaaatatatattttataatttacactataattgagatgtaaaaaataaattatataaatttttttacaattatctatgaaataaaaattacacaaattacacagacaaaaatataaatgaaatgaaacaataaaagctaggcaagtgatagcctcacttagtaatataaataagtttatgaattttcatttgtaatttcacaaaattagatttttttttgtcacatataataatagttttaaaatatttttattattcaatctaatcttccttaattagttataatttttttatttattgttttattaaaataaaaatatattataaaataataaatggaaaaaaaacaactattcacaatatgattatttgacattttagtaaaaaaaaaaaaaatcacatatttactctagactaagggtaggtttcataaatattatttctattcaacacttaattttcttaaaatttgttttaggaatttctttaattaaatgtaataggatttatctaaaattaataaacaacaaataagataaaatttaattttttttattatatatgaataaatagaatatgtttttaatatgtattagatcggtttttaattgaattttgaaaatttcattcaaaaaccgatcaaattcaattaaaatacaactactcacttccaatacaatccaactgcaattggatgcccattttttataattagattgaatttgattaatttgttgtaattcaattcagtgtaattagatcataaatcagctcacaatcattattgaaagttaggaagagaaaattttgatgttaaggtaaaaatattctttttacattatatttaatttataatttaactaaatagagagaactaaaattttttgaaagacataattaaaatttatatttactgtattacataactgcgctactacgcgaaacgcaattacgtttactagtttactaatatgagtgctctattagagcaccaaaaatcacattttaactaaatatttagctacatatctattgtgcctcatatttgggattgctcaagtattgataaattagtaactatataaaatctacacagcttcaataatttaatattatcatattctcaaagaatgaaaagaaaaaattatacaccaatgtagtgtagattcaatatccaacaacattgatagtgtttacagttacacaccaatttggtatataatttgatatccttttggagtggaatggtgtgaaaattccatattcaattagtgacataaaacaagcagatttagagactaaattatactgttacgagttaaacaaatcagatgagcacatgatgataagaacaaaagacttaacagacaaatctaaattaggtttagagaaacataacaactaattttcattcatcgaggcaaagagtttcaccataacaaagacacaagatagcaaactctaaacaaacctctaaaacatccaactacaacagctactcttaacatgtaatgtaagcttcagtcatgtcagaatcagtaatggcaataccaaaaagagatcaatgagatctataccactgtattctattgtcaaagacaaactttagctaatcaaaaaaacaataaaatactattactgtaaaaacaactgcccctaaaactgtaaccttcatttaatcttctcaactatgtccttgatggttttgtccatgtccaaatctttcatcggctgaaatggtcgcttcatttcctgcaaattaaaacacaggtataacaacagtagttaaagagattattaataaggaaatactattaattagcagaataactgattcacttgtgtctttattatattaaaaacctcttgcaagtttatctattctgtccctttaactaccaagatggcagagccatgatctaatttctattagtagaaattattctccaaaaacccaagtcaaatcatattgaataaagttcaatgcagcaacacaagaattcaattaatacgattaaacttaccaaaaggctgatgaatgtctcgccgtctttctcacgaatctcaaagcagccccttctaggctgttgaaaaacaaaacaaatcattgttattatataattttactaaataatggtaatgtaattcatgatgaagcttaaggtttagtgtttaaaagtaataccttatctggattgagcacaactgtgattccagagacaccatcctccaacccctgtttcacctggagagcccttgtcttaaaggcattgcattgtttgctagagaaagcaaaaaagtaaattagaaaaacaaggtcaatacagatgatataaaacatattaagttagccaaactagaaatttaatctataatctatacaatacacaatacaatggttgagattgtgaacaaaattccacctgattaggcaaatctctaccattgtcctaattttctgattcagttgaggccaaaaacgaaataccatttacacattcatagactcaaaggtgccttagctcaagaaacacacagcacacacacaacctaactcattatcaagatattaacatcagaaatgattgatgctatgttttttaaaatatatagcacctaaagaatggaaagaaaaaaaaactttaaagaaagttgataaaaaccctaactttaatcacttgtttttctccgccattttctcagtagccgcaatatttattattagtcatttttcctctttataaccctagacaaaaactaaaataaaaaaaaatagagataaaaaagggatcttgattctttctttaccattttccaagaaaataaatatatgtaaaaaggaaaaaaagaaacaaagagcgatgttatgcactttctgccataacaaaacatatgcaatgcaagaaagaaccttttttttttctcaggaatcaaacatgataaataaataagtgaaaaataaacaataacaagaaaggaaaatcccaaccagtgttcaatgacgatggtcttcattttgggttcgaccttaaccttcatcttcttcttcttggtggatgtttcagctttcacctcaggtaccgggacgatggttccatcagtagctcgacgagccgcagcacgagtgaccctcgggacaggaggaggataaaccttttccgccacctcaatcttttcctcttctttcttcattgatttccttttcttggtcgccatttccacttgcagggtgagagagcagggcttcttcgttcttggacaaaacccacgaaataaatttctctctctctctctgtctttctttctctctcaccccttcactcactcactctctctcactttttatagtactgtaaggatggttttcgtgcccaagttcccgctcttttcttgtgtaggtgtatgattagactactccccccaaaccctttcattatctaaagagctggcaaatcctctttcttttttctttttcttttaaataaatacataataattcgatcattcactaaccttttgattttatttaacaatttttggggtataaaaaaatcacactcgaaaatcaacacaaaatttgcattaaattgtttggtatgtataagaaaaaaaaaaaacattcatattaagcattaatacttattattaaattaatgtgtgggacctaataggtgtttcacaatattagtgtcttttaacatttctaaaaacaaaacatagaaagagaaatctgaaaaaatgatttatgagagaaaaagaaaatgcatgtgtggtgtaagagcaaaagacaatgcttaataatgagtgggaaatagggttttgtaattgaataaatattttgttttgtgtaattatattaaaaaaaataatgagtggaaaacaaaaaattaaaaaaagtcccaatatactttttatctctggtttctctaaattgatgagaaacctaaattgctaatatattttatatttaattataatattgctttctttctcttgggttactagggttttcccttatttttgtagtcgttgttcactttagctccgaggaggacttgtctggccttgagcgcagttatagtcgggccttgcctacaaactactttcacttaatattttatttaatattggtcattattcgaaattacagaaaccaaaatcaacatatattcttaattacaaaccagaaaaccatttgaaggaaagtctttgaaccaaatttagcctagcctttaatgaagtcatgagcattatattcataggctcttcggctaatacaaaatggttcatggcccatggttagtttagccgcggtacatgtcacatgctaaatacagtccattactaactgatatgctacatgttaatattcgaactagtatttctatgttctactatcgaatgaaattgtaataaaattaagtatgtgttagctattgtaatttgaaacctcctgtcttttctcattacaattttttattttatttttaagtgaggcattatactggcaaattatacaaaagaagttgcaccccagcaaaacaaaaaaaaaaagagaattccatataacttgctttgatcctttttaatttaattcaaaatcaactgatcaaactagaagagaattcttaaattgctttaaatttttatatatatatatannnnnnnagagagagagagagagagttgtacttactgatgattgctacacattaattaactatagatgaaacttattgtacatatagggaggggacacagaacagaactgtcttggtctacttataatttaccaacaattaatatgatgattaatcttttattttttttcacacagaagtattgcgtctttggaaaacaaatagagaacctttggaccccttccccaaccggattttgtcatcaacatatgtgatccgaagtttcacctcactttcaccaccgtaccggaattccaaagctccaaccttcaattcaggtggctcaaatatcacttggacccattcttcatctagtgctatcagctttcctgcccatgaaaatggaatagatagatgatgatagagagaaatactcatattacaattctaattttaaacaagtttgtaactttaagtctccaagagaataattagaaaattagagttatcataatgataggaatttgaatctttgtctaagagcaaaccacatgttagtgcattttgtttaaatgtgacattgttaattaattgtaaagattaaaagcaaattatgtctagtttgaaaacagagaagaggaagaaaatgctatgctgagctcaagatagggtgagtgagaacttttctatttagggtacacgagaggctcttacagcaaattattacacatcatcagattcatcacagaatattctagcaattatatacaaattacaaccaacggaatatttcctaatgattggtactgcagggccagggtgcataccaaacttttgggaccactgccttttggtgatgaatcaaccaatttcatttctctctttctctcaattcaaacactctccttccttcctctctatctctaaccatccaccctcacaaattcaatctgatttttttttactttcatcatttaacaattaaaattttaattcaaacttaattctaaaatattcacttaaagatactaattcactaattttaatcctttaagtatatggatttgttttttttttttttggcacttcgtctcaaaacgatccacccaaacatacttgatttctgaggtcaaaacaatcattagtgatgcttccttcaaaacttgactttctaaggcaaaaaaaaatgatgttttccatgaaaacatgaattttgaggtcaaaatgatgcatttgtgatgctacaacaataatctcatataaacttgatttttgaagaaaaaatgatgctcaaattaagtttttatgagattatcgttgtatcatcgcagatgaatcgttttgacgtcaaagatcaagtttttatgcgagtatcgttttttgtttcaaagattaagttttcagcgttgtaacgtcacaagtatattgttttgacctcaaaaatccagttttcattggagcatagcttcagcattgttttgttcaaaattgaaacgtaaacaaaactaattaaaccttgtacaaaaatgttcaaaactcataaataagtatttcaagtgaatattttggtgagcgcttcaacgatgaagaaaggaatcgtgatcaaatttgtgagggtggttgagaatcaatggatgtttagatagaaagagagatgaacggtttgagagagagagtgagagtgacaactttatttaaaattgtaggaaactaattagaatgcaatgcatggatggtcaaatttctgtgtggcaaaagccatagaataataaacagaaagtaaaactggtggcagacagtataaaacatatatatatacatgtagatagatagatagaggagagattgtgatttaagacaaacctttcaaagagacctctccctccaggaatccaaaaaaagaaaaggtcactaagtttttgacaatgtcaggagattctataccctgaatcatttctttggttttaaaaaaaatgcgacccaatgcacttctgtacccacccccaggtgatgttggcaccgagcagtacaccacatcccaatctgaagacgaagaaaaagctacttttgttaactcttaggctatgtttggaagttggaattctgtggaaagaaaaaagtgtctaaaaaattaaaaagaaaaatcaatttttcatgtttgatatgaaaattttggttgaatcaactttttttcacatcaacatgagcaagtgattattttttttcactttttttacccaatattttccttacttctttctttccccactaaaatccaaacataaccttactgaagaagaaaaaaaaaccactcgatacacaacagtacaaactggtttcttgaaagaattagagacctgaatctttattgctatcacaagaattacaaaagttcccaagcacttggtgaagcttggaggtctctctgagtaagttttactcaattagaacaatcaaatcacccttcctatttatattaactaacacttaatgtctttaactaacatatcagcattattaactaacacatcagcactaacgggacagctcactaataagactgccacctcagatatacaattgtttacatcaggttttgataggaattttctctattaattgataaaagaagtgaacaagaacaagtgttgggtattcgtgagacccaatactactgctcaatacaaattaattgtccacagtccacacgacaaatgaaccctctgctctctatctattctattagtacttaaggtgtagcataaacccataaacccagccacactctaataaagtcccccctctgactaattctctccctgcactatcagatttctctggtctcctagagtagctgataaataggtgtaagcataatatatttatccaaattagtattgggtttgtaataatttaattaaaaatctcaagtcttcggatttgagtacttaacctccaaaaataagagggcatttcactggctcattgacacaatatttctgcaactcttgagccacttcagctacattcatgtgctcctcttttttaagcaaaacacctctgtcagattctgtaacctggtctgaattccaaatatttaattcttaatattttcaaaaataaaaaaatcattatagaacattaacaaacccatctcattaacaaatacaaacattctaaactaaaactaaaaggagcttgataataataataatgagagatatttggcgtaccttagaaagtatggaggaaacaagatcatcgagaccagttcggagctccaggttaggagccgagaccgaagctgagattctcaatgtcttgctctgacaaaaacgagggtgatgagatgataa

SEQ ID NO: 36847 - DNA, 3450 bp, Cannabis sativa
attgtcttcaagtttgttatattaaaaaaaaattgtcaaaaattatactcaaagtcttatttttatcattttaaaaatacaaggtgtgttatgtcattcaacaaaacatagggcataatcaataacttttgctgaacacaggatctaaaattatatttaccctatttttatttaggcacaatttgatatttaacaccatactgatataatacgttataaatggttagtgatttttttatattatttattaaattaaattgtatgggatatgatattaatttgtataaataatcacatgacacttcttgtagtacttgataattagcgtcgattcaagttaatgggatgatgaaaccaaattccaataatgttatggatgattgcatcgacttgagttgtaaacctcagttttgaacagtgtttaaagcaataatacaattctttgagaagccattacaatttacagcccaaacaacaaagagaagcaataaataaggatggattattaggcatatcaaacattttaatttttattgccaaactatttgatgagattgattgatgatttatttaattttccaaaagatgttttatgaacatatttattagagattaatacccttttccaccaccatcatcaaggttggctatggtgtatggctgtacaagtaagtaagtatatcattattatatggggaccaagacccatacaaattaggaaaggctgtagttttgtttgtgtcagcccttttaagccataaaaatataaatggttatcaacaacaatcataaatcacattctatagaccatagcactcaaaattcttcattatttagattttttatggaaaactttgcttgcagatcacacagatgaaaagggggatgacccatgaaacagtggtcttgcattaggaccctgctgttgaaagttcaacatccaagataatgatattgtttttgttaatgataagataaaaatctcattctaacctggaaaggtgtggcatgtaataagacagggtaataactttcacaacactgttgcagagcattggtaagtgatacttaagaagacctcgctttaacagtacctactacctaacttcactaccaattgaaagccagctctcaatttgagtatttaagatttgtaaataaatttgaaaaaggtgatttttattggcatctatggtgttgaacaccaatgttgctctccaataattctttaaatttaacaaaaccccctacgtgttgatgtcaaattcactaactagtgagctagaaaacccaccataattgatatacacagttttttttattcaaaattaattgatatattgagttacgggcttatttcctaaaaaaaaagtgaacacacaatacattacattcaaacctcatttagtaagctgtattgtattgtgttacattataattaaatattatttaatacaatacgatatttggtattgacttatattaatagattgtataaagtttatatttttaataaactcgaccccaatattgactacaagtcaagtccgagtccgtgtcttgatcccaattccggtcccggttcgaatttcgagtctgagtccaatccaatttgtgcccaatctgtgtctagtctggcgagtccaagattgagtccgagtccgagtttgggtctgggtccaaagtccgagtccgagttcgagtttgggtctgggtttagagtccgagccccaagtccaggtcccatcccgagtccgggtctaggtccgagtctaaagtttgggtctcgtctcgagtctggggtcaaggttcaaggtctggtgtccgaatccaggtcagagattaggattaaccctttatcctttgtaaagattataatacaaactaatacgaactatttgttatgtattaaataatacaacttacattgtattataaaatttagtcgtaataattaatacaatatattattttatccaaacataatattatttattatttaatacaatacaattcttatgacgtaccaaatgaggtcataaccgctcaacaactgtgacctttgatatcatgaagttgctgtattgagaaccaattagtcccatctaatttgagaggaacgttttgctatacgaccgactaagtacacatcttgacatgatataaaaatacagagggttactccagcaaatagcataaagttacattattatttgtaattcacaattgcatcaattatgtataacgttacacgtctatgtatgtaccatagcattaatataaatacacatatttgtaagtattagacactgtactacaagaaagaagggatcataagaccgctatgtattgaagcttaatcaagttctacaagactggcaagtttttaactatttggtctttgcataattaacaaggagatacagagctttgattaaaacacgtcaatcaagatactctgcaaaatcatgataatattgttttgcttttattccacagcaagagatgtacattgtataaagaaccaaaataaagggatcaagccatgccaaaaattcctagtgaggctttcctcatttctctgaattctatggtacaatatgtaatacaacctcactaaataatagaaaaacttacaagaacttgatatttaaagatttaactagtaaccattctgttttaattcagaattcttctgtttagctgattcacgctctagacagcgcctttccctctgtgcaacagaaacaaaaaaaaaatatatatataagcttttgagggtagcaaggggttaaatcaactaatcaggtttagcgagatacaaaattaatacaataatcccaatgaacattgcaccgcacaagtcgcctctaatctagtgggtgagtttcagagtcctcttgctctgagaaaatatatgattcttgttgctgaaacaaaactctcttgattgacatttaatcaacatgtggttcataaacctctcaaatctatctaatctggttttaacaaaagaggtggtattcatatttcatgatgagcccgctctaatacttctcagatattttcaagacaaacacattaaagcgtctatgtagcagctaattgaaagttcagataatttaaagtttaacatcaccagtttttaaaaaaatgatttgataatgatcagcctagtggttactctatgtttacaaccttgtactaggaagtttttttagaagatataaatgggagcaaaaataattaaaattacatacccaaattttcactaaattggtataaaattaaagaaaaataactagtcataacaaaacattttggaacatttctcaaacacattcagtaaaagttaataagcagttgagagtgatcatgctttggaatctgcatgcatgcaattcaagttgcgattattattggaagaatctatttaccctttaatacttt

SEQ ID NO: 36848 - DNA, 5375 bp, Cannabis sativa
ataaaaatacattaaaaactcatattttctgtaaataaaataatttaaaattctataaagctgtatttttataaattttattattatttttatatatttgtaaaataatctcataaaaataataagtacatgagtactcaaatctcctttattcttttttaaaagaaaaaaaaaatctattttttctgaataataattaaatgataaattattacatatattttttttattagaataattttaaaattcaattgcaattgcttaaaataacatatagaagtttagaaggaacattttcctataaaagaaatactattatgtaatattatttaattaatttataatgttttgattgtatttctttccatttcacattttggtcaattaaataaataatataatacactttaaattttagtaaacgtgccatgatcaattctttttctttttttggtagaatgtcatcatcatttaaaattagtacaaactttttttttttgtaacaaattcttattatcaaatgaattgtaccatatttgtttgattatataattacactgtaattatataattaaaaataattaagaaatttaaattatactctcaaatttagatgccctttacgagaattgggtgtaattatactatataattattcaaaaaaaatattttaaatattaagtattaaaaattataatttttttttgtgtaattactaactattttgtcaaacaaaatactaaaaattcataaataattaattacccactttgtattcaaacacgatttacattttaaaatatagtgtaattcatacactaataattatactacctaataattgcacactagaatacaaatttggattgggaatcatggttagtttgtaaataaataaataatgtagggcttttagaataaatatatatatttaatttttgaaagcaattaattgggtagacgaaaagaaaaaagtgtaagttgcttacaagtaataactaacaatagtcatagatatcagatataggtgtcttaattataacagaatacaacttcataaaatattttgtcttattaaaaaaaaaaacatatttatataatactctgtcatatattttcttttttatttaatttatattatatgattataatttatgatttaatgtgttatcatattaatttagacaaagaatggataaatggagagaaaagaggatttgaatgctgattcagttttaattcaaaatttcaaacttagatttttgttaattaaattattaataaaacaccaaaacctaattaagaacatcatctttgacttaagggtatatgcatagacagactcacatagaaacgagagggaacagtcgtccttcaatatttaaaaataaatatataatgagtaaattagaaaaaataaagaacatttttatttatttttaattttaaaataatttatacaatattaaaattatttaaactactgtatacatgtgtacacagaggtatgttcaattggtacttaacatctaattttaacaaaataatcaaatttgcaaatagaataaaacaaaaaaaagtattacttaaaaaaaataaaaaaattaactgtataataatttttctatttttcaccaaaagaaaacatcaaatttaacaagtcatcaaataattaaagcatattgtataagagtgaattcaagcatattgtacaaaagtgaatttaggcatattgttatgtttgctaattagcatttgtatatgtggtgtctttttctactggattttgtagctcattcctttcatttttcatgtgttgaaaaatataatattttaaatggcaagtggcgagttagatttaagtagagtaaggtgtattttttaaaattatataactgcgtgcgattttaatcatattctgctaaattatttttaaatttattttataaaatgttgtctattttgtttgttttgatttttacaaataaatatgttttgttttgtttaattttttatttttttaacaaatgtaacctctttttttaattaatatgaaattcaatgtggatatttagggttcaattaatgaggggtgataatgatatgacaaacttaggtgataaattttattttattacaaagtatacgtttacttgggtaacttttagatgttggtattatttttattattttgataaattagttatttattttaaattatgatagtatatattatagtttttttttttgaatggagtatatattatagttataatgtatgttacttaaaaattttaaataatttatagtcacataaaatttaatttaaagtaatttgcgatataaatatttaagtttaatttcggttgtaaataaataaataagtttaatttttggcggtactaatacctaagttataattctagaacttctataggtatctgacggttaaatattaagtaaattgtcatgtgacaatctctgattggcccaagtcattaaatttttattttttaaaaaattagtttaaataaattaataagaaaatgacacgtggataatgactttgcatttaacggtcaggtacttacagagttctagaaatataagttaggtattattaccgctaaaaattaaacttaagtatttattttcaaccgaaagttaaacttagatatttatgtcgcaaattactctaaaatttaattacaaaaatacataattttttagtaattaggattttttttcccgaattttgacacagatcaaatcgtgcatctcgaacttttcattattaaaaattccccaaactattaaaattatcagatttaaagattttcattcaattctgtttaagtttattaacagacatctaacgtgctattatcaatacactaaatcatgtcttccaaactttaatatatattaaattatgcctttaaaattccgtccaagctgtcactaggtgacgggttaataaaattgagtagaagttttgaaaaaaaaaatgatactaatagtaacgttttacaaagtggcactcaagaattgtcctaatttatttatataagttaggttaatgtgcacacaaatattgaaagtgacatcactatacatgttagtttgttggagaaaatgaagataaccaaagcttggtgtgagtttgttattcattggagtctattcaacacactccatatcgtattacttatgaattttagtattaaattgtttggattggattccttgggacccctaaacatatctaatcatcaaatttttacataccatttttcttagctaataattttgtaattatttattatctaaatgtttgaaataaagtatacaaaaagtgaaattttaatgagatatttgaaatgatagaacagaaaaattaatgaaagtgttggaaacctaagatcaactttaattcaacttaatttgtcatttgtcttgaagatgaacaataacacaatccgacaaggcacctcttcatctaaaattcttaggctatgtttggtaggataggaggaaaggacaaaaagaataaaaaatatgaagaatagagaagaaagtaattttcctttacaacactattcttcttaatataattatttattttaccttataaaaatatatatataattatttattattttttttaggacaaatatgatattgtatatattatatattgtctttttcttaaatccctccattttaggaaggattgaaaatttttaattctccttctacctttcctttcctctttcccttttgccaaacaaatgattatacatatccctccatctctttcattccacccctctccttccactcttctttccaccttaccaaacatagtgcaaatcctcaatcttcaagcatgtcccaaaaaaagctcaagtaacattttcttgattgaatttaaagccaatcccatagtagtctcatgctagggatttaccattagacttgcttgaaagtaaagagacattctatttaacatgttaatttggtggatttagcattaaactagttataattaatatattaacaactcaactttatatgtttttgaatgatcccaaaatccaactctctcaacctttgaaaacctaattgctacatgataatatgaatcacttggtataaaactaataacccatttagtaatagaaaatacttcattgcaacttaaactgaaaattatatatgttattcaaataatatgtaaatatatttattacatatttgtgctaaaattcataaacatggtgcatgaaacacaaaatcaaactggtgaaattctttgagtgaaaaatgaaatgaagtacaataacattttgtagtaaaaagctaactcagtctacttgatatttactacttagccttgctaaataaatacttgttagtctaataataaatagctgagcatattactacaaatctttttaaattgactacaatctcaaatatcaaacctttttgtctttttttccaagtaaaaggaaggaggcaaaatctttaaagctccattgatcattatcactttgttactctgtaagcctacagaaacaaaattatgatcaatgcaaaaaattgttagccataggtagaaaataccgaatagcggttaattttatggaaaattttagtagagttaccttgacccttttcagaagttcttttgcagtactgtcgttcttaaaatgttctcgcacgggctgggaataaaaacaaagcattgaatttagcaaagctgaaaacaaataaattatttgttcggtggaagaagctcatcatgttaggtgagaacaagtaccagaagtatcttattcaacgcctttgataaggcgggtttgagatcggctggatgaagatccccactctcgtagtcagcaattaaatcttcatagtttttgtaggtcctgaatttaataaaaagggtgaaaccttattatgtatagataagagagcatctgaagagatcgagaagatcttgtgtttcattaacagaaaaaagaatgaaagcagtacaatatttgatctcatgtttgtgatacttacttatttccaccattctgttcactccgctcaacagtgaactcattaaaccaggccaaaacaagatatttaatgtactctagacatggattcccttccacaatttttgggggacagtaagctttctttatcttcaaattcacctcagcctaacataagagaacaaaagaaattaattcaaatttggataaaatgaaattgtaacatcttcccacttcaaaaattcaaccttaagacaaaaagaacaaaaatattaattcaaatttgcagatattgaaatcgtaacatcctcagttcaaaaactt

SEQ ID NO: 36849 - DNA, 10406 bp, Cannabis sativa
  modified_base (5153)..(5154): a, c, t, g, unknown or other
gagagagagagagattgggttttaggatttgtatgaagaattttctataaatgaagaagattcttggttaagagtgtgagagataaacacttcaagagaatccaaacaaagaatcctctcgactgtattgtacttgtgttctttcttaatcaataaagacggtggtgttccaaaactagagtagagccataaatcacatcgatttataggacttaaaccaataaatatcttggtgttgattttattgttttcgtgctttatttgtttctagttttaattactctgctctaccatgttctatctctgattcttggttcatcattttattaatcttttcattgctaatcattttgtgatttaattatagttgatttgattttgcatattagttgtaattttctcaaaataacgaataaaaaaaaatacaatgtcactaggaatatcctaagtaatttgatttataactaaccacgaaaactagacgcaaacaagtcaaagagatgcatttagaatcaagattgtcaagcatgaaaccaaactttgatttgatacaaactagaaaatatagctgtgttttttgcaattgtgtaatagagcaaaaacaattttgtaacagagtaaatacaattttaaactttgtattttgccaaagttatcatttacctctttatttcattaattgacaattcgatatctttttttttttttttgaataagtacaattcgatatcttagttcaattttgatgaattgtttttaaccttaatctgaaaatttcctcatccctaactctaactattgttgctcaatttctaatctaattttgaccctaaaaaggttgacaaatatgaggctctagagattattatcttttattttgcataacataaattctaaatagtcatttgacaaaataggatcaactgttacgaacacatggtctaaaatgacatttactttacaaatggaaaaaaataaatgtatatatatcattttgaaccttgtattttgacaaattaccactttagacctaacattttaaaaaaaaattaatcttgtaaaaaattacaattacgaccctaaggtcaaattataaataaatttaaccaaaatacccttagtgatagtaagagttatgctattttacactatattttggtataataactacatttttagaaattctactttgtaacaaaatatatttcaaacataattttttattaaaatcttaagtattaaattatcatttttttaattcgttcaatcatttataaattcaaagtagtttgtttatattcaaaggtatttttgactaagaattcattttagttctaattaaaaaaaaaaaaggtgaggtccgaaataaaatttctaaaaatttagcgtaattgtactaaagtataagatctataacagtataactctatttagaactaattataacgtagtctcctaattataatttttttacaaacacatggtccaaaatggattcttttaaaacgtaggatccaaactcgtaattcgtcaagacacaaggtcgtataagtccatagaaaaattataacatttaattttattggttaattaaatttttttcaaaaaatcatatacactttgtgattagtagaaagacaaataaacctaatattattacactatataataatttatatgcacacattcaaaaacttttagcatattttttaaatagatgatataaaaaatatatttgaagaatcttaattttaaatatttttatatagtaagaatttttaggtattttttgaaaattaaaatgacaataatctaataaaatattttttttatttgttaaaaaacttaaaagggttgtttttatttttatttttttagttttaatttttttaaaaaatatatagaaaattgagagaatatatgttgccatctcgcttaaaaattataattaagacataaatacttaaattgaactcgcagttgcaagtaaatacttaagtttaattttttacagtaataataactaaattataattctgaaacttttataggtaatattaagtaaattgtcacgtggtaatttctaattggtccaagtcattaaatctttattttttttttaaaaaaaaagtactttaaatataccaataaaaaaaaacacgtgataatgacttaagtcaggtattattaccgccaaaaattaaatttaagttttatttgtaactggaaattaaacttaagcatctatgccgtaaattactcttaattcaataacgtagtttatctaaaaagtatgtcacatcatttattttgtgcatttctttacgtagatatacatatatattaaaataaaaataaaaactacagttaaaaaaagtaacttataatatttttcattttataaaaaaactggattaaattttctaattttaaaattttgacaaatatattgaaaaatatgagagaatatttgctgccacttcactgaaaaaatcaatttaatcaatcattttgccaatgtagaacaaaatgatctatgtatcctatcattataagcactcaatgagctcctaaaatattttagatttatttaaaggcgaataacttattagccattaggtagtcctaatcactatatttttcaaacaaacaaatatattaaaataagaaaaaagaaataaaacataccatatgttactttatcttaccctcaaaaacaggttttatgctgtcaactcgagcttgccacatgtcattctctatggcccattgaaaagcctacagtcgtaatgaattaaatttcagttattatattgaaaaataaagttgaaataaattagtaaaggcacgccgcattatacctgaaccccaattactggggcaacaacagagtagcgcttgtcagcaaaagcaccaaaccacgcatgcatacctgcattgtcattgtatatttttgtcaaaatataagaaaggtgacttcaatatgtgacacacacacatatgtatgtatttgtgtgtgtgtgctgtcaataatatatgataagcatcgcagcaaacctccaagtgattccccagtgattcctatcctagtagggtctatttcctttctttccgttaaatgatctgccagttttatcaagtcccagactgtatcaaatatgaatggcatggtatcaccttttttccatgatgatataagagcctacagttgacaaaataaacagatcagtgtgatgatcatacttcttagaggataataaacacatcattataagagtgatatatatacataaactactactgatctggatagtacgaatactaattaatccaacactctatataacttcaaattctcaggacaacaaatgtgaaaaagttttggatgaatctgaatctgtggccatcaattttccccttaaaattggacacgaagaatagatgagcattagtacaaacctctttgtaggtggtaaggctgctggcacgttcaccatgatagcgggaatcaatggcaatggttatgaatcccctcgaagcatatgcctacaaaaaaaatcacagaactataagaatcctattagtagatcaactatggaatacatatagatgtgaaaaactcagtttcattgaattcttctgatatgtataaaagagtacaatatatgattatacagaattctatgacaaaagtatagggaccaaaacatcttacaagcttctaggaataagaaaaactaataattaagaacgtatcaactaagcttttaataaatcttttttctgtaattcatataagataagagaagttcgtcaacgaaaaaggtacccacctctagcaagggtctcaaccactctttacacttgtttgtgctatgtagaaaaacaatagcaggcctttttttatctttcgtgtcgtccttcaagcttataatcaagactggcaaccgtccttgctctcctgcctaataatttggccattgtagcataatcttttaccttaattaggcttaaaaacaagtactaccttttacatctagcttgcatagaatttaaaccagattgtattttcccccaagtttaccaaatcgtcttaagtaacaccgaaataacattggcaaattgaaataacaagacttgataagttcaaaactattgaacttaatgcaaattacctcagtagtcaagtacaggttctcctcttgcaataagtctttcaaattctcaatttctgcctttgggcaagatgccattgcctagtttaagacccaagaaaagacaggaacgtagttatattcaatactaataaatggagaaaataaaatgtcaacgattgtgggtatggcttagacatgtaaaacactgaagatagaagcctaacctcactgaatcgaggtggagaagcctcctgaatcaaaggatttgtcactggttttgcagcctctacagatagcggaactgagaaagtaaaataaatcccaagtttcaaattattcacaataaaaaataaataaaaaatcctatgctaaatggactaagttcacctctacaaacgaatttaaatcacacatctcaaaatttccccaactattgttacatccatatataaaaatctactcgtcacaaaataatttttcaaaaatgagttcaatcagtgacaaactatggggaattcatctccaatatccgatggactatatattaaatcaaaatcccacacacacacacacactctctctctctctcactttacttactagtaaaccaaacaaaaatttgaccagaacattataaaatcgaatctacaggccattgaagctacttaccctcggtagatcgtctgctgcgaagaactttaagaaactcggctcgaagcttctcaacgttaatgggttcctccatgtcgctcatcgtcgtaatcgtactctcagaagtaaccaacatcaactggttaatggctaaggtggtggatgtgaacccatatttataccgaaccggttttggcgggtaagctagggcggagagcacgtgcgagaacttggaacacgtgcgagacctgattggcttgagttacgctggtaagttgtagtgatgagtttaggcagctgtactaacaagtacgctctccgatgtcatattattattattattannattattattattattaataattaaatattgaattttatataatttaaaaatataaattttagaaaatattagtaattgtggaaagctaaatatagaaggtgctaaaaatataaattttagcaatgctctttttatatatgagggtacctaatttttaatattatcatgaagtgtaatattattattaatataattaaatattaaattttacttcatttaaaaattaagtatcacttattttattttaataaagattattgagaattcgctaactatttataaaattgtattacccataaatatttctaatagggcaacatttatttatagttatcaaatatacacattatcttaaaataattttttattattttctctctcaggtaagatttaacaccttatccttcccaaaattttcactattatttcacatacaattttttaattaaattttataaattacgtatactctcaaaaattgattggtgataaaataactttttttaaaagaataaataaataaataatatcacatggctactattaacaatattgttcatcaagttagtttaaaatattaatcaaaatgcatatataacaaatactaatctatggacaatccaattagaaatgttctatcaatgctcttctacattgcatgtttaattaaaatttacaaaatatcttgtgttatttggcaacttatgtgtctctagcatcttatttaccaccgattactgatgtttataactattatttaaactaaaatatgtaaaaattgcactaatagtaataatactggtttttaaaatctcagcaaaaaaaaaaaatactagtttttaaaaaagaaaaatatttgtaaaaaaataaaaagaaagggaaagtggggacagaggggtaagtatgagatcacgtgatgacttgtcatttttttaacattttatttgtctttcaatagttggaaatggaatagacttttctaattgagctggtaaagaagtaggtaaatggaacatgggcattctggatctcgatagatatgaaaaaaaaaatcaattaaataacaaagtagctcaaatagtgtaatagtacttgttttctgattttttttgttataaaaattcatcttaaactataaataattgcaagtataccccttcagtcatattctgattatttatttaaataatttattaataaaacactcttgtgacactattctcacataatttaagaatcttaaaaaaaaattgtataattaacaatctatttataagttataagaatatatatatgcatatttatagaataatgtttataagtttaatgtcaataaaataaattataagtagcttaaaattgttatataaattcttgtactataattatatgtttttacctatgactcatagttatataaataaattatttcaaaaaaagaaaacaaagagaatataattggaggaaaatatttatatttatttttataatttaggagatttttgtttttttttttttaaaaaaaaggttcctatttcaaaaaaaaggtccaggaaaaaatttcttacttactctatattttttaattaattatttatgacggatgaaatctaccctttaaaaagatattgatataatattaagtgggcttttatccacaagaggtgtagttgtattcttctttctactattcctgtaaatctaatttataatgaccgcgaagtctaactatgatgctatctgatataattcacgatttatttcaaaaaaaatatatattttatggacgcatatcattatatcattgtttcatttgtttatcactattattattgaaataatttagcatcatacaaaataatataatatagttaattattatatttaatacacaaaataatgtatgataatattttatatgatttttttaacaaaagaagtatcaaaacttaacttacttttgcatttcagtaccaattataaaatttgatttttgacctgcgtgtcagtatatttttttttgaacaataagagaattctttattcaaacaaacaacaatagcaacaacaaaaacagtctagccaaggaactaagccgaagccccagccctcacggccaactagcaattacattgagaatatatctatcacgcttcctttttcccccactacaaccatttagacacctggttttaacacaaaattttatctccttactcatagctctagcatttttgcatttcatctcaaaatacaacagttcttattcatccaaacagtgtataaagtcgccaaaacaactgaattaagaatctttttctgtaggttgttggaagggttcgaaaaccaatccctgatgttagatggccaagtgaacttgccacaccaagttgtgatctcgatgatgactctacgggtgaagcaacaattaacaaacaagtgttgatgagattccttttccacacagcaaaccggacaactatctgaaagaataggcatgattttgctgatattgtctctggttagcagttggtcattcacaattttccaaccaataaatctatgctttattagtgtcagcatattagtgtttcatattttgatactttaactacttaaaaaaaaatatacatatatattcttgaaaaaaaaaaaaataccaaaaatattagtattttcaccataaaaaaaaataaagttttagtatttaactacataaagtataaatactttaatcataaatatctgtatctcattatctcattcacaaaatcaattaaataatttttattcacttgtttaaagcatgttattatcaaaagtgtatttatatttgcacacaaaatatgtacaaatctgcacaacaatgcaaaaattgcaagttcattttagtttgaattttattgattggaaaaggttaaataagatttttgtcttttaaactttaacatttatcaaattatgctctttgaatttttttagttgttaaaaattttctctgaactattgaaattattggatttaaaattttgtctaatttcattcaatttactaattcaatgattatttatatattaaatcatgttcttcagactttaatatctactaaatcatgtctctcgaacttttatatgtatcaaatcatgccccttaaattttcatatatgttaattttttttttattaaaattggacaaaagtcttcaaatctaacaatatcaataatttaagagaaatttttaactaccttaaaaatttataaaacataatttgattcatgtaaaaattcaaaaggcaaaaatattaattaactattgaaaaatattgtggctttagtgcatatattttatttgtaaacagtattactccagtcaaagttgataaaatttagaacataactgtaaattggatgataagattttaataattaattggataaatgctatgtttacgttgaatgtgataatactatcaacactatccatcttgattattcatatatctaaagataattttacaacaaatgagaaaagatagcagttaattctgttactttttggctttcttccccggaaagttcgaggtgtgtttgtttgttttattttttttttttaaaaaaaatgtgtaattaaatggaaatgaagtgttttgttcgaatcaaacacgaattctgagtcatctcatctatttggaaagttaaataagaaaatgttaggagttaggaaggtgctaggaaacttcacttgtttcagtacttttctatataataaataaaaatattgttattaggtattatataggactttaaatttaattacacatgaaaaaaaaaaatattaggcaccaataatattttgtagcaactctcaataaataaaaggaaatgtacgaagtgcctcaccttatttgaggtttttcacacactacacataggccaaaagaaaattaaactgtgcctattttttttttctagtttatgcagcctgtttctcacccttggccataggcgtagatggactaaacttgtacctacatattttagaagctaaataaaaatatattttttaaaaaatatatattttttaataatttttaaaaatattatttatttttataataagagcctaattttttttttttgttcattttaactcacgccctgtcctctatatcacaacttttaatatattttaatagttttttttatttgaaataacgttacatttttaaaattaatttctaaggataataatgtaaaaggacgtttttgttgatatgtatcgtattagtgaccaaatgtttttccttttgtattttcttattaaggttttattaagggtgacgttgttagttttattttacgaaaatttacataacatgataacacgttcatagcaatttatttacttaaattttataatccaactagaaaataaattacgttttgcgtgcagttgtattttatttagtactaattaagttataaaattatattaaattttaaattttaatatttttatataatttatttaatagtgaatagctattaaaatttttatttttattaatttaatagatatatatttctataaagtcaattttcaaaatatatatcagttgcataaattaaattagaatatataatttaagtaattagataaatgttattgttgtgtgattaaatttatatatataaaaaaatagaattaagaaaaaaaaaatataacaattgataaatttataggaaactcatcaaattttaaattgttgttatcaccatatctcacttttaatcatcactatgttcaaaaaaatatatataataattaataaatgataatgtaagaaaaattaatttaaattataaaataatatcatgcaattagaaaattattttgaatgaacttctcaaagatatttaaaaaggtaacagacattctaatttgtaaatataaaaaaaaaatgaaaaaaatagaaaatagataaataataacaataataaaagataattaagtgtagatattagatatatatttattatttctatgttaatatatttgactatataataaaaagtatttttttaaaaaaatattacaattcaaatttaaatttattacttatatctctcttattttttaaaaaatgcatagctccaatcactatggtcccctcactagttgagataatactgcttccacactcagttaattaattttaattaatcaattatacttctaaaattagactatg

SEQ ID NO: 36850 - DNA, 2303 bp, Cannabis sativa
atttacttttgatcctaagttggtgtactgttaaacagattaacttacattgtcatagttctaaaacttggggtggaaaatcaagctacaagagaacaaatgattttcggttttgctaagaagatgctaaaaacccactcacattataatgctttcaaatggatactaagaaaataagtctctagagtacccaaaaactgaaggcgtcataaatggttgtgagaggaataacctcggaaacaggaagaccaaatgtcaatccagatagtgctgcttttactgtctcggttgcaccaagaagaggagctcctgcaatcattccaaaggtataaaaccaattaatcattaagtaggagtaataaccctaggtaagaatggaaggggaggggagaaggatggtaagggcctaccaacagcgaaataggcatgaatgtgttcgtcgagccatttattataatgttttggtgcaatttccagctttaaccactccaagaagtattggaatacattattacctaatgaatgagcaaatactaaagaggggcctccgcgaagtttcaatgcagtttcaaatgtcaatctacaaagaaacaaaagcatttcggtaaatctacaccatcattaatcaaacattaactactaaagatgagtttcaaacttaatcaaaacatcataaacttgaaacattgtgtcacatgtactcacttaagcttatgaaagtaaaggtctcgttcctcaagcattgctggtgacaatctccaatcatatggaacagcaattattgcattagcctcaataccaaactcaatgcaccacttaatccattctttccaaaccgaagaaagagggcctgcaagagacaaaacaatgcatactcactcttgtacaacaacacaaggataaaacatagtttccattccgtgaaacaaatgtatgaagccatgtgttgagcacaaagccaactattctttcgccttttactaaagaatactgtgtgtttgtcactttcaatggcatacgatcatttttgaacgattttcttaaattgaaggccttaatcaaaaaaagaaatccatgaaagaaatgtactcattgcataacaacaaaaacatacctgttatatagccaggatcaagctctgtaattgctgaaagaccgctatcgggccgggacttgcagtcggggtgatctgtttggttgtaagggtctaacatcatgcatttaagccaacaatttactgcagaaagaagctgcaacaacacaagggtttttcaatgtctaagcttagtaagttaattcccttcatttcttctaaccaacatttaatttccactaattaattcttcagttttctccaaaatacacaacaaaatgacaaaatcaaaccaaccaaatacctaaatacccaaataccatgccactttgcaaaatttcggagaaagaagctgcaagacaagggttttctttctaagcttagtaagtttccatcagttttaaccaacatttgatttccactaatataaagtgttcagctttttccataatacacaagaaaatgacaaaatcaaaccaatcaaatgaacaaataccatgccactttgcaaaattttgggtattcaaaaagcaagaaaatgacaaaataccagaaaaaaaataaataaaaattaaatattgacacttttcagggttagatactacaaaaaggaaaaagcgaccaaaaaaagacgtgttcttggggaccaattatatgattattacaaaattctcgattcttcaagacacataaaatgaaagaaaacaaaaattaaaatggcgaaattaaagttcagaacagaagaacaagaaatgacgttactttggtggtgtcgagccaaaccaaatcgaggggattgaaatcgagaggagagaaagggcaatccaaaattgaccaggcacgaagttgggtggaagcgaagcctggaattatgatccccgagagcttggagtagtcgccgtcaaactctcctcctcctccggcaacggcgacggcggtgaccaaggcgatgaagaggaatagaatagtgggtcctcgcattgggtctgtgagttatggagaagaagaagaagaagaagaaggggttttggtggttgtgagtatgagcaatgagcatgaatgaatggagctttggtctcttacagttatggccgctcaacactgacgacaataaatatatcatttttattttattttattttatttttatgaaaaggatttttttcactttttaacaacttttagttatttttcacacacttaaaaaaaa

SEQ ID NO: 36851 - DNA, 4197 bp, Cannabis sativa
  modified_base (3042)..(3048): a, c, t, g, unknown or other
aataaaagattgctagaatgtttaacattttagatgagctggcaactctattcaatgaatggtagctttgactctcactacaagaaaaagtgcttttaataataccaaaaaagtgttatcataacttaccataacactttttgatgtgttaagaccgactatgttatcgtaggattgagcacttgttataacacttactcttagttatagaaatgtgttattgtatagccaatgataatattatttctatgttattttaataaatagataagtgaatgattatgttattcatagttgattatataacacattttattacttataaagtggtgttgaagtaaagaaataataacactttttttgtattacttctatatttaaataagcttgaatttttattatatattagtttatcttacactcatatattttattgtagtttcattgaaatttattttatttatttttattcatacaattaataatatatcacacattttaaaaaaataactatatataaacttaagtaaacatttattttattactcgaatatagtttttactagtttaggcctaaaaattcatattacaagataattaatactcaatcatcactaaatatgaaacaaaaaatgtttataatatgaaatacactctttaattccgaagacctcaaccttcaagtgttgtttaatattgcttcaaagaaagacatcacaatatacctgtacatgtaaaaataaatctctttaatgattaagcacatataatttatcaagaatagcctactatatacaagcacattagcacaacatactatattacaaacacatcaacacaacctaccatactacaaacacatcaacacaacttaccttactacaattttaccatacaaccacttgatcacttcaatgtaactcaatacactcctcaaagggaaccgaatcacttgaatgtaacaaaatcttcatgaaatttttgctcaaaaagcactgtccgctgttgaaataatgtttagcaaccaaataaaatataaatggaagagtatattaaagtaaaattgacattaacattaggataaaaaatattacttaaaaggaaaaagcagttgtagaaacttatatatttagataaataaaattatattatcaacaattaaagacaggtaaggggatactaacataataagcaacaagtgactgtaaaaaataattaagaagaaaataactccaataagcatatatcttaaaactcttattatggatttagaacatagacaaagttatggatcatgaggacttacaattctagaagttcttttcgaaaagcagaatcatcagtaaacaaagtgaaaattaatactccaactatacaaatatttgaattaattaggcccttccatgaaaaagtaaattaacggattagagtaattgaaaaataagctttaaaaagaattcatgaatctcgaaaaaatgaataaaaagaaacttattttaaatcaaagtaggctagacactaaaaataacaaactaccatacacagcatgttcacaaattaaagaaacgaacataattaatattattaacaaaaaaattcataaattattctattctgaaataaatctaaaattctatagagaaaaataaacatcacatttcaaatataatttcatactttctcttaatgttttgtacttgtagtgttaattggaagcttagtagctaaatgagagccaaacaaattaatatatagtgaattggaaaactcacaaataacaaattaatatagtaatcatataaatacactttcccttttggaagattatgtatgagcttaaagaaatagtattgtaaatgaataatagaaggtataatatcagcgaagtaattgagtaccttaagtttgctctgtatctcatctacttcttggctcaactagaaaagaaacacatatcaagcagaacgaacatagaaaatgattacaatttaaccatatttcaagcacataatacaaaagatcatatatttcttaatatttttagaacaagttgaatgcttggaaataatgacacctattaccaccatgatctaactgaactccatctatttagaaagagaaaaacaatacagaacatcaaatcaacattacaaaaaatatctatgaaatccaataaaacttgattgttcttgtatataaacacaggttagcattttgattgatttcgtataaatgaacaatgaagcaacccattagttaaaatacaagttattcaaaataagaaaatatctaaagaaagccaagagaaaactcaaaagtcaaatgcaagtaaaatttattaagtggcttgctgggggccttcataaatcgaaatgatatagccaaggataaggttgaaattgaaataaaaaatatacactataagtgaagtcaaaatcaaaagactgttaggcaggggttcaaaatcacgaatggcacaaagaaaggaaaaaaagaaaaatcaaaagccatagctttatcattgcactatacccaacaacaagccaaaatgtccaaaacatattttactttttattattgttcgacaaatttcgtatgtttcttagaaatatgattaatatatatatgaaattattaatttagagtacttacccacccaaatcaaaagtttgaactaaacgttttatagaagaaattactgctatagtctaaggcttcatcctttaatcaagagcaagttgtaatattcgacacagatgcaaccatcgtggaaaaggtgaccatgattagaaagagcctaatcgtatcaagcccttaaaagcatttagatgtagataaaaagtaacaaaatctaataagaaacttagaaaaagctccaaatacaccaaacttaaaattgataaacttgatatttgtaatgaaaaccaactaataaacacatgaaatagtacctaaatactgcaactggtctgccgtcgccgttgcctcttgttgtcgctgccccttttaccaaagaaatagcaagagagagagagagagagnnnnnnngagagagagagagagagaaatcgtagctgtatagttgctgagagagacaaaatgagtgagatagaaatgagaaatttggtcttgtactagctgtagcctaggttaaaaattaaaatcaaaggattccgtggatatggaggtcgagctatacgatgaagaagctatcagaaaaaatttgatttgggcaaaaatagaatgaggagagagaacaaatctgatttggggaaagtaacactgtttttaagtttgccgcttaaatttttttagccctgccttttacttttcataaattttcaattaccgccttttagtcttttttttcttttttttttttttttaaataagcatgatatcattgcattaaataaagttagatctcatggtcgttacataacaggttctccggtaagacagaggctgggatagtaccaaacatttgatgagcaaatgcccatctagccacattgtgagcggcaaaattacaaatccgactaataaaggaaaaattacaactaacaaaagaggaagaagacttcgaacaaaatgagacgtagttattaagagcccaacgagactcaactccattgatagcattgatcaccaccctcgagtcattctccacaattacaaacttgcaaccgatctccaaggcaaccgtcacggccaaacaacaggcctcagcttctccacaaagagcatcagagaaatctacccttgctgtctggattctaaccacattgccaaaatgattcctggctaccactgcaacacacatactgtcaaaacccacttttacatcgcaattcagcttgatccactcctaagggggaggggaccaaacatccttgggatgagaaatagggctaggtgaaagagaagcatgcagatcaacataagaaatacaaatactatcaacacattttttcatatccactgggcagttattatggactttttcatttcggaccctccaaactgtatccacaagaatcgaagcataaaggaaaacatcctcaacttgaactcctctactcttaagatcccaaatgaacttgacccaatcccaaactcgaagccagtattacaaacaggatagataccccaaggagatgatcgccataagtgaaaagtcaagatcggaagagcggt

SEQ ID NO: 36852 - DNA, 6874 bp, Cannabis sativa
gacatgatttgacatacagaataactgaacaaagtcacaataaatgtgaataaacaatatacactgatggtttgcaggtaatagccacaagaaatacccgtgaacgcagcaatagactggagaatatgtgctggcgcatttggcatctggcccgcaagaagaaacaggtatatgtatacatatttatttcttttattaaaatgttttacaatactgaatgagcactcttatttatatacacaaatatttattagaaatcctatgtatatagacaaggttctggcgctcaagcattactacttataattacaaaacagctaataaaaagttacatgattgtgaatttgatgtttggagatttcatgtattaattagtgtgtggtgtttcaagtaatgaaaatgttaaaatagaacagttatgtagcatccgcattgtatatattagtcaagtttatcttcaattatcaacatccaataccaaattttgaggtataatataattagcataaaaaattttgtttttcctaactgtagattgcatgggatgacgcccaaaggctggctaaaaggcgtatagagagggagcagggcaggcatgacgctgccgaggacctctctgagctttccgaaggtgaaaaggacattattagtagtaaaggagataacaatgatgctgcttctactacatttgagcacaatgtcatcactcgaatcaactccgagattcaaatatggccagaccatgatcacgatgagagtatcaagtcttcttcttcttcaagaaagctttacattgtgttaatcagtatgcatggcttggtccgcggacaaaatatggagctcggcaaagactccgacactggtggtcaagtcaagtacgtggtggaacttgctagagctctagccaacacaaatggagtctaccgtgtcgaccttctcactcggcaaatcacctccactgatgttgactcctcctacggtgagccaaatgagatgctttgctgccccaccgatgctacaggtagctgtggggcttacatagtccgcctcccttgcggacctcgcaatgagtacattcccaaggagtctctctggccacacatacaggagttcgtcgatggggcactagctcacatagttaacatggctagagtcttaggagagcaagtcaatacaggaaagcctacgtggccttacgtgatccacggtcactacgccgatggtggagaggctgcggctcgactttctgctgcactaaatgtgccgatggtgatgacaggacattcgctggggcggaataagttcgaacagttgctaaaacaggggagattttccaaggaagatattaatgccacatacaggattatgagaaggattgaagccgaggagttggccattgatgcggcagaaatggtggtgactagtactcatcaagagatcgatgagcagtggggactgtatgatggattcgatctcaaattggagagaaagttgagagtgagaagacgtcgcggtgtgagttgtcttggccgctatatgccaaggatggtggtcataccgccagggatggacttctcaaacctcgctacaacaactgatattactgaatcagattctgctgatcttaaatcattaataaactctggtagaggtcaacaaaaacccaatctacctcctatatggtctgagataatgagatttttcaccaaccctcacaagcccatcattcttgctctgtcacgtcctgaccccaagaagaatgttactacattgctcaaggcttatggagaatgccaagcccttcgggagcttgccaacttggtaataatataaattagtacgtaaaataatttatgactaatattccttaagtatattattatatattttgtacatggatgcagacgttgatacttggcaatagggatgacattgaagaaatgcataatagtagctccgttgtgcttacgacagtgctcaagctcatcgacaggtacgatttgtatggtcaagtggcctatcccaagcaccataagcaacatgatgtccccgaaatatatcgtcttgctgcgaagacaaaggtaatacatacctgcatcacttgatagtctcttcaataaataaacaataaattgggaatactaaaattactaatataaatataattttatttgattattttttgattgcagggagtattcatcaacccagctctagtggaaccttttggtctcacaattatagaggtaagaattttatatacatatgattcttagtacactacagaaagaaagtcgttatgtagatgcatatggcgtatttccattcaaaaatttagcaattgtacatgttaatttataggcggctgcatatggcttacccgtcgtcgccactaaaaatggaggtcctgttgacattttgaaggtaataattttagttttcatgctatattataagagaagatatattgcattttccctcgttgatacaaatgatgaattattctagtacaggcattaaataacggggtcttagtcgatccacatgaccataaagccatagaagatgcacttctaaagcttgtggcagacaaaaacctttggctggattgccgaaagaatgggctaaagaacattcacaagttttcatggatagaacattgtcgaaactacctctcccacgtggaacactgtcgtaatcgccaccccaccagccgccttgagatcatgcctattccagaagagcccatgagtgattctctcaaagacgtacaagacctatctttgagattctccgtggaagctacaatagacttcaattcctctgaaaacttggatccagccaccaggcaaaaggagctaattgaagccattacaaaaagtcgaagcaagggctcctccaatggaaaggtcggagctactacctactgccctggtcgaaggcagaggctatttgtaatagccattgattgttacaacgaaagcaatggagatttcgctgaaagtttgttgcagcctatcttgaagaatgtgatgaaagctgcaggcttgggtggccgaacagggtttgtgcttgtaactggttcaagcttaggagagacattggaagcattaaaaagatgccaaatcaatgttcaagagttggatgcgctcgtgtgctcaagtggaagtgagatgtattacccttggatagatttggtggctgatggagactatgagtcccatatcgagtatagatggggcggcgagaacgtgcggtccatggcagcaaggcttatcagggtagaaggaacggatgaggaagacaccaaagactatgtaggagctaaccgagcgaagtactgttactcctactctctcaaacctggagccaaggtgagctttagcctttagtgacattttctttagtgataaattaactataataaaatattaatcttagttacaaagtcaactttatacatgttacacccttgaaaattgaaaatggcagatacaaaaggttgatgatctcaggcaaaggctgagaatgagaggcttccgatgcaaccttttctttacacgagctgcatctaggttgaatgttgtgccattgtactcttcaagagcacaatccctaaggttaggcttgcttaattcattcaacaacaataattgtatattatctttaatgtcattattgtatttaactgaaatcaaaactgtcattggtatgtatgtaggtatctttccgttagatggggaattgaactctccaaaatggtcgtcattagtggagaaagaggggacactgatactgaagacttactcgctgggcttcagaagaacataattataaaaggttgtgttgagtgtggcagtgaaaagtttcttcggagtatagacagttacaaaagagaagatgttgtcccacaaaatagccctaatattgccatctcagagagttatgaggcgcatcatatcacacaagctttggaagctcttggaatccattgacttcatatttactatttatcttgattacacagttatatattgtgagcaaaatatatgaacaccaaacataataaattacctataaactcgtggaatttatattttccaatgatgtttttgtaatacatacatttatacttatgtatacgtacagatgaaatgctcatgtattagatataaataagaaaagcatttgttttatttgtaggagtttaataacagataattacattcatatgattataacttaaaaaaataattttttttaggggaagggtgcccattaaacagaaagaaaatcattgagattacaggagtcatcaccaatccaaaacgctacttcgtctaaccccgtagcccaagttgccaacttatgtgcgaaagtatttgctgtccagctgacatgtgagacataggcgtcggggaggagagacaaagctacgctaatttgattaattaggtcaccaaagcacgatagatcttcttcgggatgctctaaagaatccgagatagatttacaatctgtttccacacagtgaatggggaagctttcttcaatacaccaatgcaaggaggcgaggagagacttggcttcaagtgtgggaatgtctcctccccctatataagaagaagctactgcagctaccaccaaaccgtcgctgttttggatgacaccaccaaagcccacttttgacgtattctaaggaattgcagcatcaacattcagctttgggcgaccaggatccggaggtatccaggatgagacctagggggtccagttcacttaagcatgaggtttttgagctgatactgatgatttgtaatccgtcagaaaacattgctctaggttcactatagcatgagactggtcctgtgattgtcctctgagagctctgttcctgctatgccaagtaagccaagcaacataaagaaagcattctacatcttccttgggtaaagtaacataaatcatgtaaataatatcatggaaagtaatagtacaaggagaagaaaaaatataatcgtaaaaaatcgtaccttttcagactcttcgaacactcttgcagaagaagagagcgtgagaaacaaattcgacatggtttccacaacgatcacaggccggggattggataattttcctaaatgccagatttctatgggttggaagggtagagttggaggctaagaaagaaaagtgttttaccttaggcgggatactaagatgccagaggtttttccaccaaggtgaaggggaggaagaagaagggatatcaggggggaggtggatgagagactaatatggtaaccagattttactgagtaaacaccagattttttgggctcccatatcaaagtatcactagagggttggagaggaagtggatggagaggatttcctagacaatgtgaagggggaaacagttcctaaggagagggagatcccaagtcatatcattcttaatgaaggaagccaccctgtcaggagcagggctagaaggggtgacctggcgatacccgggaatccaataatcaagggtagtgaaagtgttttgcccatttcaaattttagagatgagacctttgtgcaacaactcttttccccaaaaaatgctttgccaaacaaacgagggggagtgacccaaagagcaattgatgaaagaagaatttagatagtacctggccgctaagatctttgctacagttgagtttggatgtttaagaatgtgccaagcttgttttgccagcaaagcctaattgaaatggaccaaggatcagaagccgagcccaccgtatttttttgacttacaaagcttttgccaactttgcgagtgagtcttaggacaattgttatcattaaagccacaccaaaaattggccataacggactcaagggagtgacaagtggcaacagggagacaaaaacaagccatggtataagtggggattgcttggataacagacttgagaagcgtttctttaccacctttcgagaagactttgtgcttccagttgttaagatggccccaaactttgtcgtggagatagtggaagacttgttttttcgttcgaccaatgtgctggggaagcccaaggtatttttcgaaggaggttctcacagggatctgcatgaagtctgagatgagggtttggtccttcaaggcaacactcggggagaaatagagggatgatttttggaagttgacttgttgccccgtggccctctcataaagatcgagaacctctttgatggtgttgcacgaattaatggaggcctgacagaaaaggaaactgtcatcagcaaaaagaagatggaaaatggtcggggcaatccgggccactttgaagccaatgagcgctctgcttctttcctgctgcctgagcaaggatgagaggcctttagcacaaagaaggaaaaggtagggagaaaggggatcgccttgacgaatgccccgagaggggatgacatggccagagaccttgcctttgacattaaattggaaagtggccgtggaaatgcaagcagaagttagttgaattatccgtggtgggaagttaaatttcctaagaatggccaagataaaagactactcaactctatcaaaagatttgcccatatccaacttaaccgccatccaacattttttccctttggatttaagcttaatggagtgagcgacttcctcggcaataatgatgttgtctgaaatgagcctaccaggaaggaaagcgctttgattgggggagatcaagttgttaagaacagatttaagcctgtttgcgattgctttcgaaataattttgtagattatgttgcacaggcttatgggtctaaaatctttgaccgaagtgggttgcttgtgttgggctttgtgccctaa

SEQ ID NO: 36853 - DNA, 4723 bp, Cannabis sativa
tatcttttgttgatttgtgttttgaaaaacgatctgcaaataagttgactcattacttggcaagagattcttgtttctctgcaggtcgtgtgcttcagttggaggactgttattctaaagtgcattatattgttttgaaccaatttattaattaataaatcttattatttttattaaaaaaataaataaataattttactattgaagcactcttataaaatttgtacagccaatttttcctctaattatacatgggagatggtctaaataaaaaatttgaccggtatccttagcaacggcaatatccaattatccatgggagtgggcctggtctttcatgtcgttaccttaagaaactactccacctgtctcacttctccaaacttctagacttttgatcgctcttctcgttccttccatagaatcctttttcactcccatggcttctctcgtttcgcatttcatcattcaacaacctctcgaatcccaactacaatggcgactactctcttctctgcttcgcattcttctatgtcaccatggcacctcaacaacaagagcagaactattacttctttaaccaaaaatggattttccaacagcacccacttttctttttccctattttccaaacccagttcaagaaaatctctaagattctacattaaagccgaggtagacaacaaacccacttcttcttcttctgctgctgtttcagaaaaggcagttagcgaaagcggtactgataccaagaagggtgaagaagttgagagtggtaaagaagagactaaagtgattgatggagaagaacaagaacaagagaaggattggaaaacagacgaggagttcaagaagtttatgggcaatccctccattgaagcagccataaagttggagaagaaaagggcagatagaaagctgaaggagcttgacagggaaaacagtggtaacccacttgtagctttctttaacagagttgtacgtgatagcttgactaaagagaaagagagattggagcaagctgaggggacctttaaagctcttgacctcaacaaggtacttgctttgctttagcttctccaagtatttttctttcaaaaaggtattcactatatattaatgatccaattgtttgattataagatatagagaaaaaaacatatagaagaatcaatgagttgacaataataaattataagaaaattgtctcagcttttttaagagaacttaagttctcccatgttaggctagtgactaatttcataacgaaatcacacatacaaatcatttaatctaatcccactttttaataactatttaatcacaatagcttgttattgataatttgttggggggtaacatgtgatattgcagttgaagagctgttttgggttcgatacattttttgcgactgatgttcggagatttggcgatgggggcatttttatcgggaatttgaggaaacccattgaagaggtcattcctaaattggagaaaaagctctccgaggctgcaggaagggatgtagtggtgtggttcatggaggaaaaaacaaatgacatcacaaaacaggtactcaaacactaactcacgtttctaagttttcctcaacttcttatgttgttgtatttgtctttgacatattatagatggtgtatctgtttttattctttctttctttccccctttttcaagtgaagatactcatttcttgttcttgtttaaaacttaggcatgtgtagttcagcccaaagcagaaatggatcttcagtttgagtcaaccaagctcagtactccatggggttacattagtgcagtagccttatgtgttacaacttttgggacaatagctttgatgagtggctttttccttaaacctaatgctacatgggatgactacgtttctaatgttgtgcctctctttggtggcttcatttctatcttgggagtttctgaggtatgtcattaatatcttctatgctttgatttgatgagatacgttttgcctttgttcttacagtgcttatcttatgcagatagccacaagattaacagcagctcgttatggtgtaaaactgagcccatcttttcttgtgccatcgagttggacagggtgtttgggagtgatgaataactatgaatcattgctgccaaacaagaaagctctttttgatattccagtggcacgtactgctagtgcatatttgacatcactggcacttgctgttgcagcttttgtggccgatggcagttttaatgggggtgataatgcattgtaagccacttatcctcagaaacaacagatatagataatgaaattatctcataattaattaagagagtccatatatattactgaaagcgtcctacttccttttgttttgtgtttttgagtctaaattattgaattgtctcttctgatttagttcatttcttaaatgattatgactttaattaataaaccaggtgaactctgctatattttgaccatctattgtaacagttttattttttcgttcatccatttctgccaagtgaaacatgtgctggtaataaatttattggttctttgtgtgttaactcctcttaatgtcaaaccattattacttaattttattaattgttctttccttttttctttttctctgtcttgcagatatataaggcctcagttcttctataacaacccgttactttcatttatccaatttgttattggaccatacacagatgaccttggaaatgtattgccatatgcagtagaaggtgttggagttcctgtggatcccctggcctttgctggacttttgggtaagtccttaaaaaaatatggacttagcataacctatctctaatgatcagtcaatgaaatgactctcctgaccattttgatgaaggaatggtggtgacatctcttaacctgttgccttgtggaaggctggaaggaggccgcatagcgcaggcaatgtttggaagaagtaccgccacactgctttcttttgctacgtctcttttgctcggcattggtgggctgagtggaagtgttctctgcttggcttggggtctattcgcaaccttctttcgaggtggtgaagaactacctgccaaagacgaaatcacacccttggaagatgacaggtacgcttggggattggtccttggcctcatctgtttcctaactctttttcctaatggaggaggcacattctcaagctccttcttcagtggaccctttttcaggggtgatgtgtagataaatttgatttgtacagagtatatagataagccagtgttttcaatattcaagtgtataatagtttctgtattcttttcaaaaaataaaaaaaaaaatatttaactatgagatacctcatctattgtttagttttcttttgcatgtctaatttgtaaagctgaaaatgaaaaagccagttaatcttaaaataggggaaaaaaaactaactgcttatgtatatatttgcaaattaaaagcacatatatatactaaatatattggtttgtatctaaggtaatttagttggagaaaagaatggaatcactttttattcaattttcttgtttggtttcaatttaggacattaaaatcctattctaggtgttgtgttatcagtcctaaataaaaccaaaccagctcattaatgacatggcaaggaagacattagaaaaagacacattagtaagatttcggccaaggctgaccgagttgctttgtttgcatcagaaaacataaatagagagaggagagatcaatgtatcttttgcattagaaatcataaaacatagagagagaagagagatcaatgtatcttttacatcagaaaacaaagatatagagaacgaagagagatcaatgtatggtgaggaatttgtctttgacatcaaatgccaacttagctattgagatgtcaacttggttgttggttgcttaatgtaatgaccgcatgattagattatggattagtaatagtgattagtttaatttttggtattttatggttatacatgttgtgggtcttatttttaaaaaaataggcattagagttataattttttaattttagagattttattaaactctgtattctttatgtcatatatgaaatttataatttttgctcggtgacgatggaaaatgcgacgaacaaccaatttagtgacatacattagcttagaacctttgtcttaggagagtactcatatgttgatatttgaaatatcgggattatgtagggttattgcattaaactattttatccctaagtcattttgtaaattaaacacttatgtgagggtaaaattaacattttagttttaaattttgtggctgatttctttagaatttagatggtaacttgccactaagtccttagtaataaacttaagtttattattgatttattagattaaacaaattaaaagaaaagaaaaaaaaaatccatttttatctttctctttctttcaaacccaataagaagcaaggagaagctgagttttggtgtttgatttatgagatttcagtaagaaatctttggtagctcaagttgaggtaaatctaagcctttccgtgttagttttcgaatttctttttaactcaaacatgcaaaaatggtgatagttgatttaagcttaattcatgtggttttgatagttaattcttgagttgagcaagtttgagttcttgaactcaaacttggctcaacaa

SEQ ID NO: 36854 - DNA, 3658 bp, Cannabis sativa
aaccgtatactaataagattgctaatctaactagcgcattttattcttttttaaatcaagtgttcaacataacatgattgatgttactaagatttggcaaattaatcaaaattatatatttgcttaaaagaaaaaaaaggttgggccatgttttaaggtcccacaattgactccttattcttccacgtgtcctcttttactattgttatttttttgtttactcagtcgacatgttcaaagaaaaacagaaaaaactggttttgttttcgatcgatattttaataaattttccaaggaaaaaaaaaagaaaaaaagaaaatgagaacggtagtcggcgagaagagagagaaagaacgagaaaataaaggaaaattttgatatgggttgccatcttttcggcttataaatttgggtttcagtgacggtttcgttctgtgtgcttttcattcacgtgtctctctttctccattctttttcaatattttggtctttattatcctgtgtgtatatatacacatacatatatacatatcttttctttcttcctttcccgtgctttcttctgtttgtttctcagtaaaaggaaaactaaatcttatcgccgtttctttcctttcaagtcttctttgacggtggggtttttggtttttcggtcattcccatctcatacgtgtgtgtgtgtttatgtagttgtattgtatggttttcattctgtgcttaagcagttaaaagggtattgataatagttataaagaggtttgattaagtatctatagagagaaaatggatgggaagaagcaagtggattcatcttcttccttcacttctgagctgtttgggtccaaagaatcttctccttcttctgggattttcgggtctatctttgcaccatcttcaaaggtaatatctttatctacatatattataccatatgttgaatctctaaagctttttttatttttattttacgttattttctttctatctattaaaatcaattaacatttctatgggtttttttttttattattattaatataatattggctctgttttggctttgggggcaattgactttcaaatgaaagttgttcatttcatggtttgaaatattgggttgacatttatgttttattttgatttgtgttctcttcattatctcaattaagaggaaaactttcttttgggtatatatggatgaagttaagaaaacctcattctaagtgagattgcataagaattattttatgttcttttttcttgcatagaaagaatatatatttgattgcttagcatggtctgagatttatctttgtgttggatttaggttttaggtagagaatctgtgcgttctgaagtaccagtgagaaggcatagttccttcactgaatcatacaccaccaaacatggatattcaggtttcttttgcatatatagaactatattccttcatttattaatttatctatttgtgtgtgtgtgttgtttagtatctgcattgctcattctgattgttaaacgtgttttatttttgttaattgagattttttgttgaaattcagtaatttgaattttgaaattatctaacaaacatgagacttacttatgcaaatagatataaatccaaaacaactagtaaatgaaatacaagccattttgacaaatctgtttcattttgtagctagctccagatttcaaactgaataaaataagcttaatgagttatttttagctgtgtgtgtgttaaaaattgtcttctttcacattgtatttgcagatgatgcatccaaaagcaaagcaacagagaaccaaattcagcaaaacacagacaccggctccatttatcaggatcaacgaatgcaaccatgtcatctaagctcatcaatctattatggtggtcaagacgtctattgtaatccccatagcacaccaagctcgacggtaagcattttctagcaattcttgttttgttttatgttatgaagtttgtttaagagacctttacactttacaggtataaggaatataaattggaatttatgaactagtgttgactattcccgcttagatgatgaaagggcgtgtgacattgattcctcagtctcattgttctggtgggacaatagtagataacaacatagtataactgatattctatgatagagaacatttgcatttttattttagttttttgtattaaggagtttgataagttgttgctttgttacttaatctacagtacaagaaagatggtgctgaagatgattcaggtagcgcctcacgggggaactggtggcaaggtgtgatacttttcttatgaaatgttttttgagcttgtggtataacaattcttgttgtctcagtgtattctcattcatggtttcttgtatttttatctgcaggtggtctttactattagatggccaggagctctgttttcggagctacaccaaggtacttactttcttcttgtaaaacttattccacaacggtgaagctagacaaaaaaaaaatcgtttgctttcactcgttgtaaagatcaaaattggcttctacattcataattagagcttctgtatttctgttgatgttctataatctaaatgttatgctagacactttagttttagtgtttattcttaatgagtttatgttggttgaatgaatttagtctcatacaaggttatgcttaatgcttatgcaggcaaagtaggataatattatagcagaaggttatatgaagatagatgatagtacttggatcagtggtacgagcttgttgtttgtcaccgctcccaacagcataacctttatatgaattaattatcaataaatgtctgttttcttcttcttttttttttttattattatttttctgtaaagggatgttgaacttaaatgtttcctgtatagttttatggttaagaagactttttttttcctcttttattgccttatatgttgaaactcggaattggttttttatatggtgtggctcaacttttttctatgttaattttttatttgtgtgcttcttatgattatacttttgatcacttttctttttatgttattatcttctgaacaatatttccaagtcgcagaccttagttaattccctagttttgctgtacaatatttagatactgatggttgagtctgaaaacaaacaattgagatattattcctcaaaacaaaacgtctaagctcagaccctctttttggtttgagaccttgattgcattagctctctttttctcacctcataaaaactcttctttttttttttttctcactagattctgtgtgctttgtatgccacgcacactagctgataaaattggttttggaaagggtatggcccacttaacccaatttatgttgtgatgtgtcctagtctttgttccaaactgtcttttcctctgcttatccgagctttacaagattttgagtcagaggtcattctttctctcactctatatttatattcataggaccccactactttaaaaacctgtcctaatcccatgtgtggtcaggtagagctctcgctcatggtggttaagaaagaagtttctggtagttaaagagagaaaagacttaagatacagacaaagactcagcaaccacatcttcaacaaattggaccctattttag

SEQ ID NO: 36855 - DNA, 4120 bp, Cannabis sativa
  modified_base (38)..(49): a, c, t, g, unknown or other
tagtaaaggtgtaagagaattgtaacattaggtatttnnnnnnnnnnnnataaacattaggtatttaagtgtaaaaaaactaaaacattaggtatttatgccgcaatttacccacccaaaatttaatgttaaaatagtactattttagtgtagatttaacactcaaaagtctttcatggatgcatatatatatatagagatatgatgttgtcctgttattgtactttcacgtttcacggattgtacggattgtaatctgattgtaatctgtgatgtacgacaaccgtcagatgagggagttatttgatctgacggctgagattgatctaggagtaattagggttaaaaaagtagaaacgcaccctgatactcattaaatgtaccctgagacccatctaatgtaccatggaatacattccgtgaaagtacattacggacaaaataatatccatatatatatatatgttagcttcattattacagctggtctgcaccacagagttttccaacccaataaatataactgatacagctcatatctatataattaattgatatgcagttatatgttatacgtacccaatttataacttacatttatttcatttggaattttttttttttttttttcatttgaaagacttgactcttcctttccaaaaaaaaaaagctctattttctaattaattaggagatcatgtatcttaattcatttcattacttctaaccaaatacaatctccaaatcaaaaaaaaaaaaaaacaaacaaacaaatacaatctaagatggcatttgggaaaaataaaataacaattaataaaaataggaataaaataaaatttaaaatatgtaaaaaaaattattaaattttttcttatcttgtattaaaattgtctatctatctatttcaaaataaaatagttgtttcactaaaataagaaaaagaccacaattttattgagattgtgacatttcaatactttaatgtcacatttaaacctaatcaattctgatatttaatttaataaaaaataaataaatgagtttaaaatataaaataattaaaaataatattttattattttttgattactaatttatctagaaaaaaaatcaaaatcatttttaatttgtttaccaatattaaaaatttagacattaacattatattgtgttttcaaaagttcaaaagaacaataggatggtttcacaccactacacaccacttgcaagtatgatgagagtagactatggagactattttgttagagctatcactaattttctatataaattaataattcaaagacatgtttacaaattacagccactgtgaactttgacaaaactaattgactttgaagactttgactcttccttttcaaataataatttaaaaaatatatattttcatattcagtgcgaactcaaaaatacatgcaagatatttaatagaaataatgagtaatacagttgagaaaattgacccctgttgaatatattgattgattttgtagtcatataatgcattgagtttttaatctttgatgacaatgcatgagagtttttgggtaaatggctaatcttttaaaaacagtttttttttttttgtctcaaaaaaaaagttttttttctttgttactgtcaatctcttattataatcttttagtcaatttttgtacccaaaaacacatgctaaaatatttttaaattttttttatagcagtgttcgttaagcttacaacatcgtccctgtaaatttttaaaaattttcgaatagtactttactgtaccgaaaatacgtttgaagttttatgaatgcgcgtggtaaactagaatatcaggaactctgtttcaacattgaaaattattcagaatttttcaaaaatttacaaggatattgatactgtaactataacgaataccactatgaaaagaaattaaaaaaaaaacatattttgatatgtgattttgagcatagagattaaataagatattataattagaactcatcttatagaactcatacctaaatgtcattcaaatcaaagattatctattaataatgcaagcaaactctcttattaaaaaaaatcgatctcagtggatataaaaatataaaaataagaattagaatgagaataggaataggaataaaaatacaatggaatagaatcaaattttaaaatgtataaaaaaaattgataaaaaattattaattttttttctcatcttacattgaaatgatctttttttttctatttgaaaatgggatagtcattccatcatttaagaaaaatcattctattacaataacattcccatactttaaaataaaatcattacttccaaccaaacgtcacctaaatgtaaatacagtagaacctctatttaagaataatctattcaataatagcctctaatttgttataaaaatatcatgtcccgatttaagtcaattataaataaacataatctctaaattagccatatcttgtttcagatgtcatattaaaaaagtatatatctacataagaataactatatattaataaaatataaaatatatacatagagtaaaatatcaatttgtagatttatgctctaataaaacagtaaaaataagagaattaaagagagtaaaaaaaataacttttagagtaattttagagtgttatgtcaccgtcttgttcctcatatatatttatatatattgatatcgatgatatattgagtatggctactaattataatttttatattgatttaaattctaaattattagatatttaattttgatacaaaaatattttattaattaaattttaataaaaaaaattatttatctatatattattttattttttatcatgtaggttgattttttttttttttgctgagatttattttttattatgttactttacctaaatcatacaatatataattaattacaaatatctaaatttaaaaattatatttctctccaaaaaaaaatttaaaaataatattaataaagttattacaaatattattattgtaaaataatgaatatgctattatagtacattatgaagacaatgatgttgataaccgttttaaatataaaatgagatacagttattattagaaataataactatgttattgtagtgcattatgaaaacaacaaatagtaataacgattttaaatatagtagtgactataaatgagatacggtgataacaataattttaaatgtagtagcgagtatatataagtagatttgattataaaaacgtttttgaatataataacttttgtttgtttgatatgtttttattgtagtttaagaaaataaaaaattatttaatttaattaaatttaataaatattcattgaaaatatctatgatatataatttaaattttataataatcaacctaaaataagtcattttgcaccgcacaaagaattttccaacccaaattataagttaaaagaatatttcacatgtataataacatcatgaattgtaaactatattttgctacctctagcaattaatgatatgattctttaaaagtttgaacgaaaagacatgtttttgactttatagccgcaacttatgactcaaaataagcttataattcatatggaccaatatgtgaggttcaaagaattttcctacccaaaataaaatatgagttgaagaatattcatcgtatttgtataaatagtgtttttgcatatactaattttatttcttttattgattatatttgtaatattttacagtaatagattgaaaatttattacaatagagtacatacttacagtaacaaatcaaaaacataaacaaattgtgtgaaattttaaacttcacgcaagaactgaaactcaactatatatataattatagctcagagataataatttatataagagatccaagatgatgatgagttactattggattgttgtactaatattcctaagtcattcctctacttcattaacaacccattcaccacctcttttttcaccttctaataatcattctcactttcacttgtgtaatacttacgacagctctgctttgctccaattcatcaactcattttccattgaaattcctc

SEQ ID NO: 36856 - DNA, 5504 bp, Cannabis sativa
tggccactggatcggagccggcggctcgatgatattggaagccgacaagcaaactggtgctgtgaggaaacattacattgggatggtgactatgcttgatatcttagctcatattgctgatgctgataatgatgatgatgatgttgaaatgatgatcaacggtggtgatcatcactccgattgttataataataagcttgataagaaaatgtctgtggaggtctcatctatcattggacattgtcttgaggggctcagtctctggacgttaaacccaaacaccaggtatatatatataattaaatatagtatatatataactaagaagagcattgctattaatttgtgttaggtgcacaaatcaaattgtgtgagatttggtatattttaacacattaagcgctcgtttcagcgttccaaacgaaacgtgccataaggtgtgattaattagcatttctatatagatatgaaattacactaacatgatccaacattaagtagatatggtaagaacactatgtttttttggggtacttgggcaccttaaaatatcttttagcatatgggttaaggtgccaagcacagcaaatgtgcaatttaatataaggtttaatatattttaatttaatatataatataaaaaattgtgaattaaggtgcgtagcgatatatagcaatgttttatatttttaaaatttctgtatttgcttaacttaaagttaaatgtctaacagtttctgatttgttcaattaatttaaatatactaattataaaatgacatttggataggacttacttaatgatgttaggtattattactattaaaatttaaatttaaatacttatgttacaaattatttggaatttaatgtgctaaagtcgtgcattagaaatatgagattcttaataagataattataattacgatagtgtcagaatgcaaaaattggtattgggtcgctgcactactaattatatatagtgaaatactcgatcaaaaagtctcatatatttatatatgagaccaatgacattatatatatgtaacaccccttttatgtatgtgtataaaattaacagcatacttgactgtatggaagtattcagtaaaggaatccaccgagcaatggtaccacaagacagccaaatgaacaacatatcaggtgtagagcttgtagagtcagcctcatcctacaaaatgctcactcaaatggacctcttagtctttttgaaacaacacgacttcgaactcaacacaatcacatcaaaatcaatcactgaattgggtgcaataactgacactatttttgcaatatctgatcgtaccaaagttattgatgccatcaagtctatgcgtatgggtttactcaatgctgttcccataattcaatcccaagatacccttgaagaagatcccaaacaactaataaatgtatgtcactttgtcacttgaaattattaactctgttttcatatcatattatatatgttataatgtgttattattaattgcaggggagaggtagaaagattatagggacattttcggcaactgatttaagggggtgtcacttgtcttcaatgcaaacatggttgccactaactgctctagaattcacagaggcaatctccacaagccctttgtttcagtcgaataattcagcagagcccccaaaaagggaaattgtggcttgtgggattgaatccactcttgcccaagttatcgaaaaggcggtaactaactatgttcaccgagtttgggtggttgattccaatggtttacttcgtggccttgtttctcttactgatataatcagggtgttgaggctctccctcctatcctagtttagacttgttttgttcaattaagttttttttttttttgatgcaagtttgttcgatgaagtttaagaaggattaatagttcaaatattgtgctcataactcttttgttcagtataaggcagggttgtaccaataactagtttattggattttgggatttgattatgagagacaaaaaaatggttgaatagaatcgttttttcttgtttttgtaacagaggaaataacactacgtacactttgactaaccaagtctatgaatgaattcaatatctatagagaagtccaagttgtcgattaaacttaaaccatttcatacttaaacaaaaactggtatatacctcagaactgagagtggggcacatcaatcgagaatgatagcttgttagttatttattggtcaaatttactatttcaattcaattttacataatcaaagatgacaaaaaaatcattacttccgacaaatatgtaagatatctaaggttttgcattgagctacaaatatattgttggatgatggtgtgagaaagtcaactttcacgtgttttgcttactacatcacacgtgatgtgatgtgattattttttatatcacataattggaattggaattcccattaaaagaaaatttaatttgattagattttttttatcccaattaatggaaaatcaaaacacctgaccacatacatacattatcgttgagaaaaataaaaaaataaaaagaaacatatattatcttataatataaatggatttattatttttctaaaaattaatctatatatgaattatttttttaaaaaaatattagagttaaaaaaatatatgtttttagtgcgccttctaaaaaatatacaaaaacaaatatatcaaattatttattattagtaatattgaattttataaattattttaattttattatgtctactacactcatgaatcatagtatttcatattaatactaattaaaaaaggtgaaaatagttcacctaataaattggtatatttggttaaaacaataaataaatctcttagttttcctattaatattaatagaataaaaaaatatcgttaaattaaaaattattattagataattaattttatataattaagtgtgtttttataatatttattaaaataatataattgaggtgtaataaatattttcataataataatatgttgtttttcaatttattttttgctaaaaaaattcgttttgcacatcaaaatatctaatttgtataaatacgaagaagtgaagtgtaccctacacattaactacatcaactctaggtatgtggctgaaattgagaaatagtaaaggaaattcgtgtcttattaaatgcagaatcttcttccaacgtgtcagaccctatgagtttcaaactatactactcgtgacaccagattattctgactcactcaacataacataacatagggtgtggaccccacccactttcatgttatcatatttccaacaccacccactttttcttcgtaaactccgtcccaaccccattttcacactatttatatcattctcaccctttctttcccaaacccaaccttttctcttttttcatataaatatataaactcacatttcactccatgaacggcgtcgtatcgaacccctctgccgtcacactcctcaccctaaacaacagacggcctcggcccagatccgacgacgacgacgacatgggaatggccaagaaaggacaggtggtcctcaatgccaagccacatttcatgacctggacaaccgatgacttactccacgtggccaaattccattggctgccgtgtattttcgctgcgggactcttgttctttatggccgtggaatacacgctccgaatgataccctcctcatcgccgcctttcgatctgggattcgtcgctactggcccacttcatcggttgctttcttcgtcgcctcacctcaatactgtcttagctgctctcaatacggtaccgtttttcctgttataacgacattttggattattgctttttttttattattattttttttaattttattcgagtaagtttggtttcgatcttgatgagtttgtttctgatttaaagattgttatttttcttaggaatgaaaatgaagtgtttggagtttatgaattgtaggtgtttgtaggaatgcaaacgacatatattctatggtcgtttttggtagaagggcgtcccagagctacaatctcaactctcttcatgttcacatgccgaggcattttgggttactcaactcagcttccattacctcaggtaattttccctaattatttttcttattaaaattattaatttaattgaattttaatacccattattagtattaatcaaagcagggatttttgggatctggggttgattttccggtggggaatgtgtcgtttttcctgttctattccggccacgtggctggatcggtgattgcatctcttgacatgagacggatgaagaggtgggaattggcgcgtacgttcgacgctctcaatgtgctccaagctgtaaggttgctcggaaccaggggtcattacactattgacttggccgtcggagtcggcgccggtatgctctttgattcactcgccggtaaatatgtagaaagcaagagaaaattgtcaacaacaacaactactactactagtaatggcaaagaagcttcctttacttgaaggataaggaatttggagtttttgtttaatcagatgacaagaacagtagtcatgaaaaatagaaaaaagagaaaaaaaaaagttgtacaaagaattaggcaaaaaagctttaagcttttagtttgttccacctgttcttatttgttgttatttcttgttgtagagaccttcatttgatttgattttgattataagttttggttatctgctataatattttatcttttatttgatattttaatagaagaaaataggaattaacttcttgtgtgattcatacttttcatcttttatgtttgatttttaatgtacttgtggggtcttcgaatggaatcctcctcactcacaatttagacggcttgtatttatcaagaaatgatattttcataaatttcaactgatctgtcactttcatttgtgataatgaggaaatttacaaatttcccttatcaccattttgaatcactaccactaatcagaaattggatcttccaagttttatgtatgtcttataaaaataatgatgaaaaagaagaagaaagattaattatacaagtaataattttttagtagttacgtataagatgataaatagcattaatctttctttctcctatacatatatggtcaatgtagagaccaatacaagaattggtagcaatagtataatgacaactattaggagctacacactgcttagtacaaggtatgggaatgtctgtgtatgaattcagcagggaaaaagcagcaacatactactctgagtctgaatcaatagggcaaccatcatctacattggcaagagggtcatatgttggagaactaggatctgtgcatcccattacgagattaagctcgcaacgatcgccctgcaatcacttatcgatgtgaaaaataagcttgaattgggacaaacgaaacactgagatgttgaaaatggtt

SEQ ID NO: 36857 - DNA, 3463 bp, Cannabis sativa
aaaaacacagtatttttgaaaagatttccgtgtgacagtatttttgtaaaagttaacctaaattctagtatttttgtaagtttccttctaattatcctctacatcaaatgatgggaatagcaagagccagcccatagttcagacggcccaaatgacgggaggtgtgacggcctagcccatctctggaaggggaagtatccgtgttcttttcttttttcgcccgaaaacatctgtactttcctccttctttcccaaacaaaacaaaacaaatactacatacatagtcctgggtgttcgaaggaaacgagtagagctcaaaaatggagtcagtttcggagaaagagaagaagcaatctgatagcactaccaccgccaccgataatgccaatgctcctcaatcgcttcaggactcctctgtcgccgccgctgataacttcagcagtacggactctcaagagtttcgtgaacgcgtgaatcgcgacctcaaagctggcctccaccccctcagggtaatcctaacctaaatttatctttcatcaacattcaatatgatttttttttggggttttatttgtcgaatcctaagcagttagggttttctcgtatgatttccttaattactaccgaaaaataaattataatctggtgtttttagtatgttattgtttttcgattgggtgcacaatagactgttgaggatcacgtagttacatttgtactgttattgtttgaattttctcaatgtgcatgtaatgcatcatgagtatttatccaactagggttcttaacacgctccgttaatctcatagtgataaatttcctaagtttcttaggtattaataaggattatgaatcgaaaagtgataactttcagactgtatggtgctgcgaactgattatgtggatagtattgggaaaatggatgattgattaaagtttgatatgctaatggttgatgtttttcttgttctgaaataagttttttggatttagttgtggctttgacaaagcttgtcaattgaattaaaatatgtgaacagaagccgacaccaaaatgtaaaatagaagaaaagcgtctgtatctctagcctctgggcaatatcctttttcctaccatcaaccgcatggactaatattggaacacaaagtatttttatctccaagagcgtaattgaatgtaggggaaaatctaagctcttggttgatttgaagtgatttcataattgtgattgtctttttaatacttataattatcattagatttctattaattgttattagtctatgcccaacaactttacttactaagataagggaacaaaataaatgcatgtagcttcttcttgagaattgattttgattttgtgaaagtatattcctttataatggcttcaggcctcaattgaaatgggtttatagacgataatgcttgcttgtgatgatgatccaattctgccatgttgttcttaactaaacaattgacttaatccatttcataatctaatggcttgtatcaatgctaatttaaaattttcacttcttaatattagcaaaagtttatattttggtacactcgtcggacacctggagtcaggaaccaatcatatgaagacaatattaaaagaattgtggaattcagcacggttagataccttttttttccatctctttctttttcttccacacacaatccccaaaaagaattgggggagcctaaaagatggttgtaagactttctcaattatgtttgttttttcctgctgaaaacatttaggttgaaggtttttggtttgcttattgccacttggcccgtccctcttctttgccaagcccaacggacttgcatcttttcaaggagggcattcgacctttatgggaggtagacagctgaaacctggccatgtggtgtggtcttatttacttccgactttcaaattttcatcatctatgtggtactttatttttgttcatttcctgtttggctggttaggactctgctaactgtaatggaggcaagtggatactacgtttcaaaaaagttgtatcaggccgtttctgggaggatttggtaaggacaaaaattgactcaggaatatatatgttgcatcttacttaccctgcttcttatttttcacgttttattttaatgagattcagacctgaccaactgtactgttttcggtcttttgtttcctgttcaatttattagcccaaaatatcttgcttttcctttaatgaaagtctaaacaatggggattgaaatgtattttctctgtccaaaagccataacctagtaaggctaccacttttgaagatattaagaccctaagcctcaccaatggttctcatgttaggtaattgaagtgtaagcctcttttttagacatcaaggcgcaacccataaggctaaaaagtaaaactttttactttttatgaagaaaaatgatttacaaaccatttctatacatctggggaattgggttcatgttgatttttatttaagttgtttttgtctattccttctgaagtattgttaacgtaaaatatctctgaaatcatggtctctttacctattctggattctagaccatatagttcgatggcttgctgatatcaacctaaacaattcggattttttttctttcctgaattgttttcttaaaattggccttgtaaatttgtttatgtatttgttcttgtaggagaaaaagtaaaaatctttccagttgtttaaacttttatctgtatgattaggtgatttagatttagataatgcagtcttttgcattccaagaagtctgaaaagaaaagatttgtagaaattatccataatagcgacagcttgtttttcattttctcaattggagggattttcacttgtgtgattgaataaaatcaaaccatcagaggtggctcactcaatggtgcaacttgaaagtcataattttggtgtatgcaggtccttgcattgataggtgatcaactcgattatggagataacatatgtggagcagtgttgagcattcgtttcaatgaggatatattaagtgtctggaatagagatgcatctgatcaccaggttggtggtagtgtattatgtgtaattgtacttgttgtatatctgaataactgaaataaacttgtcttcatatttcttggtcgttgtaggctgtgatggctttaagagattcaatcaagcgacatttgaagcttccacacggatatgtaatggaatacaaaccccatgatgcttcattgcgtgataactcatcctacagaaacgcatggctgagaggataagaagttaacagccagattatctttaaaaggttctgagtcctagtttcggattatcacttactaccttgacattatatataaacaactttatggggatgtgtttgtactgaaagtcactaatgatcaatcaaatgaattcaattactactttcagcttaaaaccc

SEQ ID NO: 36858 - DNA, 5182 bp, Cannabis sativa
aacaatattgtctttttgcctaaattttgaggcataagtaatgcactttgccactattgatcagctgtttgctgttttttcttgcaacttctagggaatgttatcaacacccttcgcttgatgtcttctgaagttgcatctactaatgaaggtgatccttgtgctccaacacactgggaatgggtgaactgcagctctagtgcaccgccgagaataacaacaatgtaagttgctcatattatttactacttacataccaagaataagttcttctgcacaagcattgcatttttgataaaacttctgaagtttttaatttgttgtggtataaaggaaatctaaagccttcaactttaatcggttgcaacatgcatagaattcaattctctaacctgttttacagtaacctctcaggaaagaatgtgaagggggaaatcccaactgagctaaaccacttgactgaactagcagagctgtgagtgttcttttgaactaaacaatagttttgttttctttcatctacatctttttccacaagtaatttcttttttctctcttaggtggttgagtgacaattctctcacaggaaatttccctgacatgagtaatcttatcaatttaaaaattctgtaagacttcttgttcatttttgtgaatttaattttatttttaagagagaatatatctccaattatacttctttctcttatccacttttaatggtgaagtgtaggcatctagagaataaccgattgactggtccattaccttcttatctggggagcttgccaggtttagaggaactgtatgtatcaatatacttttatgaaagatcaaattcaaaataatcctttttacttagttacatggttagaagaaatgtgtagtgattcttttgaacttcaaatgtgtacatgacaggtatatacagaacaacaccttcactggggacatccctcccggaatatttagtcgaaaaataaatttcaagtaagtttagaaatttcctacagacaccaatttagctctaaagagagtgacttatctttcaatagtttaaaatcaataaatattttcttttagcctttacaatgttgaattgtgtagataccaagataatcctggattacaccaagaggcagaggagaagaaccactcaaagttgataattggaatttcagttggagcatttgcccttgcattaattctattcttgggaggtttattgtttatacgaaatcgccgttggaaggcatctcagtcaaagagtgatgaaaaaggtctgtaaaccaggtttctgttgactcaattcagtatggtcttaatttctggctgcaatctaaaatatcttttgtgcttgttaggttattctctacgtgcaagcaccaagccttctacattcttttcagtttcccgaggtagtcatctgatggatgaaggcatagcttgctacattacactctctgatcttgaagaagccacaaataacttttcaaagaaaattgggaaaggaagctttggatctgtttattatggaagaatgaaagatggaaaagagatagcagtgaagctcatgtctgagccgtctagccatggagaccagcaatttgtaactgaggtaataccattactcaatccatgtaatgtctcatagttcatattgacatgtgattgtaattattggctatgaactaaatgatcttaatatcttatgatatctgaaataacaactatggataagataaaaactcagcattaatgataaaaaacacacttgcaggttgcccttttgtcaagaattcatcacaggaatttggttcctttaattggatattgtgaagaagagcatcaaagtattctggtgtatgagtatatgcacaatggaaccttaagggatcacatacatggttctattctccatcttcctatttcataaattttctttgcattttcctgtttaacagcaacaaaacagtttaatcaacttctgtgtaataattttgtttcaggtactactggccagaagcgcttagactggctacttcgccttcggatagcagaagatgcagctaaaggtttaacatacaactttctgactaaccttttcatgcatctttttccaagtgattctattaaagaaaaatttagatatctgtaggtcttgagtatttacacaccggatgcaaccccagtatcatccaccgagatgtgaaaacaagcaatattctgttagacatcaacatgagggcgaaagtttcagattttggattgtcaaggcaagctgaggaagatttaactcacatatcaagtgtggcaagaggaactgtaggctacctagatcccgagtaagttatttaatcgagtgttaagctacaatctctcttctgcattttcttaagcttgttatgtcaattctccaggtactatgcttgtcagcaattgacagaaaagagtgatgtgtatagttttggtgttgttctacttgaactcatatcaggaaaaaaacctgtctcacaagaagactatggagccgaactgaacattgttcactgggtatggatagtagtagctttctctcatatattaccaatatttgctttagttatatcaacataagctaagcaaaataatgctaaaactttgttttaagaaattcagtggaaaactaggtgaacttgaacataaaggcatcttaatgagaaataggatgtttgactggttgagaaagtaactgagtccaagcctaagcaggttgaagagatgagtattagaagcctgttgttctttgctttatcagtttttctgagtgcatacctttgaattgtagaacctataaatgcagtgctagtatgaaagtcacccacaagaagacatgaataaattctagacagcaattagagccagaacactgcataagataagtgggttttatgtgttttttcatatcctcaaaatttaagataacaccaaacaaataagagaaaacagatcatttggctctgcctcctaaagtcccatctttctaactaatagggttggccccatatcccactccttctgagttgtaagtgggtctaagcttgtttgttgtttgttatctttgttctttatttaattagaatctttcttaaaacaaaaataaaatacaataaaccatggacaaagcattaaaggctgagttttagttggaacttgtcacaaagtagtttaattattgaatcatcagaatatcctttctttgacttgttatgtaaagctttgatggaatattgataaggtaatataaaaagacataaaaactagataattcttagctcatatctagcaactgctgatgtgatttagttaataattcagagttttaagaactttaatctcttttgctttgcaggcaagatccttagttcgcaaaggcgatgtgataagcattgtggatccatttctagcagagaatgttaaaattgaatcaatgtggagaatagcagaagttgccatccaatgtgttgaacaacatggtgttaacagaccgagaatgcaggaaataattctcgccatacaagacgccatcaagattgagaaaggcgtcgatggaaactcaaaactatctcctagtggttccaaagcgcaatcttcacgaaaaactttactgacaagctttcttgaaattgagcctcctgacttatcaaatggctacttagtcccctctgcaagataattctgtattatttgctatctgatgacttattgataatcaaagtaacatatgctgttttgcttctaagactacaaaatggtccatacccaattgtaaaaaacacttttttgtttcatattttcttgtgttagaagacacaatatgtatatgaaccaacaaagaagataaggttttgttagcttcccaaagtggttatgtagctttcatcccatgttgcatatatagattataagaatatgtggtcaactatggatattaaagcttaaaccccaagttatttctttgtattataatctcactagaccaaatcttaagattataaattataatttattcagaatcaggtgcatttttctaatcattttgttgttgttatgtttttctgtattaagatgaacttttcaaagttgttcattactaagagtactcacaacttattcaaaaaagaaaaaaaaaaagaaagtactcacaacagcttctctactctatcttttaaaatacattattaaaactttatttatttttttttattttacctcaaatttttctattacaccatacaacaattttttttaatttttcatctctatttcatttaaataatatatttataaataaaatattatatatatatatatatgtaaataaaatattatatacatgggtaatgtgtgtatgatgtgattagaaaagtcaaaataatattaaaaaaaatttaaagaaccgctattcatgtaattaaatctggagaaagatttagcttaaaatctcgtgagctaaaataaagatgaatttatctcatctgatggagctaatatttaacattattttttaaaaatttcacattttagctattataaaataccagttgagagtgctctaaatatgcaaatcgattcaatttcattcgcagatttttagtctagaagatttcaatgccttaaactgtttaaaaactttttttaaaaaatatttataaaaatttgaaataaaaaaataaattaatatttatttttcctgataaataatcaagccattgatatcaaagtccaacttgatgacagacattctcaacaaggaccaagttgtactaaaattttgaaataataattatgttatgatatgataatatgtgtttggttccttcaaacgttttcttaatattttcattatttgactctagtaaaacaaatttgtactaattttacaaaaataatatatttaaagttttaaaattacaaaaaatattgtattccggaaaaataaaaattaaaataactaaacaacaaccttaaaacaacttaacaaacaactataaaacaacaaaaatataattacaaaacaacataaaaaaaaaaaaatattgatctaattacaataagcaaaataatatcaactccaaatgtaccctaaaggagcccgtccttggctcgagaacctatacatgagttgcgtacagggtgttaa

SEQ ID NO: 36859 - DNA, 2610 bp, Cannabis sativa
aataagttgaagaggggatagcttagctccacattgtgctcctctccaatcttgagtttgcattgcattggtggtgattcttggattcaaatggctcacatggatatctcaatgggaggtatgtgtgtatttgtttaattttctaaataaattattaatcttagttttatgattatgaacaatattgattaatgttgaatgtgtgaatgggagctcatactctacatgataatttaacattatcggctaatatcctttttatattttatcttttgttaatgaattagcattttaaaaagatttttttttttagattaggtccttaaaccgcaatttaaggcaaatgtgaacctcatgagttgaggcaaaaagtggtctaatatgaaacgcttacattttaaaattaaaatatataaatataaagctttaaattggccaccaatatccgcttcattctctcacccactcaatctcattcccatttcccatgcaccatgcaatcccataattcccaaaaacaaataactctctctttctctctctcttcttcgtttggtttctctgataattttcccacgtaataagctttcctctctctgtgcccagattcttgaaatgaatgagtccacgactggggctaagaaatgggtttgcaaggatctcagcaagctggtaaggtccgcaggcgttttttatggcgacaatcctttcgatttttctactccgatcctttatgcacagctctctatatctgccttgctcaccgctcttcttcaattgattctcaacccacttggccaaagtgcttttatttctcagatgctcgtacgtactaatgctattttcctttttttttttgggtattactttcgccacccaggtgtttgtttaaatgtctgaacggtttttcctgtacaaaaaatggctaaaggaaatgggcatgcataaaaacttgatcttgaacacttttttatgccttctttgattaaagaatgttgttactcaaaactgcaggtgggtattattctaagtccatcaattataggcgatactacatttgcgaagacagttttccctgagaccagcttttatatcagtggaacctttgcctttttcgggtgcatgctctttatgttcctcgtgggagttaaaatggatttgggttcggtgtttacttcaggaaggaaagcagtggcaatcggcctctgttgtttcatctttccatttcttatgaacacatccgttgctgtaattttaaagcagatggtgaaaatggatgtagcattagataattctttgtttagcatagcatgctttcaatccatgagttctttttacgtcacggcatgtctcttaacagatttgaagctcctcaactcggaactcggctacttagcggtgtcttcttctatgatcagcgggacactgtcttggctcgtgattcttatggctttcactgttagacagagttcttttggaagtacacacccacttcctcttttggcagtaagtttgtgcgttatggtggttatcatactgggcatcctcaggcctattatgcgttccatggttaaaaatacaaacagaggaagagcagtcccagagcattacatcacttccgtttttttaatggtgttatgctgtgcgttcttgggggagtttgttgggcagcatttcatgttggggccaatgattttgggtctcgttgtaccagatggtccgccattgggatcggccttggtcgataagctagagtcttatgtttcttcaatattgttaccaagttactttatttacagcggtgcttccatcgatctatgttccgttgacatgaaaacgtttgggattgtttgggttttggttttttctagcttctttgcaaaactcgtagcagctatggtgccttcactcttgtgcaaaatgcctttggttgactccctagcacttggccttgtcttgagtacccaaggcatcactgacattctcatatggcaacatggcatgatgctccgggtaatcaactcatcaacttccttttgctagctaattattatatttagtttatctaattattatttttttttgaagaaaaagaacaaagtgctaaaaaatagaatctcaacttggttggtaatggtggtactctactaaaaagggagaatgcccccattctcaaaatagttttttagtaacgaaaaaggaacaattacagagtacgcaaaaaagttttaaggaaagaaaacgaacaaatcatatctgaaataaaattctaaaccataaaactatcattatttgctctgtttaagaattcatgtcagattaactaactttattatcatcaatgtactaagtagtttgatctctgaaaatacaaaccaaaaaactcgtcttctttttttctcttttattgtggagacctactagtggcgtcgaagtttttcagtctataaggatttgaaacttgtaacaaagcacgttcgaacactccttctataaggccagtcctagactaaggcagattaggcccgtgctttgacctcgaaactccagccccataaattttgattaaggttacagattaaaacataacaaaatataaattaatacata

SEQ ID NO: 36860 - DNA, 3437 bp, Cannabis sativa
tagttttaattagttcaaatcttgaggttacaaaatgaacattgccttgtaaatttggcttgtctaagtattgtgttatagttcttagacaattattttagatcatctcagtgatacgatgtgtgatgttatttgtctcaattacgaaatagaagcttcttttacaattgggttggagttgtattaagaactttgatgcaattaatcttatttttttcgtagaatagattggtagtacttgttttttcttttccttttttttttttttgtttgtaaggaaattggtagtacttgttaagacacaatgaatatattaacatttatcaagtcttaagaaacagataagtatgttggaagcgattttatgctgattattgaagttatgtgcatgtttcactgcagtttcaattccaatttcaaaagatggaaaactctagtctccattggtttatttgacaaagcaatgtgaactcatttctatttaatctatcatgtattaaatttgaaattaaaaatatattaatctagataacatttataaaaattactttaatgttaagttaagtttgatggtaccacagtttgagactatgctacattgctgccaactggggctttcgaagatcaagttaggcaccaattctcagtagggttactgaaattcattgcaatgctaggcttgattcttcccttagttgaattgaattatttctgataccattgagtttctcctttgctgtgctctaggagagctacgagatatctctttttaatgaggccaagtttctttaatgataccatatacgtagtcacacaaactctaagaaatcgacacacaggatgatggaccactgaatgaaccccagctgagggtcctatatgtgcagagcaattatatcttttctttcatgaaaattaacaaatagtgctctgtccatcacatgggtttgtgctactcaatattcattgttctattatctcagtgacatgttcggttgcaatcaagaactcaaaaggacagaaccaattgataactaatggattgtgaaaataacaccagaataatggccagtggccacattcattaacaccaggaaagtggaacatattttcagacagctaatatctaaactattacaaccaaatcaagtatgagaccagccgagagaagctagccaacaagcaaacaattcaatcacagataatgtgtattgggaacaaaaacagggttaaaatccacaaacatcaaagcccatgaataaaaaagaaaatagcaaaacagaaaccaatggattagtcatcctcctcctgagcttcctcctcatcttcataatcatacccttcttcatcagctgtagcatcttggtattgctgatactcagagactaaatcgttcatgttactttctgcctcagtaaattccatctcatccatgccttctccggtgtaccaatgcaagaaagcttttctccggaacatagctgtgaattgctcacttactctcctgaacatctcttggatcgaagtggagtttccaatgaatgtagaagccatcttcaaaccagtaggtggaatatcacaaacagtagacttaacattgttcgggatccactcaacaaagtatgatgagttcttgttctgtacattaatcatctgttcatcaacctctttggtactcatcttgccacggaacatggccgaggcagtcaagtatcgcccatgtcgaggatcagcagcgcacatcatgtttttggaatcccacatctgttgagtaagctctggaacagtaagagccctgtactgctgggatccacgagatgtaagtggggcaaacccaaccatgaagaaatgcaatcgtgggaatggaatgagatttacagcaagtttgcgaagatcagagttgagttgaccagggaaccgaaggcaacaagttaccccactcattgtagcagagatcaagtgattcaggtccccaactgaaaatgccaaaatcaataatcaaatcaacattgacaaaacaaaaaccaagataaccattgaacttttcattacgccaatatcactaaaaacattaatatactatgaacgtggttaaggggaaaagaactcacagctaggagtagtaagctttagagtcctgaagcaaatatcatagagggcttcattgtccaaaaccatgcattcgtcggcattctcaacaagttggtgaacagagagtgttgcattatatggctcaacaacagtatcagaaacctttggagatgggaacactgagaaggtaagcatcattctatctgggtattcctctctgatctttgaaataagaagtgttcccattcctgatccagtaccacctcctaaagagtgacagacctgaaatcctgaacacaattacacataaattgcagttaataatcaattttgagattaaagatggctgatggaaaactaagaagatcaaactttatcagaaactttaaacgctaacatacatttaattcaattattgatatgataaattttacaacatactaaaagaaataccttgtaagcaatcacaattctcagcctccttcctcacaacatcaagaaccgagtcaatcaactcagcgccctcagtgtaatgacccttagcccaattgtttccggctccggactgcccaaagacaaagttgtccggcctgaatatctgaccgtacggaccagatctaacgctgtccatagttccgggctcaagatccatgaggactgcccgcggtacgaaccgaccgcaactcgcttcgttgtagtacacattgacacgctcgagttggagttcgttgtctccctggtaacgacctgtcgagtcaattccatgttcagcgcataccacttcccagaacttggcgccgatctggtttccgcactggccaccctggatgtgaagaatttcacgcattttgatgatcggagacgaaatgagtttgtagagagagaaatgagcttttgaagaagaggaatatggaggccttgagagagaaacaccgcagataattttggtgtgaattgagtaaaatttgaaataggcgacccttttataggtggcaagtgttaaggggactcgagacttaacggtgacacaacgctgtttgaagactttttgtttttgtttgtttgttattgtttgttatttattttttttttaagaaaaaaaaaaccatttaattttgttttttcaaaagaagccctttgaattgagaattttcacaaaataatattgacagttaggagtgtttattgaatcacatttaatatttttaggtctatttagattcgatccaattatatattagatgttaaattttaccatctaatccgatccaattaattttagtcattcaatcgatccaacatccattagttgttggattagttgttggattggattagttctatcc

SEQ ID NO: 36861 - DNA, 2751 bp, Cannabis sativa
gatgccaagtggcacaatagaaagcagagggaatatcctagaattcgtacacacagtcattgcaacaatcattgacatcaaagcaagaaaatatctcccaagagtagggaatgttgtgtgcagcagtacaccatacagagatgcttcttaggggctgctattggtaattgtcttaacagtaccttcctatatatcaatattactattgatccaaataagtatgaggtcccataaagtttaatataataaattttaaggagtatcgctagttaatcgcaaagtgatatatctaaagatgttagacaccactagtggtgcccaagcaataatctatatacaaagtgtaagtgggtttaattaataataattatgtggatagaaggagactcttccacatttctttctctagtatttctcacttaccttgtgttttgtattgatcacattagaaattcttaatgtcaaatggctcatatggacaatatggctttagaagatatgttgttactgttaatttattgccctaattaaacaaagtattggatcgtggattatatttatgagcattgttatattatttttttggcattgttgtgattattatttaatggtgaggaatttaatgctcatatgctgtaatactgcttgacaataacctccttatatatggtaattatagaaatagagaggagttttcataaatgtggtacatgggtatgtgatgctcccagcttggtcgcccggttgggtcccataagtgtgaacttttgtttggtggcatactattatcaaacgcactaagctgctgaatttatgcttggcatagtcaatgcattgagtgaaaggttttccaccagttgacgggaaagtaataatggtagtgtgtagtgtagctgtgtaactggacacatatagtcaagcatggtcggtcgtccaaagattgcagctcagtggtgggacacttcactatatttatttatgtcattgtttttgtagtgaacacgcttggaatcagattcctcatttatatctcacctcaataacattcaacaattttcatttttttcttcaaacaatctaaagatatttttcactctaattattggtttcggccgtgttcgctttaaatactataaaatcgtggaaaaattgggaatgttttcgtattagattttttcgaattaggtcaagtttgtatagtgacataatttgacgaactttttggacaacgcaatttgaacctatttcccatcacaaagccctatagagatgttgatattagtattaaagggaactagaaataaaattaggagatttttcacaaatatgaaaaaaaaaaactatatagcataaaaaaaataatataaatagatatagaaattaggtggttaatgtacggggacggggagtgcaagccccgtccctatcctccgctgagcagatacggggtagaaaaatacccatcgataatgggaaacctatcgagtattcattaaaacaaaacaaaaaaaaaaatgcaataattaaaaataattaaatttaaattaaactaatattctcacaaatatttattatatgccttcatcattcatagaagattacaaaaaatataacccaatagaacataaaaaataaatttgtctcaaaatttgatagtcacatatatagtaaccatatatatggtacgaaaaaatcagagtattacgtaaacacttgcatcatatatctgaataatttcttgataatactatgtacgtaattaataattttcattatgaatgatatatatattatataaacgttaaaaattaaaaataaattatacatatgttgggattggatatggtgcgggtacgggtagtattaaaattgtctcccaatacaccgccccattaaccgccaagtcgaggaatccccaccacattaggggcgggtccccatgattactcattctcgcggtataaatttctatccctaaatgcaaatgataataaattttatgattttttatttcatttcctagattatgtgttattcgtttacttaactaaaaataaataatacacaataactcaaaaaccgattataattaaaaaaaaaagtatttttatttttacactgtaaaacttctttttttgtgttttttccagaaatccacatagcaacagacataacaaccaacgatgcaacttaaatcacaatcaaaattcacatagcaacccacatagaaactaccggagtaactcacaccgtaaattttaaaaatatagttaaaaaataatatataaaataatttcctaaaaaaaataagagagaattagttccaaaaatattgatacataaataaaaggaaaatttacattatggtacgttaatagcaatttatttacttaattaaactttgtgatctaatttaatataaaatattaccttttattatactgtttgaattttaattattttgcttttataataaaataggtgttaggtgctgacatcatgtatattacaattttagtggctttaattttatttattttttatttttaaaaatagggattgtagaatatagtcttactttagataattctttcttactgaatttttaaaaaatatttctggcaacaccataagtattttgggctaaacagtaatatcattagggttgtgcagaaagtcatccaatccaattctaactgatcgatccaatcccaaccgatccaatacaatcggatatccaatcataattgg

SEQ ID NO: 36862 - DNA, 3151 bp, Cannabis sativa
aaaaaattgataaaaaataattaaattttttttcttgttacattggaatggtcattcctttctttttaaaatggaatagccattctaccaaaatggtgaagagagcattccattagaatactattccaatactttaacatgcaaccaaacaaaaaaatggaataaaaattgtttccttttcattccattctatttcattacctccaaccaaacgccatttaagttacttgggtatttgattacgatcttacatgatttattgtactttttaatttttttattaattttttctcataaaatgtaatttttgaaaaaaatataaaaattccataaaatttgtaatttcatcataaaatagttgatgtaatttaaaacctaacttattaccgtctaccacattttgtttagctagtttgggaccatatatatagatagtaatattccttttattataccttctaattaatcaatagggaaaagacaaacttaccaacgacaacaaattggaggggaaaggcagttggaggcgttcgaaaggagaactccggtccggaaccaccgcatcggtagtaataggtggtggcaggctccaatggtccaatagtaacatggtgaatcttcccagagctatagaagaagtacctataagatgtgtattctccggtggccctggcattatattcattgggtcttatcccatattccactattgattgtgtatgaaagtgttcatttgtaatccatgacactctcatgtggtctttccccattaaagaaatatgtacctaaacaaaatcccattatatatatttatatcatgtatcaaaaattactaaaaaacaatgggattttgagtaaattaattgtacctgttgagggtctgatgagtcagatcgtttgttgggaggaaagaccatttttccaggtgggaatcgaataaagttgtcatttttagcttcaatgattattaaagagctgagaaataagaaaatggatacagagatattggtatagaaaataactcttagttgattcatttttttcttttgtgtgatggaaaacttagtcgagggccgtgttgatttatatactaaaagataatgttggaaattataatacaccgaaagtggtgttagcaagagaatttagcttgcaatggcgtcaagtaataacattgcaatttttagtcacttttctttttggatatatataataacttatgtgtatgtattctcatgcttagaacaagccattgaccaaaaaaaaaaaaaatagcagatttatcgtgcactaattaataaccatgtctgattcaaattagcaagctcataagattactattagtttattataataattatttgattaattagataataatttcaatatttttatactatagaacgtgttgatcccatttccttctttctttgtgcatatgttattataagttggataatttggaaactatacatatgaaaaagaatattcgatccttaattaaattagtgattagtttatcttaatttgtcaacttcaaaagaaaaaaaaaagcacttcagtcggaagagataagttaaaatatttgatttaagggggattatttatacattatgtgtctaatccaataatcaaaaatggtaattaatatatatgttcagatgttgtttaatattggatataataatataatttaagagagaaggttacttgaaggactgagttcataaactctgtccaccatatatatacatatatatatatatatatatatatataagagctcttagaagggaagcataaagatgtatgaaaacacaagtcacatgatgaacttggattatatatatttatggtactgttttgtggtggggatgggaaccagtgccatacataaaactttgattataaaccaagtatcaattactatatacttaattattataataacaataataatcttaatatttagggtataatatatttgggctatatgcatttatttattaagagtttttttttttttagaaaaaaaataagcacttatgaaatttcaaagataaaacacacccattctttgatttggtctctgccactatcactagactatgcataatcgagtggacataatttaccatacagatttcggatcggtgtttttattctagaatgtaaaagatgatattgtatagtttaaatatttccaaatagagtatttttttttttttttgcgctttaaattttcattgaaaatatgtccttttcaaacctattacaaaaaaacaaaaactagccataacaccacacctcactatgatatgatttcatgaacaaagagaaaataatatcttcatagttcgatataatcttttaacgaaaatatctttttcttttttacaagaaaaatatctttgatatttgatcattaatatttattgtatttactgattattattttttttgagaaagtggagctttattcacaacaaaccaaactgaaaaaaaatggtgcagatcagcatgacacaagtcagctaaccagtagggaaaataatcaatacaaatacttagtgagtggttaggccacctaagaggcattgaccctttgtttagactgagggcaagggctaaaagggcacttctcacggcaagttccaccgccgcggcaaaacactttatgtcaacgaatcaatactgacaccctttgttggcacaaagctcgtcggtaaaataattcaagcaacttacacacctacttttaccggtgagaagactcaccggcaaaacctttctttttgtagtaagtagacatttctcatgtttcatttatctttgaataggtgagaacaattttcaatcaacatttaatatgaataactattattttatgatcatctagatctttatcactttttcaccaagaagcttcatctatatatcgtattccttaagaaatacatcgaatgattaatgtatactgaatatgcaattcttcaggaatcactgagatggattaaaacctttctcactgattgctaaaagaatgatgtgtggatatgaaaagtttgtctcctcataagtaagtttttttaaattgtatctcttgtgcaatctgtcagttacattctaattcaataaaaaaagaattcag

SEQ ID NO: 36863 - DNA, 1932 bp, Cannabis sativa
tgtctagttgttatacatacctgaaattatggcactgagggatgaatgatacatcatgaagcccaaacatttcaatgcttgtcctgcactgctcaaatcaaatccaacatctttcaacttctcataatgtagctagcttaaaattatcacagcacaaaagaaccataaagctcccaaatctttatatattaatttcctagaaagaaaaatgaatgtataaatacacacaacgaaacctccatgtagtttaaaacgatagcttatcatcttctgtagcttctattcgattacaaacattgtatttgtttcttataaatgttacgaaatagattagcaagaaaattgttttcttggtgatggggtagaaaataaaaataaaaataaaaatgagaacagtaatttccttaagataactatgatttagataagtagtcggagaatagtacatacatttcttcgtcttgatcttgaacatcggcagccattaacgggattaagcttggagtagcttcagcgagggtttgaattgaagcagagcagttagcggactgctcttggagatacaagagggttgagtaagaaaacgacttgttggtgcccaaagaaatggagagcttgacttcatggagctgatctgagaaactcgacatggagaagaagaaccggtggaaagtggaaaccctaatttggagattgtcagctgtttcaattcgttactaattttcgcgccaaaaggctgaataaatgatgaaagagttggcgggttaatgagctctgtttggatatatggatatcgatgctcttgtaaagaataagggcatctcaaacacttttacatattatccaaacataataatattcaattaatacacttttaaaatgaactaataaattcttctattgatctcaaatcacgagaagagtgggcgtttattttacataagatacataaagaattaggtttttatatcgatctattgatcaattgcgaagacattataatttggggtataaaaatggatagtataatgaagaaggttcggaatttggatgcttatccaaaaatcaatgaagatttctataagcgcaccctgagtgggggccttattaccattgcctcctccattgtcatggtcttgctctttctctccgagctccgattatatctacatgcagctactcaatcaaagcttgtggtggatacttcaagaggagaaaccctgcgtatcaatgtacgtcatgttaattaatgcatttttttatattatttatgatcaatctatctttgttattattttacctgtattgatttaattattcattaatactctcttgttagttgttatatcatatgttatgttagatcttcttctataatgaaacattactcaaattcaaccatgatgattgtataagcacttgaaactaatgtgggagctaagggaaacatgggtgattatcattatggcctcccaacctttatttttttctgaataacctcaaaaacttattaggaatagaagctaaaattttggtaattacatggagatttacctttcaaaaacaaagaaaaccattaaactcatgatcaagacaccatttagctaaagtgtgggctgaatcattaagagttcaagaaatccaaaaaaaccgaaaggttaaaattagtagcatgtaaaagctttgaaaaaattgaaagacaaacttttatttcattatgtatggataaatgggtggcaatcgtccttgctaaaagaaaatatttagggctcgtttggtacactgtattgtattgtattgtgttgaattgtgttgtattgtatcgtattgtagctcgtattgtaatgtattgtattgtattatattgtattgtgttgtgttggattgtgttgtattgtgttgtattgtattgtattgtattgtagctcgttt

SEQ ID NO: 36864 - DNA, 9109 bp, Cannabis sativa
  modified_base (8811)..(8813): a, c, t, g, unknown or other
taacagtggaggtaaaaactggtttagttttgagtggattatttaccacagttattatttagattgtgaaatttattactcgagaggaaaacttttgaacaatcacgagtaaattaacttatgtggtgtaagaacgagagataagctttataatcataacacttgaccttcttcagacgatgtgagattgcacagcttactcggtgcatctttgaatccactcatggaaagcataataacttcaatttaattagccccttttttttttaccattttagctcgtttctcaaatttttatatttttagcacacgtttcgtgaaaacaaagaaatacgcataaaattgaaccaaactgacgtaaaaaaaaatcaaaaatttattctaaactaccataatgaaagtatatatctcatttatcatgtactaatttgtatattaaaatgttatatattgtgaattggacactaacaaatattagcaaatataatatttatttatattttgtaccaaatttaaattttacattgaagatgttctaacccaataatcatcatcaaaagggtccaaaatctcataaataacttaataaattgaagtattttgaaactaagatttacaaacaatccaaaatatttcataagatgttattattgctattattctaaatataaacgctcacgtcacgactcccatctataattctctcaatatcaatcttatggtaaaattaaaaagcataaagattaatactcttcctggtttccataaagaagccatcttatgacaaaaagtatcaaaatcaatactcctgatttttcgaggataacattagatgttattattactaatttactattattctaaatgtatgagttattttttttagcatcaattaattttaatattgaactgtttattttaattcaagattctaattattgttattaattattttctgatgagatccaaatttagtgtagatggatggaataatatatacaagactataaaatagagatatatatgtatattgattgatccttatcaaaaaatataatataattaagtaattgatatgtaattgtatatgtattatatatctgaacgatcatgtgtattacggctcttttggatcgaacattaattaagaaagtcataatttattagttacgtaggtaccaaaacccaagccaactcaccaccatatatcatcatcatcatcatgaatgatacaaccaaacactcttcttctacaaacttccataaaataattcatatatctatctatatatattatatatatatatatcttcttagtgacgtggattactaactatggaagaatgagaccaaaaataaacaaatagataaagacaaaggagaaatcataatcaacatcaacagcaatatatattaaaattataattatatatattctcaatcaagtcgacaagagcacacatccaaattatatagtgtttctttatagccagccaaaccagttccacagcccccaatttctaaattagaaagatgtaaaaaagtggggtggtgctataatagtttatatttgtgagttgtgacaacatcaatttatctcaactgctttattcttcattctcttttacaaattttatttgtatccacaaattaaaaaatttcttcatattttaataatttttattttatataaaacatatacttttaattatattaattttttaaaaaatattcttaaaaaatatatttatcaaataaaaataaattatattttaaattttataaaaaaattaaaataaaaattatgtgaaattttattaaataaatattatacataatttttaaaaaaatatatgaaaataaaattaaagtaagtattgaaatcaacaaaaaataatatgagaaaaaaattagtaagagtaattttttaaaaatatattaagcttaatttttggttatatattggggtgtagttatcataattttctggtacatatagattttctctttttaaattttattttaataatttttattttatataaaatttatatcctttaattatactaaatttttttttatttttttcttccaaattatatttttaaaaaatatacctattaaataaaaataattatattttaaatattatgacaaaagaataaaaattatatgaaatttttttagaaaaactaaaataaaatatacatgatttagaagaaaaaaaatataaaaataaaatcaaaatagtattgaaattaacataatatgagaattttttttaaaaagaaatattaaaaagtaatttttaaaaatatttaatatttttttaataatgtagtatagttatcattttatgagagtgcacatagaataccctttaagttttaatacagcaaatacctctattgtttttggatatttttttaaggcattaatgattaccttacactaattttattttttattttttttgacaaccttacactttaattttattcaactctttctatattcttttatatctaattgaaaaaaaaaaaaaaaaaaaaaagaatcactataatatctgattgtaatttaattattagtggccgctaagaaattttttggacaaaaatacaataattaataattatattgaggaaaaagaaaatcaaccgggaatataataatttgtaagaatttatacaaatatcttgaaatcagagagttcaaatatgaaaatgttgacctacatgtaaattaacttgctaatacgtttttttacaagtgtttatatcatacacaacgtacagaataatatccattttaaactttggtttatttgtacggcaaattcttaaatttatacatattttagtaagttggttcataaattttatttttattaaattagtccctaaactatataaattttggtaaattaatcctcaaactttattttcttggcaaattagtccctaaatttttatttttttgaaaacataaaatcctcaccttaaataatagtattttatttatttatttacttttgtattaattttaaataattttatattaatatattatcaaattaaataaatatattttctcttttaaaaaaaataaatatatttttttatttatatatatatatttttcaaatatatcaaaataataagaaaaacaaataattaaaaatacttaaataataatattttttttttataaattactgaggtaaattatctttaaaattgatttttaatttatgctccgtggcaaatccataaaattttaccatcgatacaaaatataaataatcaataaatatatgaattctagccacctctcatttttatattttagcatttatagtatatttaaaattctctctaaccattatatgaatccgctggtgtttatactcttttttcttattaataatatatatgaataacacatgacggagctaggattagatttgagggggcccaagctaaactaaaatttaaataacaaagggtaagtctgtagtacactttcttaaagggttatttcggtagacctactatctgctcgacattcagaagagttttcagtccttttttttatgatcgcgtatgttgcagctatgtaggatcacctgtaaatattcaaaaaaaaatcgaataatttacaatgccgaaagtaaggttctcatattttgttgcacgcgtgactaattttctcttatgcgcgtggtaagcaactgtttaaactttattttcggcattgtaaactattcagaattttttgtttacaggtgatcttatagatattttctaaaacagataggggtctaccaaaacaaccttttagatgatatactatagatattaatattttcaataaaaatatttaatatcaagatttttgacacttgttcactactctttgttatagattgctctttaatttattacggcaaactatcattaattaattatatatactattagagaattgttaaaaagtatcactgatgcctagcaccctttttcgtatcatactggtattggtgtaattaaataacgggtctttgaaacttaataaaataaattttagagaatatcgctaatcaatcgtatgatatcatctatgaaggtgttggtggccaatagtaatgttcatagcattcaatagaattaagtctaattactttatttgctaaggtaataggtgtagcttggtttgaaaaaaggaaaaaaaaaactgtacttattatgtttcgcattgtttatgtaagagtgatttgtgagttttatagaaatactaaattttaatgttatgataagaattttaataatttgataaatattatttttaatgtaaatatctatcaattaattattaatattatctaacaattaattattaataattaatataattaaatgcctaaaaaatattttttttcacaaaaactaaaataaaatagtaatattgggacttaaatattggccttacatatatgttttgggggccaaaagtgggtaactataaattaaaaatgggtttttttacaccacatactgaaatttttaatttttttacttttttactgtggggcggaatttttttaaaaaatactgtgtaagttttatactgtgtactatgttaagttttcatggttgttccacggttattttttagttgttccactgttattttaattgttctgttttattgttttacagttatttttataaaaagatagtatttttgaaaaaaattagcctgatagtaaaattgtaaaattttgcccaaaatcaaatatttttatatataaaatgcaatagcaaatatatatgtaaataatatttatataagcaccatatatatttgggatgggggccatgggcacccttgaggtctatgtgcctctgccctagaatagactaaggtatattttaaatattttattaacaaattaaatattataattatagagtatataaaaataaaaaatattaatttcattatatttatgaaagtttaaattaaaaaaaaaaataaagttatttgaatttaacacaaaaaaaaaataaattaaattatgtaaaattaataaaaatatcaatatgtctaaaacttataatttgaactttgatttaaaaaaatatagtggtagctatatatttgcagtaccaattttcaaaatttaatgcaaataataataattaaaaaatcaatattaagactgttatgtaggcacatccactggccccattcctcaccaatatggcaataaatgaagtataaaagggttggtttaggtgcccaattgaaatatgtaaaatagaggtgtttttgacttttttttatgttcacctttttttgttttattttttttttttctattcttctactgttttgcactattgacttaccgtaaaagtgaagattgtaagaagatatatatggccataaatattcagcaaaaaaaagaaaagaagatacattataaatacaaaagaaagtccaaattttcaatacatcatgaattttaaacattcatacatatatgtataagtacacaataaagcacttatattacatatatattttttcagacagaaatggaaagaaaaaaagaaagaaagaaagcagaataggacccatcatgaaagataggatttttaattaattaacaaacaaaccacaccatcattttatcaaaccaaaatactggccagcgtatgagccaagctttttcttaataatgtgaaccactctccttttccttttccttttccttttcttcagtagtctcagtcttggaatggtacccaggaagcttttccttgatcttctccaaaatacccttcttctccttaggctcaccttcatgatgatcatcatgatcatgcgatgatgagtaatggggctggtcgtggtgaactggtggtggtggtgctgctggtgatgtcaccactgctacctcttcctctttcttgtgctgaccaggtagtttatccttgattttctcaaggaaacccttcttctcttctgggttgggaacaggggtcaccacagtctctgttgatgtgtacccatgaggaccttcgtgtgttgtgtgatgagcttcaacttcgtgctcaataggcacacttgtgtccacatgatgttgatgaaccttctcttcctcctttttatcttcacctgagaatttttcctttagtgtctccttaattcccttcttcttcttcttctttttctcttctccttcacattcttcctcatcgctagactataataatcaaaatcaaaatcaaaatcaaaaccaaaaccaaaaccaaaaccaattaacctcaatataaaaaacaaataacatattatttttttacttacagagctagagctactgtgagaacggtggagtttagctggatttgggttcatcttttcttcttcattaacagtttcttcagcgttgaaatagttgactggttcatgagaagacttaacaggttcgtgttgttcagacactttgaccttctcagtgaactcggagcttatagcagcatcatgatgatggtgatcagccttcttttcctcctccttgtgatcatctttcttcaagaaatcaaatagtccacgatctttggtctccacggatgaaccctcgtaatcgtggctcttgttctcttcagccatggttaactagaaaagaaacttgggttaactgatatgtaagagtgagagtttgaagagagaagtttttttggtattagagagtgttgtttaacgatatggattttggtttggaagagaagggagggttttataggactagccacacggaccaaacgcgactaagaaaaaataaaaagagatgttaaaaatattatttatttttccatatatctattgtatctcagtatctcctataacttaaaatataagggcttttttatttttaaacttcaaaacaattttatttttatgcatttttatgaaattctatatagaaacttttattgcaaatagcgctgcaatcattttagcaagtcaaaccgtaaatttaaaaaaaaaaaaattaagaaaacagtatataaagtaagtaattcccctaaaatatataatatttatagttactaaaatacaaatattatctaaaaatatatatatatatatttttttattttctcttatacacatcagatttatcatcttctcttttttaaaaaagagcattaaggtaaatacttagacttaatatttaattacacaaatagtataataatgaggagagtattaaacactaatagtaacttttagcaatagttaacaactcaagttacctactatagtctcaaatcacattaaattaatgactttttaagtaaacaaataattttttttaaaaaaaatcatgagatcattgcctattttgagcaacacttcgcataaaattagttttgaaaattagaccacattgcatatatggcaagacgattctaatatgcaattcccaatctaatctatccagatgctcttaaaacatataatattttttaaaaaataaaatatcgttaattaattatatagtttcttataaaaaatactagtagtagtcactattaatattcaataataaaattttaaaataaatataatataaaaaattgccattatcaagttgtgattcggtaaccgacgttatcgttctttacaaaataagtgagaacattacatgaccaaatgatacagctaggaccttcaaaaaaaaaaaacaaaatagcataaatatctcttaaattctttacttgtggcagtttaaattcataatattttcctaaagtttgttgatttattttttagcaaaattgtaagaataattttaatatcagaatgtatataatatttaaaaattattaactttattagaaaaaaaaaaaaaaaaaaacaataaaacaataaaactttagttgcttagctggtgtcaaaagaattttaatagtaaaaaagctttgaaatttttttatgttagataacaagaaatgttaaaggtacggtgatacaccacttaagatttaagctgttttatcgttattgataaaattaagggctcggtattcattttgatttttgtttttcattgttaattttacttaacaaaaatttttagtttctctttagtttctgattaattaaacaaaaaactaattttttttaattaccgaacaagtactaaatattttgtattatataatttaaagtaataatttttaaaaaaatattataaattatttgttgtactttagaccaactctaggaatgtttataaaatagccgatttaatcaaatccatacaatttaattaatctaatccgcaaagtgtagatattcgcacttgtgtggattgaataagattggaaaattcaaaatctgcacttgtgcggattagatgttgattgacatgtaaaaatgaccgatccaatccaatccacacatatttataaaaaaattaaaaaattatatatacaaataagattttaatataaagaaaatagtaatttaaaagtttaatatatataataattatattacaaaatttaatagatcaaatgtatattttacttttgtgtataatttcttttctgcatacaattaaaaataaaattaaatattttttttataagtacaattttttttttctttttttgaatttgttatttgttgttttacttattttaatgcgttgttggagacataaaataactataatttattttattttattgctatttatgtgaaaaaaaatatttttttataaatattaannnatttaatattaaaaagtaatcaatgtaaaataatttatctaatttgtacttttataaattaaattagattggatttgaattattgtatgaattatattagatttaaaaaataaaatctgtactgcgaattagatacattataaaatagtgcgaattgaattagaggatcactcagggccggccctgaaaatatatgggcccaagacaaattaaattttggggccctcaaaaatatataaaaaaaaattaaaagaaaagtgttatgggattttaacccatgaccttagactttatgc

SEQ ID NO: 36865 - DNA, 2879 bp, Cannabis sativa
  modified_base (2843)..(2853): a, c, t, g, unknown or other
tatatgatatataaaatatatttctaaaatatgcattccttaattattgatacataaaccttaaataattaataatataaagtattattcataggcggtctttacattatctatcatgaaagaaaaaccaagtaatagtatttacaaataatacagtactttgggccaagtgaaacccagcccatgaggcagtgactgtatgctaactttcatgttgatcacggtcacaactgttattaccttgtcccttgattgtggataattaattgtgcattaattatttcatcttcaattatgtagtttcatgttttagcttggtattattccctaatcctgatttgaggagagtaatttccttattttgtgcagattaacaaatgggaaactactactagcttctagttacatgctgataggcccttctggctacgcggagctaaatgtcctccagatatgagctacacttagcaaagacttgcttggggtgagtaatgcgagtgtcccttatcaaaaatacaaaaaaaaaaaaaataaataaaaaaaaataccatttgtctctaataaccttgtcaattcaatcaaaaggcaaggatatcaaggacgacttttatgtatcatcaacgactattttttattccaaatattacttatcagatgttatccctgataattaaccacttttaaggagaaaatattaaatatttttcacacattatcattcctgattacactattttcttgtggtattatttatagatgagtagtcgcttaaaataaacgaagagttggtgttaatttaaataattttaacgtgaatttttaacaatatatattttttatattttatttataattttataacttaaaactttatttaaaaaaaatactctttttaaattttaaaattaagaaattacatttatctcgctgaaaagtaagaaaaaattgaaaaaaaaaatcagcctcacaataattattagtcacctatatataaatataaactatacaataactaaaacaataatcttatgacaattataaataaacaataaaataactaaaaaaaatgaattatatttttactaaagatatatttttataaataaaaaactttaaagagtaaaaataatataaaaaaaaggatgttaacatatttttttatccattttgtaattttaaaccgttatataatttaaacaagggctgaggtgttccacacacaaaataaataaataaaaataaagagtttttttatttttatattttaaaataattttttttatatatttgtatagaatttcacacaaaacttttataataattaatgtagtaatttaaatcacaactaaaatttacatagcaacttacatataactattaaagaaattactaaaacaatctaaattataaatttaaaataactaaattccttacaaaataaacatgtatatatatatataaggatatgattttgtctcatgatgtactttcacagaatgtattccgtagtacattagatcggtctcagagtatattaaataagtgtgagggtacgtttctactttttaaccctaattactctcagatcaatctcaactgtcagatcaaataactctctcatctgacggctgccatacatcacgaattacaatttgtgaaagtacaaaacgagataaaattatatccctatatatgttttgaaaggataattgtgtttttgaatggtactactactacatataaaacaaaataatgaaaggtgataattaattccaaacattcagtcagacaatgcatgaaataaattaattaattactgatcatgaataatattgaccctacgtacgaaacttaagagaattatttttatatatatgtagagatatatatactctatcagtaatagtacaaaacttttactgtgttatatatgcacgtacattttaacctctttctttccttccaaaataacattaatatatttgactgttagattagatatctaaaattaaatactccaatatgtctccatctaatatatatatatataatcaacaaagagaatttaatttaattaatgtatataatatatatgtcttcttctttataatatatatatcgactttgtttataaattagctataggtcatatattatgtgctgtatattccctaataaaaagaaaaaactggccttattcatcactcaataatcaatattcaaattgtttcaaaaaaaaaaaaaataaaaaaataatcaatattcaaatgtacgtagagaaactatatatataggcgcggacccactagacaaagtagggcagtcgtctcttacaaaaattttaaaaaaatatatatatatacaatttaattaattacaatatatatttataataaaaaataatatttaaaaaataatatttaaaaatataatattaattttagtgtaatgattaaattaaattacatatagattaaaaattaatagttcaatttccataaaaagaaaaaaaagactaaaaattattattattataaattaattatatgctgtgatttctgttcaccatttagaagtattttttagttcattatttttatcaacaatatagttatttttttaaaaaaatagtaaaaacaatattctttaaatattttattgtatgaataattattttttttatacatacaataaataattatttaagttttatttttcgatactataaattatttaaaatgttttagtaatttacaaacggctcattaatccttcttataaagagtttcaaattaatttaaaaatcaaatacaacgtgtatatatatctttatctttatatannnnnnnnnnntatctaacggcatttcttggtttaac

SEQ ID NO: 36866 - DNA, 2849 bp, Cannabis sativa
agaaggattaacaatcctaatacactcaaatggttgttggcaacatcaagctccttaagctttccatttctaccaagactctccggaagatgaaacgtgaaattgttatcccaaatctgaaacacttcaagattcggaaactcaccgatgaaacttggaatgttaccgaagaaattgttactgaacagattcaacagaatcaaattcttcaactctgaaaaactcgatggtattattccactgagtttattgatcgaaagatcgatatgttgaatgcttactaaatcacccaactctggtggtatttccccggtgagattgttcttccatagaaacagagactgtaaattcttcaattgactcagttcttcggggatatttccagtaagattacagttactcatgtcgagtatttgaagtgagatcattcctcccaattcaggtggaattccgccgttgtaattgttgtcgtgaccaacatacattacttcgagatttctcaacttacctaagcttttcgggaaattaccagtaagactgttaccgttaagacccaaatatttcaaactctgaatctcggaataattttccggaatattaccggaaaagtagtttccgccgagacccagatgggctaatttcttaagcccgataatctcagtgggtaatgtaccggtgaaattgttgttgtaaatgtcgagaacttgaagctctgtcatggcacgaatgatttctccagggaagtttccactgaacaaattgtttgagatgtttaaaatcttaagtgaggtgagtttagccatttcagccggaagtgtaccggtgagattgttgccggcaatggtgaggttgacgaggtttgtaaagcttccgatttggggtggcaagtggccgaagagagggaggtttgtgatgttgagggaggtaacacgtgactggttgttgttgcacgtgactccggagaaggaacagaaggatgaagaagaagaagaagatgggttattcgaaatccaatcttgaagaccatgagaagcttgagatccgatcatggcagtcttgagatttaagagtagttgaagatgatttagtccttgagagagtgagaagaagtgaaatattgaaatgagaagaatgttattgaatggtgaagaagttaagaagaagaacaacatcatggtattactatgtttatttatggttatggatcgaagtggttgtgttgttggttttagttagaatattactatttatagaaacagaatctgattaacttgaagattccgattctatagtatagtagtgtcgtgcgtgtggtgtgggtcccgccgtttttaagatcccacgagtttcatgaaattatttttgaacaatttttattgggaaaataaataaatagagtaatttggtgttaaattctttcaaccattttattttacttctacttaatcttttaacattaaattttagtggtaaaaccctttaactgttactgcctacatgtatcatcacgtacacgtgacatttatattggtccatctaaaattataaaaaaaaaaatattttcagaattcatttaaaaattaaaaaagaataatttaaatttatgaaatttagggttggaagattaaccgcaagtgaaatgatatttgaaagctaaactcatttaggtggtgtttgattggaggtaatgaaatagaaagaaatagaaagaaaacaatttttattttattcttttgtttggttacatattaaagtattggaatgtcattccaatagaatgttctttctactattttggtagaatctattttgaaatacaaggaaagaccatttcaatatgagaaaaaatttaataatttttttatatattttaaattttattttattccattcttatttttattctcattcatattctcatgttttcattcttcgcctaagtttttaagtttggcacgattaacccccactactaaatatttggagtagaattctccaaacttcaatcttcttttgctctctacttttccgttagtttttaactgtcaaatgtcaaatagacctaccattatgtacacatattgtgtgatttcattagtcaacatatatcattttatttatttagatataatgaaaataaaatgtattttttgcattacggaaatacacgttgcaatttaaatccacatcgcaacccacacagcaactattggagcagccaatggagcaatccaaaccgtaaaaataaaaaaaattaaaaaaatagtatatagaatgattcctataataataatttcttcttcttcttctttcaagtctaccatttcaccaccactattgcaccagtaccgcccaactattaccaccaccaccatcgctgccgccaccaccaacaccaccccacaattatactaaatcagaaaaaaaaaataggaaaataagagaatcagataactatatcaatcgattccgaatatgaatttgcaaatctaaaaccctaaataaaaacaaaaacgcacaattagttttggatctgaaatcacaaatgccacaaacttaaatacgaaattgattgagaaaacataaacaaataaatatcaggcccaatgtcggggttcgtgagggggaaagagcctttggcttccgtgagttctcaagttacgtcacctgagctagcggtggtggtgacaccgtgataacgagagcatcgagagggattgagggaagttcagttcgaggttttttcagggttttagtttcgagaaaaaggactagaggtctacctaaggtgagaggggaggccgacagtgctccttcccaagaccccgcaagagagagagagagagaga

SEQ ID NO: 36867 - DNA, 7919 bp, Cannabis sativa
aaaaaaaaaaaaaaagaggggggcttgaaggtcttggtatggtatattcaaccaacacacttcaaaatgcataaaactgtttatggctatcagaacaatacagtattataccaacacactttacaatgcataaatctattatgtctcttagaacaatgaacaatgtagagcttcttggtagaacaaggctcataattaaagttctgaaacattgtttcacttgaacattagggcatacataactaatttccaaattaaaattcctccaaggaactacatatgttataataatcaaatcattgaagattacaaatttatcgtccttaaagaaaattagatacaaaatccagtccctccattggaagactacacaattaacacacaaaagcagtcaaaatagagccatagacaatgtctctaatggacctaatagaagtaggtcttaatctatactcagacagctacactagtcagctccgtagtgggcactcgactattagtaccagtctcacaagaaatagttacaattcgtaaataaaaagggaagaagaaaacttccaaattttggatcttgactgagctatggtacgaattctctgtgctcatcatcattttttatttaatctgcttcaaatcttctttctttttttttctctttcctttttttgaaaaaaaaataataaaatcaccatcagttttcagcccacaaaatcatatatcctattattgctcttcagcacttcactgatattgtcatcgttctacgatcaagtaaaatagccaataagtgcctatatactacatggtgtcataggaggtagcaacataatttgaagtaattgatgcatacctcggtaatgtgaaccaacaatgttatatccttaaaacatataacaaacactttcagcgcatagattcttcagggtgttggaattcaagatctagtttcctcttcagatgtgttctatcagcactgcccaatagaaaccaaaataagaaaaacagaattaacattaaacatttgcttatcaaaaactcaagccatccaaaacaagcgttaacatgctcttctatctttaacttaatgagtaacaaagcatttacgctaattaaacttaacgtgtagaaaaagcattagcatattttccatcttaaatttagcaaggacagcgtcactaaaatacacctttttcgcctaatttaggatgaaagaggaacacatttcgaacactggtttacaataacaacccaaacaaagcggctgtcaataatctttccttaccaataaacactgaccattgaaaatctaagatctacaacttttttcccaaaaattttatatatatgtattattgacagtcacaacacgtgaatgtattatttttattttatttataattttgctaagtaggaaacttaaatagagacttcaaaactttccatatattcaaaagcagcataccacataggcatcgtcgtttcaaattaaagcatttaaaaagtaattaagacaagctctatttgtcataattgaaatgaaactctggcctacatattactataaatgtagaaatatttatttctccttcgttaactagttgcaacatatttagatacaccttttcacaaatgtacagtacattgtagaactttgaacgataaattgtgaatttcatattaaataaacaagaaaatgtcacagcagaatgaacggatgaaagaatgaaaaaagtccataaagaattatttttccgtctcagattgaagaattatatgatcaatatcagcaggaaacaaaacgtattatttaataaaagaggaattgaccatgaaatccaaaaacagtagtcacattcacaaatgtgtggctgtaacataccatagctgtatgtttcggtcacacatttgtgattgcgattgattaattattaagaataggcatttttaagacaaatataaaagacacaattgcaatgctaagttgtcatgaaaatctcatttattatttcactcctgcccttaactgcagattcaagatgatgtaattgtttagtcctgaataattgttctacagccaaacaaagcataatctcaaaataaacaaagggcatttcattcaaggaaagcagataatgcagctaaccctaaaaatcagccagcacgaaattagtgatgttgatgaactcttactaggagagaaatggaacctgtccatctaaacatataccagcaaaataggtttttttttccaagctgattgttacgtgctttagcaattaaggttacagaggttaaaacttaaaactattaaaaggaactgagaaacataagtgttacctgttaatggtaggtctatttgggggttttgcagcaaatattgaaaaatctactgacataggcacatgctcattcctacttgtattttcccctgctggttgtctgatttcacctccttcaaaaccctctggctgtgcagtcactctccttgattttcttggaggtgacaatacagttggaccatcatttggatcaaaatctgaattcttagactcccgcttaggagcaggtctagggagcttgttaggaactgtaggcaaaggtgcagaggtaaagtacctacaagaaacaaataccagtaaggaaatgaaagaaagctttgtgtcaccaaaacaaaagaaaacaaagtcaaaatacctgtggtccaacgcttgctgcacagatattctagattttggatcataggtaaacatctttgataataaatcaagagcatcatcactagccataggaaacattgagcgcagagggggtgcaggaacatattgatattccacgtaatcaggcaggaagatcatgtcaggccactgagaagatgttggagttccaaaagcagcaaagattttccctaactgatcaatatcactagatccctatagcatataaaaagtatcaccaatgggaaaagtttgctacaaaaattgttaaagcaatcagctgtgacatactaagctctggcacgcaaagcaaaaaggcaaaccggaaagcaatatgtgtagaggatgaagtaaatagataagtataatttcctaagatatgtatatttgtatattcatgcaggcaaatggaaaaagaaacagaaacagagtatttatgacaaaatcagatcatttttatttatttatttttgctaaaagacaaaatcagatcacgacacaggaagaattagcatgtcttcaataattcacctgcagaaaaggtcgacgtagaaggagttcagcaaaaatgcaagctgccgcccaaacatccacccctgaaccatattgcttggtgccaaacaacaactcaggtgctctataccatcgagcaaagacctagcataaacataatgagtttttaactaagatgtacatcaaaagtaactgtaaagtgcaaattacagtgttaaagaaaactatgaccactttaaagttcaagttgattgagctcatattttgaaagagatatgtcacgtataattaccaaattggtcatttcatcgacattagataagagaaaaagtgatgtcaacctggaattgtttttttatttatcccagaaagtaaatgaacagagatttttatcgactgtaaggttatagaaatagatgtgaagacaaatgtacagaataataagaatgaagagctacaattgaaataggaatataaacataggggagcataaatcatacatatttataggaaaattctacggtagaagatgccacttttgtctttatcagtagggacatcactattttatttttatttttttcttttgcatgtttagggatatctccattttagtagagaaaaaaattaaaactgaaatttaaaaaatgttaaagggcactcatggtgcctagcactcttgtgaggtgtaatattgcgattggtgcaacttaatatcgagtcccaattattttattttaataaatattatagaaaaccgttaaccaataaggtgacagacacttcatcgtagttctaggcactacgggagcctcatagcaatgttcttttttatatgactgagtacattgttgttatagtagacattccatctgttttcgaaaaatttaaaatattctacaatgccgataacaaggctcagacattcaattgcatgcatacttattttctttatacgcgtgcaattgaatattttgaactcttcaaaatttttgaaaacggatggatgcctactactctataactataatgtagactgtgatatgaaaaaattaagttataatctcttcaaatgccaaaaatatagacatataggggaaaaatgacacccctactatagtgcctcctatatttatttatttatatatatatatatatgaaaattcataagtaggcatcacttttgcccctaccgtagggggtagtttttctttttggcacctagagaaagcataactcggttttgtttatatgaagaagtacattatagttataataggcattctacacgttttcaaaaaattcagaataataatggtaccaaaaataggattcaaaaagtttgttgtacacatgcttattctttttatatgggtagaaataattattttgaactctgttttcgacatcatatattagtcagaatttataaaatatggtggaatgcctactaacaacctacactgtcataaaaatgaaattcagatataatttttctaagcatcaaatacataaaacaataacaccacattgaacacaaatttatcaaaacatacatttaccaaaaatgaaagtgattcctatgctcatgggtcttttggtgtataaactatacatttatcaaagcattaagcacaagctggctcatgtagcgcaagtcctaacacacaagctggctggtgggaaggaaataactaaattatgaaggacttccatattggcattactgtgggcagtttggctggaaaggaacaagagaattttcaaaggcaaggaaagctcagtagagattttatgggaagaatcagactttggacagcgacttgggtttataggtctaaaccctttgaggaactctctttcctagacctatgtcgagaatggaattcattgatgtattagtttttgttttctgtcgatttttgtgttctgttttatactgtgttttatggtttttgtgacacatcgtattttttgtttaccacagttttcctccgccaaaagggaggttcttaataatatatcgggggagtctaagacaagtggcctcgttctctttttcaaaaaacaaaaaaaaaacattaaacacaaattttcagactttaatgtataaacaataacaacaacacattaagtactttaacatgataccatcaacaagtaatgatgcaatcagaacaaatgcatacaatatctgaataccagccatttataaactcacaagacctccaggtaaacttcacatgatccacaaaaatacttcattggatgattacactcacaatcgaaaataaaatgaatcaaagtacttctaattagtgtatgaaaccccaaaatcaacactggaaagttatactcttgaaagtcttcataaactaaacttcatgatgaaaataatgtgctaaaatagtaaccaacaaaagcatagttcactcaatgttaattacccaataattatattgcaaaggcgtctaagtaaaaatagttattcttggacacttcaaaaggcatctaaattaaaatagttatttttggacactaaaaaaggctaccatgtgtaagagaagaatacctggtgcgtgaatctgcgatctgggctcccaaatattcgtgctaaaccaaaatctgccagtttaagctgtccattaggtcctattaataggttgttgggcttcatatccctgaaaggaacacatacagacatttcagaaattatagcaagcatgtgattgtgatctcaaatgagcttctgaagacaattctagtacctgtgcaagacccatttcttatgacaaacagccagcccttttaatgtcatttgaaggtaagattttatgtcaccgggtgaaagaaatatgtttcggtctcgaataacagcttcaagatctgtctccataaattcaaacacaagatgcaagtttcctttatgggggaatgcgtcaattaactcaattatgttaggatctttgagctcttttagcagtttaatttctctaagtgctgtaacatttacaccttccttttgctttcccaaacgaattttcttaattgccactgtttgtcctgtctgcaaagtaaccaaaccaagatttaatttgtaaacactaccaagctatgcaacaacaatcaccaaaagctatataagagttgcaagatgacattaatagagttatatttattctgccatttagctacctaggaacgtaagaactactaaaagcacctctacaaaagccccccaaaacccaaaagaacaagatctttcacaccagacacgacccagatattgcaaccccaaacttaaacaaaatccaataagcaatacctcgaatcctcaaattattcagcaaatagatttaaaaaataataataagaaggccaatatagagatgttgttaaaattaccttggtatcgatggctttgtagacgacaccataagtaccctcaccaagaatctcacgcttcaaatatctatcggccactttctttgttagatcaggttctgccatttttttttattattattattattctatggaatttgtatacgtatgggctaaaggaattactataaactgttccacttttcagaaaagaggaaaagaaaaaatcaattatttctataggctgtatacaggataatttttcagacaaatagttttgccgagaaaaattgcacttgtaaaagctatcaccagcgtatgaccattatgcaatcttccactggtttccacaagaacaaaaacctgcaacagaaacgataactatgaatccaaacaaagaaaaagcactttttatccatgtaaggaaaacaaaaccaaaaaaaaaaaaaaacacatgtacgaaaaccacacaagctcacacacccaatcgcccaaaacagattctacaacttcacccgattaaactacgaatgaaatgattcatcatacaaattaaatattccacaaatatgaagcaaattaccaaagaaattcggggaagacgctgtagaaccctagagtgtgaaagctatgaaaagggagctgaagagcgcggacagagagagagatagcaatgcgctatgaaattgggattgggatcgagattgagcttggaagagcggatttagccctagaaaaatgaaatgaaaatgatgtaagaagagaaagaaaggttcatagccgtagtgtttagtcggaacggtaaagaaaaaccagaaccacttcactcaaaaatctataataatataactagttttattataaaaccaaggtggagctggaaaaataatatataatattattacattgaccaattaaaattttgcttctttttaaaataactaaaatatccctatgacaattgtaacggtatctgtgtaaagaattaaacttcgattacagcaaattaaaattataggaaatttggtttataaaattgctttgtgtaatttggctcaagctttattgacagattggactcgggctcaagattcaacatttaattttatggttgcattccttacttgatgtcgatagtgctgaaacttgggccaaactagctgaaaacacattgaagattaatgtagatgttgtcattttttcaggaactgcaacttatagctttgtaagggtgattagtgatgaaactggcgcattggtggaagcttttacctgctgtcggtcaggggtgttgcaacccgaaatggt

SEQ ID NO: 36868 - DNA, 3707 bp, Cannabis sativa
  modified_base (41)..(79): a, c, t, g, unknown or other
cgacgctcttccgatctaatgttatttctgatctatattannnnnnnnnnnnnnnnnnnnnnnnnnnnnnnnnnnnnnnggcataaaacccaacaatgccttcctttctataacattttattgggtaaaatatttatgctcaacacctacctgaaaatgtattttaatggcgtgtcaaaaggtggtgcaaatttagatttagaagaatatttgctatgacatatgcagaacttgcatcactataaaagtttcgcttgttatttatttttatcctattttttattattttattagtatattaactctaatattaaattagaattatttatatttttatattattttatataataaaataattataaaattaatgatgaagttataatttttttagaattttaataattattaattaaatatgaaaatatttaattagataataatattaaaaaataatgtaaatatatcacaattttttttttaaaatatagtatatatctcccaaaaaagatggtgtaataaatatgttttctttttctttctattctttttagaggtctctctatatgttttctaatactttatggtgtgtttacttgtgggaatagataatgggaataaagaataggatttgttagcttgttactcttttaatttttttaaggaatgagaaagttatatgtgggttctatactaatttgtgattgaggaatggaattggcaattccgtgaggttggtaattccttgaagttggtggaattgctactcttattcattctaaaataataaaatgtcatttaatcttttttaattattttttcaactaaaaaaatatttcaatattgaaattatagtaaagcgtatttttttaacttaaaataacctattgtaatttcaaagtaacataaattcttatttatttcgatttggattaatcaatattctcatttcaagtaaacaaatattctcatttcgattaatcaatccaattcctagttaattagactcttcctcatttcgattaggattaatatgtttccttttgcaaagttgctcttcgttttatgatgtacttcactttacaaaatgattttgtccattatttttaaaaataattaattatgtcaaaccacatgttgttgtatagaaagattaagaatatgagcatgatattttgtcttcaccttattaattagtgttgtaatataataatatgctgaagaacttactggatgaaacaaagatactatgtctgtaattaaaactgcagtagttaattaagttttatcttttcattggtttttttcttttcttttccagtcaattaaagatttctcttcatctgtactctgtctaaggacatgttttttttttcctctaaactaaaaccattcaacactctaaactgaaaccattcaacactctaaactaaaaccattcaacaggcagtattgattacctttttatgagtgttttgaaattgaatgagttctctatcctataagttaaaaaatattttatgttaactaaattcgttgatttttaatgttcccatgtatttattgagtatgttgtatgcaacaaaaaaatcattattaatcatacaaatatatatatatatatatctatctatgtatatataaaatggaaatcttgatcgatgatcacacagttataccaattgtacatgatgattttttgggacttgagaggagactatttcaaacattatatatattatcataatttttgacacaaaatctttgattgactaaaaatgatatctaaagaatatagtgttatattaattgtttaacatataatatcatactagattaaaataaaatatgacatgttacatattaatatggattaatatatatttggtgtaagttattttatatgagatataaatacttaaaacacatattttttaacatatataagataggttacaactcaaaaataaatttgtaaatcatgagccaaatttcataatatgttattaaaagaataaatatatttgtgagtaatgaaagcatgtggggttatcttattgaggagattcaaaactttaaataggagctaaagaaacatttcaggcgatatgtcgcctcttactgggtgacatgtcacctaaacctacatgtagtgtttttcgacatattttcaacgcatctcgaagatttaatgttttgctccaggagacatgtcacctagtgacaggcgacatatcgcctggagccttttctggatcaaaacgttgcaaaatatttatgttacatgagaacattggaattggggttatctcgttgaggagattaaaaattctaaattggagctgaagaaacgtttcaggcaacattttgcctaaatcggcgtgtgtagtttcgacacgacgtatctcgaaggttcaaatgttttgctctaggagacgtgtcacctggtgaccgacaacatattgcttggagccttttcttgaacaaaatgttgcaaaacgtttggaatttaatggggacattttcagtatcaatgagcaatgttcttagctctatttatggccctaaaccaaattgcaacatccattggaatgtgagtttcaaatgtggttcacaaaatactatagatagaagtctttggggttcatttcggtacaaaagattttctatcaagagagcaccttgctagaaacatattaggcttgataaacttagaaagctatttctattcttcttccctgagtgcttgtggttgggaatttttttttttttttttgaacaaaggtgtaaaatcttgtccaaattttggtgatttccctacttatcacttgtggttgtggtgttcaaattattctcacattatatatatgctatttactatcttgtagtttacatgttatttatagcattgtgttgtaatctttttttcatcttcatattctctattttatgtgtattttttcaatagagttgtaacattatttaatatatatattttcttatgtattatttgtcatagagttgtaatcttattgatttagtttttctaatgaagcacaatatttcttaacaaccaaaaaggaaacaaaacaacatgtgacaatataaaggtaagaaatatggtaaattataatttactattttatataatagtgatatatattaacatatttttcaatattgagatatgaatttttaatatgttattataggtaaaatatatataagagttatatatgtatgaatgtatattttatattattttagtgatatataatatattattttagtatgttacatgttaatatatatataacttgtatatgagttatgtattatttaaacgacatgcatattattgacttcaaaaagtgatcaaccgacagcggggtcatatgaatctgatgcttgcaacttgttacacaaacaagaaaaaaaaaagtaacaaaataaagagatttattatagaggttcggcccccttataatagcgagtaatgacctactcctcttttagttttattgatacctagagataatactattcagatcgctataggagggatctgatataactcagtataaggatacaaagtgtgaatcaagtaggcagatctctaatgagagagatgaacagcattagaggcatgtgagagatgaagtgagaagagagtaagagacctattgggcgtgagagagagagagaga

SEQ ID NO: 36869 - DNA, 4931 bp, Cannabis sativa
agatttattaatgtatttttgcaagtagtttataatatattgttaaaaaaattcaattttttttcagccatagatactaaatttatgtaattttttttaatgtaatttagtgtcaagctgagattcctcccagccccttaaaacacgccaagtcacgtgccacccaaacaagcaaaaccaccatcatggatttcgtcacgtgtctatttccactgttcacatcagaaggccagcttctctcttttgctgccacgtggtagtttctccattcagtaaagttgttttttcagtcctatatcccgatgcccaaataccccaagcttttaagatgtccaacattcagataccgaaaatacccttggccgccattccgaaagctcatctaataatccaaaagatcatttatacataattttatatacgagggcgaatatcgtaatgtgccttgttcatcactattgatttttctttccttttttaacggtaagaagtcccgagaaagtgaaagaaaagtctggctcaaggccattggatcgttgatgaggtaatcttcgattcttttttccattttcaattctgctcgattcttctgtgttttgcttcctgtaggaaatcggtttccttttgaagctttgatttatattttggtgttgactgtaaagttgaagtcttcatcatgttcgatcttattttattcttgtttttgtagctgggttttcgagattatagctgattgttttgttttggtttgaatgtgttagcttcgatggtgggtattaactgatcaaagtactaggcctttatttcacaagtgaagtgcatttaggacaagcgaatagcaagtcttagctcaacttcatttggagtaagtttccttggagctttattttttttcttcttcattcatgttctgcttttgtgatttatatattaagaaaacaaaaggtgggcaaccaaccatagatcaatattttctatatgtgtgttatttatatatttatatatgaaatgaaaagaaggggtttaatttgtgtaattgtttttgagaaatagtttctttcattcactgttgttgttgctgtaattgataagatattagattttcttttcttcccatgattacagttttatacagaacaaaaatgatttgtgagcttcaaatgtaggaaattcaatttcgataaatctacgttacaaagtgataagaactgagttgagtgtcatttaatatttgacttgatataagtgtgaagttgtaatattttgttggaatatagtgtcagtagattttattgttctgggggtacacacatcttaagcaatatctagctacattctacaaattaaagtttgtgttgatatgtaaaaagactttgtggtgaaattcgatctattttcttctgaagcttcaaagagatttcagtattggataacggtattgatcaactatactggggctgggtaatcatttgagtgtcaataggtacttcaggttaattctttgtgatgaaactctatctagatatctcgttcgatgcttaagagagattttagttttggacaaacttatagcccaaccatactaggtaacaatttgtgtgcctaaacacactttatattatacttcatcgtaaattgtatgtcactgactcactgtgactatttacttattactgcttatattcagaaaggatctgctctcagttttacaaggattcagaaatgggggattctaaaggatgttttctggaatattttcattcgggtgattattcatcactttggaaaagtcacggagcatatggcattgttggtgctgttgttgttgggatacttatacctgtaattatctcctctttcttcattggaaagaagaagggaaaactaagaggagttcctgtagatgttggtggggattctgcctataccgtacgcaatagtcgtgtgactgaattgattgaagtaccatgggaaggagccacaaccatggcacatctgtttgagcaatcttgtaaaaggaattcacgcaatcaatttcttggaacgaggaagtttatcgagagagattttgttgcagctagtgatggtaggaagtttgagaagcttcactttggagaatatgaatggcaaacttatggtgaagcatttgatcgtgcttgcaactttgcatccggtcttattaaattaggccacaatgtggatactcgtgctgcattattttctgaaacccgggcagaatggttaatagcattccaggtttgctacttgatgcatttctacattcaactcttgttgccatatttgctctttgtcttagtttactttaatcttctcctcaaaactcaagacaacattaataattctcggatttcagggatgcttccgacaaaatattactgttgttactatttatgcaactcttggggaggatgcgctaatccacgcacttaatgaggtaagtttgagtgacatagcattgtatgtatattttaggaaattagcgtaagttaggaatggaggcttgatggctgcaagatcatgtatttgttggaatacagaattgatatacaaatatggacccattaattggtccccatcttttctaatatcctgaaagaaaaaaaaaatggttctcatcttagaaattttacatttgaacagacctcaacatcaaccttgatatgcgattcgaagcaactgaagaagctatctgccataagcacaagccttaaaacgattcaaaatgttatttattttgaagatggaacttcaaaagaaactggagattttgaaagcatgagcggttggacagttatgtccttcactgaagttgagagacttggtaaagcaagtcccattccaccaagtctaccctcaaagaatgaagttgctgttgttatgtacacaagtggcagtacaggtctgccgaaggttggtttccagctatttgtttgttttgttatgtcttttttttcttgaccaatagtagtactaatccaaatgaatattgaatgtaatattatgcaaatacattatatatagtgcaacatgcatataaatttaaacttgcctatgtgtgtgaaaaaaatatatatctaaaaaaatatatggatctggttgagtaaggatattttccctattcataggggtcaatttttgttggaaaaatggtatttggtatttatttgggattgttgctttatcaaaaaattgatttattattatcagattaaaacatggtggtcaaaatttgttttcctatcattgtgataatataaattttctattgtaatgatcacatgtatatcttcattcattgaagaaagcttcttttgagaaatttggttggaacttaaaattcgctcctttacattttagttaaaataacattgtaaatttgatttttttccttacaagtatatattgtgactatctagggtgttatgataacacatggcaacattgtagccactgctgcagcagttataacagtcattccagaactgaatagcaaagatgtctacttggcctacttgccccttgctcacgtctttgaattggctgctgaggtactcttattttttattttacttgtgcatgttagataagaaatttgttgtaacacgtgacttttcagtctgtcatggtggccaccgggtgtagaattggttatggttctccattgactttaacagacacttcaaacaaagttaagaaaggaaccaagggagatgcttctgcattgaagccaactctcatggcagcagttcctgctatactggatcgtgttcgagatggtgtactaaaaaaggtacttaattgagtgcataattctttccacttagccttgtgatggtttcaggttcatgtatttctgaagtgttaattaattaattatttccataaatatcaggttgatggtactgggggtctagcaaagactctttttacatttgcatatgcacgtcgactggcagcagtagaaggaagctggtttggggcttggggactagaaaaaatgttgtgggatttaatcatctttaagaaaatacgctctgtacttggaggagatattagatttatgctctgtggtggagctcctttatctggggattcacaacgcttcatcaatatctgcatggggtaactatttcatattttgagatttacaagaattgaatttgaggattaacttttctattttatatattaaaaggtcaaatatgtttttatctttttatttatatgtttgtttatttgttgaacaatatacttatggcttaaatatgcggcccttctgctgtctagtttttgtatagagtgttgacattttttagagtatctatattatgctctttgtctgaacagtttgaatagatactgaaatcatgaaaaatgtggatgagtaagtgaggtacacatgggaccaacctcaattgctatgtgttgaaaggaacatttgttgcaaaagtaatagcctcttcatatagtatattaagctcaatttctttctttgtgacattccagtgctactttacttttagcgaggtagcagattgagcttcttgagtttgagtgtaattttaggcaatgatcactgttctccaatatgatttccttagtgtttttttcttgccaccttgaataaaaggcatagtactggaaggatctatctcatagagattgagagattggtgagttaatggaatttgtttgcacaaaaattattggattggaaactctaagaatattgtgtttgaagttagtggccacgctggtacccagccctaatggggctaagacgggggacatgatccagaacttgccctgttgataatattgtacttttattttaatatttttcattataaatattattaaaaataaatagtgtaatgaataatatacaaaagtattattcatgatattat

SEQ ID NO: 36870 - DNA, 4018 bp, Cannabis sativa
cattcatttaaaaaaaaatacagcgttatcagaccttttatatgtaaaagatactatagcatttttttaataattaatgtttagaatctaataaatgttttaagtgaaagcaaatgacttggagaagaataatcagatattgagtctcaatgtctgtggccagatgtcaattgccaatccaaggcttatcatcgttaatcaaaggccaataaatcaagactgattttttttgtttttttggtcatgaataaatcaagactgaattgaaatagcttggattgacttctggctttcaatttttgattcgagtaaaaaaaaaaaaaaatctcaaaatgacatgattaatatgatagcaatctagtaaaaagagtaacttcatatccgcccccacataccaatctagtaataaaacgtaccatgcaatggaatgaaaatcacattctgtcactccaaaaaagaaatagaaaaatcttataactgtagtttgaagcttatttggtcatatatcgaaccccaagtgcttgtcccgtaccataaaacataagaataagctcttaaaagttgtcaatcatggagtgcatcataccacatgggactccactcccacacccccacaccacccaacgtcacgtgcatgaatacatggttgttagccctttttaacacgtcaaattcaaggcacatggtggaacctagactagaactactaagctctcactacagaattggataatttactttatattcaaatcactcgacagcacacgtggcactgcatcatagtggtgttataaatgtgtgaagtgaagctatacatttcataacgcatttttcatgtactgtgaaaagtagtgataaatggtctgcccatattaaatctataggggggttaaaatcattggataaactatagtatagaaaaggaaacgtagtaatgtgctttagtttgccaaaaagttgagtcataaagtaatcaaaagttggaaagtgaaccaaaaaaaaaaaacattggattaaagtaaaacatcattagcattgccatatacgaaaacaaatacaaaccaagatttttttttaatattatcttttttatttaaggaaaaaaaaaaaggaaattaacgatatagtggattcacgtggtacatgtttgtgctcttgataataatatatacatagtactagtagcctgttcacatcagaggattctccttgtaaaaagcaatggaaataaataaggttatatgacacatccaagtgtccaacgatcaacatggcaacatttaatcactcactgcatcgatttctctttgtgctatcaaaagaaaaaaatatctaaatcaatcatttttaggttttctgtgttttgctatgataattcccggaaatccccacagaacagattagatactgaaacaccaaatatttatttcttatcccctctactgtacaaaacatcattggacagcatcatggtggccctcaagaaaatgcaaatttattgggtctataactctcatgtttttctaggagtagtaggagattttctttatcacatataaaatcaaagaaacaatcattcaattaaatcagcttttaagaaacagccacacatacaaagatgtattcaaatttgaatctgcaggtgtgacacaagccatgtgtctatgtctataatcatcccactagctcagctcaactcagcaattataatattcaaccatatatatgtgactcaaaacacccaggtctcatctgagtcatctcatccacgttcacaagtgtttccaatccacaaactagaccaaatgataatcatataaaacataagttgacaataatatattattgaagaccacaaatgatctcccattaggattaatatattattcacatatgtaatcatttcctctcatccaatccttttggatgtaaataaaaaaaccattaaacataattaattagaaagggaacttcaccagcttaatataaattgatgaatcattcatcaccaaacctttgaaatttgttctgttccttgacaaagcaaactaacttttagagctcagaatggagtagatataattacacatatattgccaaagacaccattataaaagtcataatcaaacaatccaagattgattcaaaaacaaattatcatcagaatactgcagagcgagctagtggtggtgcccccacactattttataatatggcatattttgttgatatttgtaaaatataatgtcgaatttatgtacttaaatttaaaataaattatgtgaatttgtttcttgattatatgtaagttacctaattacaccaaactcattataagttatggctatgctcttatcatcaagaaccacatctcatcaattttctaaagactaccttttttaccaatctacattcggacagaccaacttaaattgttttttattattaacaaataaacacataccaacaaaactcagcaaacccaatgctcctaactccccaactaatttctattctgaaaattcgccacataaagatatttccatagcaaaaacgaataaccatcatagtacaagcagcctatattcagggggaaatggtgatagacaactcaccaaatcaaaaacccattatcagatatcttcaacaaccacagtcccagcaggcacatgaatctccttgtagagacaatgatagggtgcatcgcagcccacgtaagtcccagtccagctccctttcgcaatgtagctagcatcccaaatcgaggcatatagaaacattggtctatgaggaaaccctaggccttctttcctctcctccgtcctgataattttcccatcgatcagccactcgatcgaatcgggaccccaattgatgacgtacaagtggaatttatccgagcaatcgaaacccagatggtggatcttttctcggttaccggtgccggcgttgtaaaagttggtctgcacaatggtacggtcttttcccaaaaactcgaaatcgatctcgtcttgagatttgtccccttcgagtgacgagagatagaggttgaagttgaggccactagtgttgcctccggggcagcggatttgggcgctgaatgtgccgtagcggaaacgagtggtggtgcgccaccgagatccgcggcgctgatcgtaggtgagtgatggagttagaatcggcacagtgagcgcaggcttctgggttgtagtctatggcgatctctttgaggggttgggattggtgaagtgatggagtctctgagtcgagagctgggtccgccattgcggttgtgctaagaaaaaagatgaatcttgatcggatgaatgtggaccgcttgatctgattacttttaaaaacactagtctctgaaattttgggtttctaatcatcttctttaagcaaaaattaataacaaaacaaattagtgacaacatgtcgtgactgataattcgtcactatcataataaacatcaacgacgatattgataatatcgattttttttaatttgttgggctgaggacttccaaaatagtacaaaatagacattaatttttatttttgtcaaaaattaaaattcaataataatttaagttaatatattgtttataaattatttttaagttatagtattataccatttaataataaacaggtctcatttatcataataaaataaataatttaattgataatttttataaaatataaagcttaaaataatattcactcatttgataatattaattggagattattagtaaaaaaaataacattatagagttcaaatatattgtacacataattaattatatatagatgtggaaaataattatttagaccatgatttgagcacaataaattatccaaaaagaaaatttaaataaaaaaattgtaattataattatattgtcataaaaatatagaaatacagttgaagtctcaatttgggctagttataaataagaataacctctatattgtaattagttatacattttttaagtcctgtattaa

SEQ ID NO: 36871 - DNA, 4050 bp, Cannabis sativa
  modified_base (42)..(55): a, c, t, g, unknown or other
atttctgatctatattaataattaaatctgattatattgaannnnnnnnnnnnnngggcataaaacccaacaaaaccatctctagaaggcatattttcccctttggcatcggtcattgacaagcgcaagcaccttatcaatgtaagatgcatgtgagagagcaagtgatgtgctattctggtttttaatgatttggatattcaaaaatataattagcttcatccaagtctttcatcataaattgggtgctaaactattcctttatgtcagtcatcttcttgaacttgtttctagtgactaagatgtcatcgacataaaggactaggaaagctaccacttgattatccttgggttggtaaacataaggtttgtctttgttttggtggaagttgtagatttttataatttcatcaaacttgtttcaagaatgagaagcctgtttcagtccataaatggatctatttagcttacagactttctcttattgtccttaaatcttgtaaccttctactctatatagataatttcgtcaagaattcaactaaggaaagttgtcttgacatgcatatgataaatctcataatcgataaggccgctatagaaagaattatcttgattgatttgagcatggcaactgaactaaaaatgtcctcatagtccactctaaatctttgggtataatcctttgctacaagtattgctttataagttttggcttatccatcagcacctcttctcttcttgtagatccatttgcatcctatcacccgaaagtcttcaagcgtaaccacaacgttctagactttgtttttcttcatggaatctatttttgaatccatggcgactaaccacagttttcatttgggactagccattgcttgtttgtaggtcaatgggtcgtcatcagtggtgtcactaataattatgttaatttcaccatctaaaccatagcgaattgggttattagaaaccctcacactatgatgaggtacagtgactttctaaacatgaacctctgtgatagtttcctcggttatcaaaaattgcattggttcaaccgaatgagtgagatcatcttctataagtgcagaagatgaaggaacattagttggtgctaattgaaagcatttctctagcactacttggttgtatggcttcatgttttttatatagtcatcttctataaacgaggcatttgtggaaataaacactatctcatcattagtgaaattttgtttttatgattaccaagtgaaattaacaaataatttatttcatgcggaattgttataaaattgtttgaatagaattgaaattcgttctattagaaaccgaacctaatagatcagaaatatactatagaaagtaaaattgcaaaaattaaaatggcccacaatattttatacgtgttatcaacaatccttgcatattgctactagtccacgggacaacacccacaaataagatttattagtcaaatttcaacaagtagaaattaattgacataaacaaaacataaactccctctaatgaatttttttcaagcttgatgtactcttattttctaaatgaatctccttaagacagcaaggtttgaactcccttcaaattacttaatgaatgcttcttttgtcccaatgcaagacttgtagaaattttctcttaaagatggttattgcttcctcctgatacaagacttgtagaaatcttgtcctgaagataacggtgcttgcttcctcctagagtaagacttggatgaaccttctttcgaaggttgttctttatgttattcactttagaatttacttcacataaaagtaatcacaaaggcacacaatctcatcaaggaatagcagtatcatttaaaaagaaacactctcttctaaaaattttataaaatgaagaagtggaactgttcgaccttttgttgttgttttatgtgatatttataggaataaatgacacctaaaactgagctccaaaggtctgaatacaatgagaaaacattaattagtttccttataaaaactcattaaattacgaaattttgtgtgaatagatatggaaagtgcgcagacgaaatcctaatttgtttagtcagcattttgaatctagactccatcaaagctaagttcatcccacgaatttttcttggacatcacgaacactagaataagagattaatgtagatcatatcagaaaaagaataaaataaatcaattaaaagatttaccatatagagatataatatttattacataataaaccattttattcattctatataaaaccacaatgtgagttacaatatattcccaattaacaatcatcatatgtggcgacctccaaacacggagctccaccatgtcagggatctgtccgctacatcaaacataaggagtgagcgcaccaccaaaaggaaaccacctttttgtccaatgtcatattctctgatattctcagtaccaacacaacaattcatgacacatggcattgtaattggtccccactcgtacaaacaaccgttatctcgagaattaggcttcactcaatttgccccaagtattttaccccatcagtaggcctagttgagacctttaaatcttactgagtctgggcttttttaaactcatacccggatctagcctataaatagtgcacaaccccttcatgcaaggggaatgggttgagaaattacttttctgctactaagatctaagagctagggttcttcagttagggcaaaagtacttgtataaaaattactttgaagtttttctagctcaataatattgactccttgactaaggcacaatctgtaccacataaaatctttggtttcttcatcttcaatttatttctttcttaagcttaattattttataatcggtttccaaaaatcttgataaagatcttgtaatggactttgttcgatttgcctattaatgaatatttccattttctttcaaaaaaaaaaaaaaaaagtaagatctctagctagaacaccatttagtgtagcttgcattattgatgccgtaatgccatatttttgtataattattattacctaaaaatgtgatatcgctattgatataattaagtatgacgtattatataattaatttattaactattataaaatatcactaactatttacaaactcttatttctatatataatatatatattcttggtgtccattgtgttttaattaatgagaaatactaaagagtacactaatggtgcttagcacccgtgtcaatatcactatttgttcaattaagtatctggtcccatataatttaatataatcaatcacaatgcgacacgtctagaaagtaatagacaccatgtagctaatatcaatacttttaagtaatataatatgtgataaaaggagtactgacacacatgaaagacacatgggaattggggtcacatatagattgaataattgaaaatagctcatattctctcttcgatactagtttctgccttctttggttgctagttccgagagtcatcaccttagaactatcctcaaagttcatccaaattaactaattgatgtctctatgcaagacagatcgatgaatatggtagttctctttctcaccattgttacagggcgaatatgtatatatattaatatatatataaataaatataaatatgtatgtatttcgaaaactatgtgctacacaaacattgttggttccacctgtcaaccctcaattttaatttccacgcaaattttgttccatctttgtttcattttgaagaaacagtagacttttaccctataatatacattaaaataataaagaaccaaatatggggtctaccacaggcttataattgagagcaacttttagtaaagagatgctcgaaagtgagaccaatttaatagttatttccatacgtggactttgttcatgcttatattgtttgtttaagtaataatattacgaaatatcaagagaaacatcacatatcaagtgtggattatgttgtctcctaaataaagatatttatatatatatataaat

SEQ ID NO: 36872 - DNA, 2429 bp, Cannabis sativa
ttttattttatatataaatataaaaagtgacgaatttctcataaaccattttaatagacacactttatatagaatagatatataataattttcaatggtgacacattacttcaattgagaaaaaaaaaagaagagtttttttaaaatataatattagatttgaagaaaaagtttataattttatgaacaattaaaaaattgtgcaacagtaaaaatttagcatagtatattataaaaaatatacaatatttttaaaaataattacaccccacagtaaaaaaaaaaattgaaattttaagtatagtgtaaaaacaaaaaaaaaaaatgagatactattaattatttataaaagtagaaagaaataaaacagaataagttttagaaatataaaatttgtctaaatgtagatacataaatacaaaattgcatgccatgccaattgatatatatcagtaagagaaaataaaactttgacaactattattctcatcataacttcttttacataataataattgaaataataagtaaaaatattcacatgaaaaagcttggctgctgaacccacagtggagctaaataattggactttgtattctcaagtcgaaataaatgctcaatttccccactttccaaatggaatattccaatatctttatttctaaccccacatttatccaatttaccaaaatcgtcagcaaaatatacacaattacacttacacccctcaaactctgaagccttgatcgaaaacgacgacgaattatctgcaacgaacagagccctatctcccaagtccaaaaccttacgaaacgcactgtcgtttacgtccacctcgaacacccgaaactctgtcgtttcgtgtcgaccttcaccccaccattgccgattcccttgaacgacgagaagtgacccttccgagtccaccaagaacaacatttcgatgtcgtacgggttcacgaacggcgcttcccatttcggaaggttcagatgcaaaatcaaggaagccactggatcgggatgatcgagagttagggcaaaaactctgcggttgcgatcgacggcgtagaatcggccctcgaaaagagcaacatcgtgaaagaaagtgtgatccggtagggttgtgatcttcttccacgacgagtttcctgatctccacaaggacaatcgattatgagtcgatctttcgtgagaatcaattgtcacgaccattaagccctccgacgacgcgagagtcggtctcgacgacaacaagagcttctggatggtaaagatattccgatttgggagttgaacttttgatcgatctggcgctagaggatggaacagagttaggtcgttagtggtggaggccgccggcgtcattatccatcccagagaagagaaaatcggattgattcgataagtgtgagatggtggaagaaggttgtagagcttgttgtttgagaggctgcagatgattggggcgatttgtgagttggaatcggaatggattgttcgtcggagcagcatcagccatggaagacggtggtggtttgaattgttgaaattgaggttggtgagaacagctctgaaaggacgacaagcagaggctaaaacgacgtagttttcgagaggtaagcgattagctatggagattatgagatcttcatgaagtgaggtccagtcttgctctgctgctctactcatttcttgcatatcaagaattaaaacggagttatgttagggtttcataaatactattatactaaatacaaaaacttaaaccctacgaaatcttctatcaatattaataaatgcatacaatttctattggaaggagtgattcgtggaaatgcgatcaatgtattttcttttaataataattataattctttttatggaaaatttatgataaaaaatgtgctatttttttaatagaaaattgttattacacattatactaataattcattaaaacaaatagaataataataatgagcatcttattacaatgataaatttgtgatgtattaacatattttagatttttgtaaagaaaaaaaaaggcttttttatatattaggcatttttagtagggctgttcatccgatcgattccgcatttttttgtcaaacaacatccaatccgcactaagtgcggatttcattttttggatcaaatccaatccgcacaatagctcaaatccaattcaatccgcaaaagtgcggattggatcggttactttggataagttactttttattattaaattatttaatatttataaaaaaaatatatatattttttcacataacaagcaataaaataaaacaaattatagttatcttatgtctccaacagcatattaaataaataaaatatcaaataacaaattcaaaaggaagaaaaaaaaattgtatatatataaaaaaaatatttaattttat

SEQ ID NO: 36873 - DNA, 3283 bp, Cannabis sativa
cttacaaagttggagatcggcaccgtgacttcatcatcaacaacatcatactattactatacttggagagctagctagctacttttagtgtttttggacagaaaaaggtgaccatgttttttttttcctattaaaaaattatattatttttttttcttttgtttttggagttttttcttcaccaaaaaaaaaaaaaaagaatgaagatttggtgaccaatgtatatgggggatgttaaagttgattagttacttttcttttttgggttatggatttagtttgaggaaaatttaatgggtatgttttggttgctcctcgtactcaaggagaaactacaatggttggtttcatcttcttttttcaagtgtatgatcagttgtagacaaacagcttgacagaagttctaatcactgatatatcgatcgtatataagagataaatatatatttttttgttcttgatcattttctgtcaattttcacatatttattcacatgtatatataagatataatcatcaatttgtactctaggttatactagatacatgcatatatatatattttgtttttttaattgaagaattaatacatgcatatataaatatatatgtttgtgttgttaaaatgtaatatgtatgtgattttatgtgggttcgaaagcatttgcatgctcaatttccttccaaagtttcaaattttccactaaagaaataaaaccaataataataaaagaggaaccactgcacaaatcaaataattattagtctctgagtggaatggtcatcaagtatatatatcataattatgttgttctccaacaatatcatgtattaagatttttttactttaattaatgagaagttaatccaactttaactattttttctggattcactaagaactttgcaattaattaataataacgataggaaatgtgacgtaccaaaaaagttgaccccataacttgcgcacaagtttttctctaaactaaatgttcatggccatacatatatattatttataaatttaatttttctttaatatatcaatgttactttaattaaaagaaattacaatatgtatgtataatgtactacaatatcttgtttattgaataaaatataggaaatattcatataattaacggttttttattttcatttgtaaaaatgctcaataatgtcagtataattgatacgagtctaatttgcattcttataaagtaattgaacagagagaactgacaaataacttcaaatcataaccattatttaaattctcatataatgatgggacgagtagactttatgttttggaggtatgtcaaccaatttgtaaaaaaaaaaaaaaaagagtttttctgcactgttatttccctgatattatccccatgatacagtgattcattatttattgtcatcacatcatgtaattataccagtccaaaagataaaacaaaatcagacaccaaagcttctttttactacaaaagctgcctctcatcgatccattaacattttatttatacatatatctgcctataatatatatatttataggatcatcatcaccatgggattctacgtaattgatgggtactcaaaacattgttatcattctttctcttttcatttcttcttcttcttttttttcttttagcaattaaagcttcgttatgattttgggtctccattggattctactctgtattattagttataatgataagacagttaagacttattagatgaatatgtagatgaattcgtacttgtataaatgtgaaaatgatatgtatacaaccacttatgatagagagataggctatgattaattatgttttaactaattatgatgcatttgtgtttataataatgtttggatattctttgtaattatataattggtatatatttatcattcaagtattaattaatctttctcaatggaaaattcattacaattagagtagatcgtaatatattattacattctgaagtggcaaaggaaattctatcatgaagcaaacaatggccacaagagtcactattttggctataatttggccaagcatagagaaccgaaaaggtttttatacaattatgaccattctattattactgtttttattttattgtatttatttgtctcagatgcttgatatattcacgtaaataaatgttagtggaggttttttattaaaaaaaaaaaataggatattaatgaaaagtattaattttgttgtataagaaattacaaatttataggaataaaaatataaatatttaaggatataaatgaaaatatacaatttatagagataaaatgaaaaatatgtgaaattaaaaataaaaagcctaaattttataatgaaaaaaaatatattaagaaataaatttacaaagaaaaattaaaaaatatttcaaacattatgcataaaaatataacttaataaaatttgaataggttcatgtgccccctaagcctatgtttgctttggtgtaattaataatggaatggaaaggagattacaaatgtttggttgggccttttaacttttacattgtaattttacattgtaatgagcattacaccacttgcagtaaatctcattacatgagtatgactcatgaatgaggattacaattaccaatacattacaaaaagacctttctactcttttctctcttacctctttatcaaatgtggttgacaataaataaattaaatgaggacatttttgtcaatatattaattattcatttttatttttatactaaatcaaataaaaaaaaattgattacaatgttcattacaaaataaaccaaacatggtaatagtaatcccattactattaccattacatttcattactattcctattatcattagaattacatttcagtaaactaaacaccaccttaggtcatgcgtatccttattagagtattaaataatattcttactcttaatgatttatatgcactataaaagttttacttttagtcacaataaaaattgtaattaaaagtaaaaaaaatgtgagtaattataaattttcatttctatattgtgactaaaagatctgtagctaaagtattaattacaaaaattacaatttattataactaaatgtatttttagtcataatatttgtggagactcgatttgatcgagtcaaaaggagaaagaatatatatgtataataataaataaatatatataaaaataataaaaacagatagttacccccctcgtatcatctctctctctctttctctc

SEQ ID NO: 36874 - DNA, 2011 bp, Cannabis sativa
atctttaaaattcttcttttctctttaccaaacatagtgtaatgactaatgaatataataatgcatgataatgggttacctggaagctggcaatgctctccttcaactcaacatatttaccgggggcaccagtgaatacttcagcaacatggaagggctgactcaagaatctctggattttacgggcacgggcaacagtcaacttgtcatcttcactgagctcatccatacccaaaatggcaataatatcttgaagattcttgtagttctgaagaaccttctggacaccacgagcagtgttgtagtggtcttcacccaaaatgtgaggtgagagcatacgagatgtagaatctagagggtcgacagcggggtagataccaagctcggagatctaataggtagaaatcaaggattaaaattgagaaaatagtggtatgtagttcaaaatattgatacaatagttaaacgtcaacctgtcgtgacaacaccgtggtggcatccaagtgagcaaaagtagtagcaggggcaggatctgtcaaatcatcagcaggcacataaatagcttggacagaggtaatggaacccttcttggtggttgtaatacgttcttgaagtcctccaagatcggtagctagagtaggttggtaaccgacggcagatgggatacgtccaagcaaagcagacacctcagagttagcctgcaaaattggaaatgaaagaaaatcagatcactattcactacaacttgagtttgaagccatgtatataaaaatatattcaatagtttccaagtatgcttacttgagtgaatcggaaaatgttgtcaataaatagaagcacatcttgtccttcagcatcacggaaatgctcagcaacagttagcccagtaagtccaacacgagcacgagcacccgggggctcattcatttgaccgtacaccaaggcacacttgctgtcactctgaaatagtatacacatatacacatacattaatttataattccatcaaactgtaaagaggaaatgaataagctttatattcagttaagaaaaatattatactaatagaaatgaattatcctaacctgcttctctcctagcttaatgacaccactctcaatcatttccctgtacaagtcattaccctcacgggttctttcaccaacaccagcaaacacagagaaaccacctgataaaataaattaagtatcagataaggtgtcatcaaataagaactctatcaactatgggagaatgtgccataaaaatgaaaattttgaaccaaccatgagctttagctacgttgttaataagttccataataagcacagttttaccgacaccagcaccaccgaaaagaccaatctttcctcccctttggtaaggtgcaagaaggtcaacaacctggaaattaaaagcaacattaataaaatggaaaaagagcaaaaagaaacagccctcaaaaagaatctgtgaactttatatgtaaaagttaatgaaccttaattccagtaacaaggatctgttgctcagttgcttgctcaacaaaagctggggcttctctatgaatgggcaaatagtgatcggtttctggaatagaaaaaattcaacaaattgttaccaaatactaaacatagctaagaatcaaaactacccaaaccctttgaatcatattacaattcaaacattccaatttactcactaatatcgcctctgtggtcaattggctccccaataacatttataatacgaccaagggtagccctaccgacgggaacctgaaacgaaaaacacaaagtcaataacaacaatcagacaaatcacagattcagtcaacccatcaatcgcaataaacccaacatatagcttagcgattttcatttccaacattttctaggctaccaaacagatcaaaataacaaaaagcgttcagatccagcgacattgtaggatcacgaaaaaaaccctaaattttactttcagaaatgtcaacccaataaaacctaataaa

SEQ ID NO: 36875 - DNA, 1530 bp, Cannabis sativa
atattgaagaggaggtgtgctactggaagccgtcaatagtctgttatgtcttgggttcaaaccctccattacaaatttcagagggctttgtaaagagaattcggaaagacagagttgacaaagtatgtttgctatcctatgggattttcatcattaggttcaatcaatgaaggatagggacactgtgttgaatcgagggtacatattctttaatcagaggcctattatcatgaaaccatgggatccaaacaccaatttcaggaaagaatatgtgaagaacatcctgatttggattcaattggaggaattggaccttaaatactggggacagaagtctttgtttaaaattgtagggcagttgggtaaccccattatggtggatgagataacaaaagaaagggatcatctcaaatatcctagggtcctggtggaggttaaaatgaatcaagagctacttggtttactagagtttgatgatgaacatggtatgctaactcgagtaggggtcaaatacgaatggaagccaacatcatgtaggaattgcggtatggggcatggagctactgattgtagaaagaattcgaaacctacgcaagaatgggttattaaagatgataaaaggaagaatattgaaaagattcaagttgatgatgagggttttcaaagagtgaccaaaagcaaaacagtgaatgaattggaggctccatcacaagtagttactcagaaaacttttagtgtccttactcaaaataattctgctcaggatgtaatatccaaggaccagaatatggagaatgacaaagaagcaaagcaggatgtgcacaacaacaagtccaacacaagagaggggggaggtccctctcttgttaatggataagttcctttgttggaatgtccgaggagccaataaccaacaaaaacaaaggctaatcaagcaatttattagctcacaaggtgttggttttgttggcctcctcgagacaagggtcaaagctccaaaacttggaactttgtacctaaatgtgtttacagggtggtgcttctcctctaatattgaatggcatagaggggggagaattgttatagcttggaacccattgagatataatgtggacattcttaaatgcacaagtcaacttatgcatttaaaagtgtccactacagatgctcactacaatagctttttaactgttgtatatgcctacaatgatcgaacagggagacaagagttatggaaggatttgaatggaatagcaaaaaatgaaagctggctcttgatgggagatttcaatgacatcctggctaaggatgaaagaattgggcacaaggtgaaatatcaagctactactgatttcatggattgcattatgcaatgtcatttggaagatgttaaagcaacaggcagtttttttacctagactaacaaacagcaaggggatgatcgtatctattccaaaattgatagagttatggcgaatcaatcttggatagacaatcaccctactcttggatatattttaccaggatcta

SEQ ID NO: 36876 - DNA, 4624 bp, Cannabis sativa
tcaaaaatcttaaatagacaaaaatgtagggttgaaaatcatattagataaaaaaatgtgggtaagttgagcaattaattgatttatttggtattggctaatgggtttaaacagttggaatattatacataaacccttctcttctcttctctcccgtactgtactttctctactccttccatggctgtaggcgtggacaagcctcaagaagaagcttccattgcccgtttccacaaggtcgttctcagctgggactatttccgcctcatcaaagaatctaatgtaatctctctctctctctcatttccattctcattttcgtcgtttttaatgtgtgtatatattataatactgaatcgagctctgatattggcgtgaatgacagaagagaaaggggaaattaaaggacggaagtattttgggattgaagaaagttaaggatagatatgatgatgttgatgattacatctctacatttgagcctcttatttttgaagaagttaaagctcagatttgtcagaataaagacgacgatgaaggtacggtaatagtttcattgtgtaaatcattaggcttttctttttgttatctattcaatgtttttgtttgaaatgtttgggaaattttgcataattaacaacatgaaaatgttaaattagtaaaataattgcattgtacttataatgtatgattattatggtcgcaaaatgtaaatttatgatcgaggaaagactgctttatggtaggttaggtggcgtttggttggaggtaatgaaatggaaatgaaataatttttattctgtttttttgtttcgtttcattttaaagtataggaatgactttttcatgttcaatttttgtatatgcattttaaatttaattcaattctttttctatttcttccgaccaaacgccaccttagtgtagtcttctgtcactcagtgcgaccaaatatggttattttgcaaatgactatttttaccaaacactcgaaatgtgtcactcaagcgccaccttattttgttttgattgtttttttttttttggtataataatgtattgggcattgtggaattgcttgcagtgacagaatgggagagcagagtggttgtggattgtaatgaggttgatgggtttcacttagcagttgttaattatgctaatgaagaatttatttctcagaatgatctattgcttctttctaaagtcaaggtgattttttgcatctcaattcaatgtcttcttttgcatttgagataataagggattagtattctcaattacagattagtgctttttctaattagtttataagtaattagtactattctcatatcaggtttttgattttttcaaatccatcttcctttttatataagttatgtactatatttcaagggtgctatattctattcttaaacaacattttattaagaacgcaaatgcttttaactctaggcactgaaattttgttttcgagatcatcttgactatgttatgttactcaccaagatgatttttgaccggaccaatgtgtgtaatgggtaacacatttgcactttggctcgagggtcctgctgtgtttgaaataatgaaatcggtaggtatatctatttgaaatggattggggtacttatttttaggcattgtatgctgctgcagtttcaagagggtgcaaaacttccaacagcatatgtatttgctttagtggaaagttgccaaaacaatcgtatcatacttagaatgtatctggctggagaattcacacctgggaaaaaagatgtcattgagatttcttcaaggctttcaagtgttcggtccttgattacatctaacaatgaagcagaccgacttttttacagtatgaaggtaattcgaagctagataaatagtaacaaaaatagctcagccttttgctttgttattgttacaatgctcttatatcgtttcacctatatggaagcttaactatgccacacttagtattataaagcacatcttctgtttctgctattctgaattattattttactgttacgcagatatgcagtttatcaactattattcgtgagtatgtagctctgcaatcaattggctctctcccttttaaggatttgataataacagcaactgaaaagaaaattgatcttgaagatcatgcttggaaaatatctagacctctggaggaatatataaaagacactcttaataattcccaatgggatgctattcaggttagtaactatttatagtcataaatgcttacaaatagtactattatatttttgtgagtgagttgtacttgtgaattaattgttgactagctttacaagtttacaaagaaatgtctcctattttcattttcttggaaactctttgctatgtatctcaattataataatttggaaaagagtttcaaaatttgttgacaagaaatgtgtattttcttctgcaggcaggtctgtcacgcaagccttttgttctgatacaggtttgtgttatgtcttctcaaaatttcttgttcactagtaaatgaaattgcgtctttcttcattttttaaaatcttaaaatagttgtattctttctctgacattaaaaaaattagttggaaaatgataataatatgttagagacttgagagtgtgaaagtagctgaaaaattgggtctttgccttgatattagtgcattatgtttgaaaaagaagcctgtgctaacttacttttggtaattcgagaatatcttttcatgtgcattatgtggattgtgaactagttttttcatttagggtcctccaggaacaggaaagacacaaaccatccttgggattctaagtgcgatattgcatgcaactccagcaagactgcattccaggtgaagattattgtttatcgccctactcgtttttgtcatgtgttggagctgttatttattgtatggcttacatgtctgccatttttgttatccttcttgtgcaggcgtggattgttgaacgtaaagcgtggaccaaaattatctgttcatgaaacgtatgtgttttcttattgttaatatcttcaataggtttttaagcatgctagtaaattactaaattcttaacaatgcctttatatatgtaatgtaggtacaatcattggggacgagcagctccatggcttggaggtaataatccaagagatgagatagtgcctgttgatggtgacgatggttttttcccaacctcaggaaatgaattggtaagctctccatcgtccattgcttgcttcgtgtctttgcgattttaaagaaatctcatctttcaactacatgaatatatgcagaaaccagaacaagtcaattccagccgtaaatatcgtgtgcgtgtccttgtatgtgccccttcaaactctgcactagatgagattgtattgcgagttttaaacaatggtacagctccgccttacttcctatgtgtgattcggttccttggttctttgctaaatgctgcttgactcttctttttatactattgattttcttctcttgtttattgattttttttcaaaaatcttgatatgcatgatatggtactaaattattttgaaggccttttatagtacaatttttttttactttttgatgttttcacatggaagaacttggagcctcatctccccttgggtgtctatggcaacatttagcatgtaccaagactttcttaagatgtatacaattcaagaaattgaatgtttttgtacagatagttttcgccgtacatcatttcacctgcaattaactgctagtgtttgtgatgaaaatggctttttagttttaagtaacatctgttataatgtaatattgttttgtaaatcttcaggtgttcgtgatgaaaatgatcgcgcttataaccctaaaattgtgcggattggtctcaaagcacatcattctgttcgtgcggtctccatggattatttggtatgtctgcacaaatcgatcgttaacaaactttatttagttattactattatcattattattcttcagtgtggtgttttcaaagagaactgtcaatgagtgattgcttctacttttgctttatgttctacttaaaaaaaagacttgaatttgttttgtagttaaagcaaaaaaacgaaagcatggaggttgataaagagagagttggagctgcaggaagggatagggatagcgttcgtgctgcaatcttggaggaggctgttattgtatgcaactttaacttaactaagattcaattgtaaaggttttctctctgaccatgttcttcattcacaggttttctccacgttaagtttcagcggttcagctcttttcagtaaatggaatcgcggttttgatgttgttataatagatgaagccgcccaagctgtaagccctgtaatattttctagtttaagtattagtcctctgagtaatctcacttaccgtctatatcttttgtttgatatatttcgaacaggtagagccagctattcttgttccgttggccaatggatgcaaacaagtatttctggtaaatttccggtgctacccttttattataactattgttaacatgttgctttcataccaaggaacttttatctcttatcttgctactcacattctgt

SEQ ID NO: 36877 - DNA, 2621 bp, Cannabis sativa
  modified_base (2360)..(2371): a, c, t, g, unknown or other
aaaaagaaatgcctaaattgtgagtattaaaatagataagggtaaattcttaaataatttaataataatagttattggtgcaaatatttctttttctatttctttttattttttgaaaggttaagttttttttttttttttttcaaataaattgaaaaccaataccattgagggctccatactacacaaaaatatttttagaaaaatgtataaaatgattacatcgatcaattcctattatccaataaagatatttatataatatatttaccgaaagaaagaaatattatataatttctttttcttttttctaacattcattatgtatataatttctatcttctaaatatctcccaaaaaatatagtagttaaaaaaaattattaatcaaataacttcaatcataataatagataaaacatcagaagcaataaaatttgaatagaaacaagagtcatattattttcagaacgaaaactaacttaatagattttaagaaatctaaaaaatccttacattcctaacttacactaatcaatttattatacacgacttaaataaccactaatcaatttattatctcaatcaattaaaatatagtaattagttacctcgagatgtaaatataagaatatttttttaatgagtagtcaattgagatacaaacttgaataacaataactagcattaaatttttgtcattttagaaaggcaaaaaaataagttataattaatcactaatgtgaactctttattagaaaaataaaataaataaacagaccaataattaagaaaagagactaatgaaaatttgaatatgtttaatcaataattgatactttattcactaccacccataatgcagcatcacttatatataaatattttaataataattatctctaaatcatattaaaatattaattaaaatttccaccaataagagaaagtgaaacacaatatattattatagatatataattttttttatttatttttaatcttgttgtgtctagtggatggttggataaatcaatattactactaattaattactctaaagtccaataaattcaccagaaattatgcttaaaagtgcaaaacatgatattgatcataattaattaatgcccagattaagacagagtggtttttattggttaaagcctttaaatagtttcagacaaatttgactaattaagatgaagataacgatgtgaaacattaaaaataaataattattaattatttttttatttttatatataagataattaatcaacattattaatcattaatttatatcctatgaaaaacttttccaagcttccatcatacaagtgattatgattcttcatattataataaatatacaattaattgatagacttatataaattaattaataaataaatatatttttcttcctctttatttttggtcctttcattcttacttgggctcaatcaaacctacaaaactaaagaatagatataaatttgtgtggactacgaaattggactaataattaaatattctatttttggggggtttttaagcaaaagaaaaatatgtgggttgaattagtttagtaaaaggaataaggatttatttatttaattaaaaaaaattctacaatgcacccctttaaaagccttctaccgataaaccttacatttgtttcgacatttaagagaattttttccgtttatttttttatgattgtctaagttgtagttatttaagacatcctacaaacagtttatttcgcacgcgtataaaataaaaaaaaaaatcatgcaacaaattgtttaaattctatttttagtatgttaaatatttttaaatcttttacaattttgtaatattttaaataattataacatagattataaaaaaaaaattaaattaaaaaattcttaaaaaaagatagaacgttttagaggtccattatacaagcatccaattaattattattattattattattataggatatgtattaattatgggtaaggatgaaacagctaattatcatgcagtgtgtgcacattttcttatctaattattcaatctattaattataatatttagagctacttaaatttttattttttataatttaattcacacttaatgttgtttatgctgttattactctttttaattgatttatgtaccattttaatactaaataataactttactcataaattataaaaaatatttatatataaactaatctttaagtgcatagttatagatataatttagtggtaccattactatatattttcgaaattctgagaagctagaggttctaaatttgaattgttttttcttaatttatatatatatatnnnnnnnnnnnnatatatatatatataatctttagagtgttgctaagctcttattgaatttttagagtgttgctacacattggttattgattttttgtagctcattgaagtgtggtagtaacattagtaaagacccaccttgagttttgttggacattaagaaaaataagagcatatttggtattgttttctgttttttgttttaaaaaattgtttttagaaataagaacaaaaaatagtttttgaagtttttaaaacacaa

SEQ ID NO: 36878 - DNA, 5541 bp, Cannabis sativa
  modified_base (29)..(31): a, c, t, g, unknown or other
  modified_base (5467)..(5480): a, c, t, g, unknown or other
atagaaaagattacattgaaatagagttnnntttagggcacaaagcccaacaactatttcccttactaacccttatactgaaatagtaccttaattcatatgtaatcatacaaaagaaaacatgcttgcagttctaagtactcaaattatagaatttcacttgagaaaatctagtaaatgatggttaaacctaattcactgacaaactaagcttccaaatacataatctaccacatcattttgtattccacctctcatcagtaagtagaatttcaagtcttagtacatcctaatagtactagctttgtaacgatttaaggagtgatgtaagttctcctaaagtctctcttatgagctcacactatccgagacacaaacttgagtttattaacgaaacatcctgtgatctgacactaagaattatctgatttggcaagcttaaaacttctttttgagttttcactaagttgtatccacaaattgagcacttctatttttgtctaataaatctagttaaagtgctaacttactgagtttacccaagcaaactctaaacttaacctgaccatgataatcgttaactgaggagaaatcatgattatactgaaaacccgcctgagacattttctacctcgggttccatctgctagattggtcttccctgggtaattatttttttccccttcatagagatagttttgtcaaaacctaaaagtgaaatcaccaccacaagttttaggtggtaaattggttaacgttacttatgctccttcaattgacaagaagaataagcgataaccccaacattttccattataatgcactctagatcctaactgggtgtctcacaatgcaccctgagtttccttgatatgatgcctaagctaacactgagatcgtaatcaattattgcttcagctttcaaatctaatttcatatttgtttggctatacaaacaatcatttcttcttgattaacccttggtgactattcttggccttagccaatctttatcggataattcttttttagataatatgtgatcccatgtttaccaataatgtgccttagaaaggcactcgataactaaaattcatagttcttattttgatatacacagtctatacttcaatggtcgctagaaaaccatctatagatgttactcatactttgcttctgcttgaaaatacacaatgttatcatcgatatttactatagcacatccatcgagaaaatctatgagtactctgaacaccaaatccttaagagctaccaaagcattggttagtctccaaagacataaccagagattcataatgaccatatataatatgatagttctaatctaatgatagcccgagtgtggatcagtctatctttctttaaagtcaatcaaaccaaccgtcgatcctaagtagagggtacttattcttttttattaacctatttaattcttgataacaaatgcacatatgaaatgagccatactttttcttaacgaacaacactggaactttctagggcgatacacagggtcgagtaaactctaaatcaagcatctcctaaaatcataactttaattccttaaattttgttggagttactttgaagggtgccctagaacccacctatactccaatagctaaagtaataataaagtctatctttattatagtggtaatcctaaaagctcttctagaattacgatcaagaacacttgtaccactctaatatccataggtcaaaatacctcagctaggtggtatctaataccatcgttagaaattctatacatccatgccacaaaaggtctctaaattttatcatcatgatactaggagtttgagtacttcagtccaatatcgtaacacaaatgatccttcttcttcagttaatagttaccatcttccacttacaaacaatactagcgatgtactcatacaaaaaatccattttaagtaatatcttaaactctactataccgaaagctacgagatcagtgttcaacttctattcttaactctaattggtatagacctttggagataactaattctctgccaggtaacagggttctaaaccctatttcatatctatctcaaggccacccaatttatcaattatccaaactaccacatattaatgtgtagctccaaaattaattaacatagagtaattagagtagttgactagaaactgacctaacacccctgaaggactatcttcagtattgattcgggtaatgacaaacacccaaacttggagtgggttttgcctcttattctggttccgtcttctgcagttgtgggcagtttctcttatagtgccctaccaaactacattagaaatatgtcttacgattacactcttatggatgattcttcttgcatcgagggcattctagataagtatatgacctccaaggtcaccctaaccaggttttctatgaaacctcttatgctgactcaagcccactgatggagttttcctcttttgactattcaaggaactagtaccacctctgacaagattggaagcaagagaagtagtatccctatcaacaataaaagttcctcgagattcctaagcaagctctgtactgctcgcggtttgaggggtattcatcatatctttatgtcccaaagtaaccaaaggtttttgcattcgataatttccatacaagggtcctttttgggtaccaaccctaaactgttctatcgacaactctagaattaaagtgacgatacttgaggtgatgacatagcagagatccatgttgtttcaatctcttaatctcctcctctaactgttgaatcttaacttccatctctgcgaatatttgctccaattttagcggagcctgcagtggattttcataaccacttccataagtcctttctcggcctgaacttcgaccttgggaactagggggatcctaatctctccattcaccataagtgccaactaaatcatcccaactcctcctatttcgctaggcatccatttaaaggacaagcctacaaattcatgagttcgctagattaggaagcaattgaaattgtagtctacttatcgtaaacatgggaacttagtacttatacctattcaactattaatttgctaacatgctccctatcatgccttttctaatcacgcatatcagctaaaattactaaaacatgtagaaccttactgaaccgagagtcaagcttatccttgatgatgattgtacatatcttgacaatcttcggagaacaacctagcggctctgataccaaattgtaacaccctactaaattagaggtgttcataattgttgtgcacacctttgctaatcagagagtttattgaaacacatggataattaaaattttcttaaataactcaaactttaaaaataaatataatttatctaagtgttggatcccgttaaaattttcataagtttacaaagcacttgtgttacaaaagttgtcttttatatgattactaaaacggtgagcctaaactatcttgaagaccctaaacgctccaggtctaaccgtcttgatatgtacaatcttcaccctagctttagactcatcccagttcgattctaactcttacctgtacatacatgtaataactgttagtcgacaaactgagtaagaaaagcataatcatatcataacacaaaccggattataactaggtgcccatacacccaatcataatcctatcccatgtcccatacgtactgagtctagaacgtttgtacgacagtactatagaccataatatcagcctatacttggtactctattcgtaccgatatgatagcgtcaatcagtatttatgccaaacatacattaattgatatttaatataactctatgtatattgataccgctatttcaatgtaatctaacagacattcataaatatgcacgctaaacatgtaatcacatatgcatattattatactaatcttaccttgagtctgaatgcaagcgtctcggtaactctgagtggaaactactgctcaacgatttaaggccctaagtcacaatttacgtaaaactggtaagtgatccgctaaatcacttttggggacttaaacttgaaactaacgatttccttatcgataactagtgtgactaaaccctacacataaaataaacactaaaaggaaaagtaccccaaaaaccggtaggctatttctgagcaaatgacaggccattttttgggttttctgcctggaaaaacggtaggctattttacaagaacaacctgctatttttacagcaggttttccccaaaatcccaaaactacctcaaatcgaatccaaaccttcccaaaattttgagaacatcaataatcatatttcaacaaataaaagcatccacaaagctctgaatcaaaatctgccattgttgagctaagtttgagcttaaaactcaaatttagctgaaaccttgccaacaacaaacaatcttcccaaaacaagctcaaacaaacataaattaatccctagaactcaattctattaataacctaactcaacagaaccttcagcctaaaattacataatcaaacctaactttttcacttaaaaattgaagagaaaaaaagtgagaagaaatttacctcaaccttggctaacgaaattcttgaattcctttgctgaaatccctactgcttggtttgaaattggtgaggaaaatcttggttttccttggttccttggtttaaccgaaaaagaagagagagtgaagagattggataagttttgtttgctattgactattctaccttatacctaattaatatataccttaactaaaaaattattcagtaaaaacattaactaattaatttccatctaagtccataaaggacaaaattcacctattgggcaaatttcaaaaattgcccttcttcaagcttaagtcatttctaggctttaggggtaagatggtccaaaattataaccctcgataatcccgacattatcaatgtctagatatattgccctattaaccccaagatattcaatcatacataggtaactctattggccaaatcatcgtattgcactaataccgggcacaaaacatgaaaatcataaaatttcatatacaacatatataatgcatctagaatttaaatatattttcgtaattaaaaaaatattttcttaaggcgtatttttggaaataagccctaattctactaagagacatataatcataagtaaatctttaattatttgttaattctgatgatttaaatgtgactatgtaaagaacaagttgaaggcttagtctcaaataatcacttaattatccaattgggtgcagagacccgtcatctatcttgaaaaaggaataaaaagcagaaaacattattcttggacagcctagaaccataaatcctccctaggaagtagttcttacacaatctccttgtaaagaccgcttagtttannnnnnnnnnnnnnagttaattatgtttaattatggagaattatttatagacatttaaataattatttatgctgt

SEQ ID NO: 36879 - DNA, 6912 bp, Cannabis sativa
  modified_base (128)..(149): a, c, t, g, unknown or other
  modified_base (260)..(263): a, c, t, g, unknown or other
  modified_base (3720)..(3721): a, c, t, g, unknown or other
  modified_base (6267)..(6278): a, c, t, g, unknown or other
tataattgtattatatgcattagagttttaaattattattttctttacattaaaatactatttatatatataattttttattattatttttttataaaaatgcgtggattagattggatcggttactnnnnnnnnnnnnnnnnnnnnnnatccgcacaagtgtggattttgaattttctaatctaagtcattccacacaagtgcggacatctgtactttgcagattgaattggactggatcgtgcggattggattggatnnnntattttatgaacacccctaatattatttataaaaaaaacaaaaaaaaattcacataactagcaaaataaaacaagttattgttattttatatctcaacaacaaattaaaataaataaaataacaaataaaaaatttaaaggaaaaaatgtatgtataaaaaatatttaattttattttaaattgtatgcagaaaaaaaaatatatatatataagaatgaaatatacatttgatctattaaattttgaaatatatttctactatatgtattagacttttaaataactattttctttacattaaaatatatattgtacatataatcttttttatttttttttataaatatgtgtgaattggattagatcggttacttttacatgtcaatcaacatcctattcgcacaagtgcgaattttgaattttccaatccaatccaatctgtacaagtgcagatatccgtactttgcgaattgaattggattgaattgtgcagattgaattggatcgactattttatgaacacccctagtctcgggcccaatgtgcattaaaggattgtcatatcaataagcatactgtcaattggaatttccatggaaaacacaccctctgcaggtgcgtgatgactacatactcatcaagggcacttcacgtgtgcagagttagttgcaccttgcacacgacttgctgacccttcaattattgaaggacaaatgagaaaggtgcttctgtgattcttaaaagacacccacgtctcaagaatactctccaatgatctagaagaaggttgcaagcttccgcaattcaagaagtctcagaagcttgggggtaaatattatctgtatttttggacgagggacacatggtataaaatgagaagcacaaccttaaaacagtcactaataaagtccccctaattagacaaggtcatagattaggcccaagggctacacgaagacttgccccgcaacatactgccatctgagacccggaggcctaatcatttctccagaacccaaagaagaacaagcttaacatatgtccaagcgacacctagaagactgctcgaagagccaaacacagacactgaccgcccaaaagaagtcgaacgtctatcttgaagagagactcggatcgccccagctatagttatacctttgtctgacacaagatcaaatcttgtcttttgtgtcagaccatgttagtgcgtacactccacctctaaacatgcctttttttttttttttttttgatagtttgtctaagcatcttcttttcaaggtgaaaccttttggcgccacgtttcctgtatgaccaataatccccattgtctcggtgcctctccacacgagcagaaaacttcttgggggcccaacagtcatttatttacatgtattttaccccaatagtgggcttattgcaaaagaccctaggcgggtcatggtcatgtccatacccgcactttagcctataaataccccttgatttttatacaagagggggatggaaagagagatagctaaagctctaccaaatttcctctaagctttcttcttttctaagagaaactaagagtgtagagttaggattttttacaaatactattgtaaaaacattatacaagcctcctaaggccaatagactgactcgtggactagggctcattaacgcctgaaccatgtaaaaatctttgtcttcttcgttattgcatttaatatttcttaagctcttatttaattagtttttaaaaatctcggtaactgagaaagaagataacctttgggataaaaggaaactttaataccaaaaaaatagcgtagataacccaaatccttcatctcaaactaagaagttaattctgactttaacacttcaattccctgtaaatcatctcctataataatcatatcatcaacataaggaaaaaataatatgatttgcaaatgtacacttgacaaataaagttgaatcatgatcacctgagacaaaaccaagagacaaaataactgtagagaacttctaaaaccatgctcagagagcctatttaagaccatacgagaatttttttatcttgtgaacctcttcttgcctacaaggaatactagaaggaggaagcatgcaaacctcctcatataacttttaaaattgttctaacagagaagcaaaatcgtaagagccaaatggaagaatagttgcagcagtaataaattgtggaggttgaatttggttgttaaactgtggttggttacccatatgaggaggcttggaatgatatttcaattgttgcagagcacgattcacaagcttaaggcattgagctttccaatgaccatctgtttgcaaaagggactgccaaaatagaagaattaggtgttgagagaataccttttcctaattgagacttgagacaagttacatctgctaataattcactgaccactaaatcaactgagggaagcggagaatgatgctacatagaatcacgaagttcctcaaaattactatgaagagccattaaaaattaaactaattattgttcctctctacgagcaatgtacgatgcaaaagcacgtatctctgttgatttggtgagtgccaattaatctcaaagatccgtcattacaaaatagaactcttggatgctcatatctttttgtccaatagctctaatatcaattttcaactgaaactgctttgcaaaattagactgtttatacagtctcgcaagatggcccaaatttcttttgctgtgtcatacttttctgactgggtaccaatagattgtttgacagagttttctatctaggtgagaatttttgaattgtctacttcctaattttctaatagatctgcaagttttctctttgttatagaaatataaccccacatttttgtttctttcaaaaaaaaattcataacataattccaatacgaatgattctttccatcaaatctcacactgatcgcttaaagggaatcatctttattggtagctattgcagaaacaaaattagttgcaaaaatttccaaataaaaaacagatgaaaattcaaaattgtatagtgaaaactaatacctaaaactattatgcggataaaaaaactttacaagaaatcaatacaaaaagttagactgtcgaactatactgacgttgtacgacaccaattgtatggacaccgcaaaagctgtgattacgcttaaaaaacttactctcataaacctagctctgatgacatgataattatgtgagaagaataactaataagaataaatagatgtatagaaaataaagagattatgattcaattataaagttaaaagtaaaaggctaaatactatttgcaccatgtgttttgcaaaagttacctattggacctctattttattaaatgataaaacagactctctattttctaaaattgtacaaataggaacctgaactgattttttgtcaanntaaaacttaataataatctgatctagagatgttatgacaaaactgattacattttctgtatctgttcatgttaaaacttgtcttaaagttggttgtattaaaaaataaattgttaaaaattgagtccaatgtcttatttttaccaatttagaaaatataggatgcattttgtcatttaacaaaacagaagatccatttattaacttttacaaaacacaaaatacaaaatagtatttacccaaaataaaataatacaattaataaaaaaaaattatataagcaattaaaataactctaaataattatttaacaaataatcatcaatgactacaaatataatagtgatagctcggtaaaaactaaaaatatatcaatgcttattgagaaatatagaaaaaagtaaaacttgctaaatttctattaaaccaaccaacttatagaaaataacatgtatattaaataaataaatgagtcattagatattttgataagaatgtaggttttgtgaaattacaaaactaactagtcatacaaagtcgtcggatctgagtaagcgaggtaggtcaaaatagctgaagtgttgaacccattgaagttggacccagccgccatggtgtaagcacccattttcgtaaacaaaagccaatcgttcacctccagttccggtagccggtaaccagtcaaaaccgtatcaagcgcgtcgcacgtgggtccaaacacagtcgagtcatacgttatttctccttcgcacgtgggattggcacgctttgacgagcacgccagaggtacgcacgtgagagttgcgtggtcgtacagtaagcaattcatggacccatagattccgtcgttaatccaatactctctcaaatcgcctcgaactcgcttcccgataacgttagcggctaaagtgaacgccgtctccccgaagaaccgacccggctcggctatgatgctcaacccttgagaattggggaagtaagttctcagagcggctcttacgttcgaagccgcttcttcaaacgtctcaccggatgtgaaacccccgccgatgtttaacactttcatttgttggaacccgagccgagccgctgtctcgaatacagtcttggctgcctctatggcacctctgtaagcacccgaatgagtgtctccgcttccgatatggaacgatacgccgcagacggtcagtcccgctgcttgagccgctcgaaggagaggttcgacttcatcaggcagcgcgccgtatttgggacccagtgggcatcgggccacgccatcatccggagctttgatccgaatgagaagcccacatttggggtgccactttcggatcttctcaacctcgtcttttgaatcgaatgtggttaggttaacacctacggtagcggcgtacttgatatgggcctcaggtttacatgggttagcgaagacgatttgggccggggaaactccaaggcccaaaaccgtttgaatctcggcccggctagcgcagtcgaaacctgagccaagtgcggccatggcacccagtaaagcttggtctgggttacatttgacggcgtagaaaggtttgacggttgggagggtacgggtccactcgtccatgagattaacgacaacccccaaatcaagaacataaaatggttcttgttcttgtaattgggtgtcgttaatgatagtttgcatgaaactaatcaacccattattatgtttatcgataggtgtaactttcttccctctcacacctggtgagcccgaaataagttgcaggctcatgattgggttcgattgtccattgctgcccattctccccaaccctacgtatgaaaaaacaaggagaagttggatttggtttaggacgtatttggttggaacatgtatgtagtaagtatcatgtgtatatgaaggtaataattatttatttatattataggagaagcaaaacattaaaccggtggtgccaattgtttttgggttggtgacacttggtgtgaaaatttggaaatgtgaaaataatgagatgaaaaagaaaaagaaaaactagacaatgttttgagtctagctactttaattttcaaattcttcaattaagtgagatttggtgaataatagctgaatggtataactagggctgtgtttgggaaaatggggccttagccgatgtaaattaattttttttttgataagaatagaattcttaaattaattacataaatgtgactcgttttgcatattttgataacctaacttttagaaaatttgagatattaatcgtaattagaatacataattaaatatagggataattacatgacactattgtttgtaaaaaaattacatttttatgtttaaagaatttaattttatattaatacgattttttataaaaacaacacgaaaacaataagaaaactacataaaaataatatctaaataacattaaaatatcaacaaaaaataacataaagaccgtattttttgtaaataaaatcaaaaaatcgtaaaaatattaaaaattctataaatcgtattttgtaatttttttgttnnnnnnnnnnnnttgtaaaataatcccttaaatatatacatttccctacatatataaaacaataaattgaattggtctagtagggaggtgcaataccgttactagggatgcacacgatactagcaaagaattctccactgtccccatccccgttaaggattttaattctcatcctcgcttattccccataggagatggcgtggggagtcccctaatggaggcagggacgggatggaaaatctcctaataaaaagataaagtttataataaaaattaaaattcataaaaatattaaactacataataattaaaatattgcacactaattatcattcaataaattaattattatccaaaacacaacttaaaattcataaaaagatactgatatgctaaaaaatacaaacataaattataaaatattattagaaatataaaataaaatactaaatgggttcccgtcgaggtgaggagttttatccctatccccaccccgtttaacattcgaggacaaaatataatcagggccggccctgaaacaaagtgggtcacacgaaaaaattcatttttgagcctgttgctcctaaaatcgcccaatatacgtggaccagtcaagaggggacacgtggatcagataacttggaaa

SEQ ID NO: 36880 - DNA, 4005 bp, Cannabis sativa
  modified_base (3874)..(3889): a, c, t, g, unknown or other
aaaaaaaaaaaaaaaattgggtaggtgatgtaactgaaaattggtaatatcagtcatctatgtacatataccaaacggctgctttttgagttttttttttttttttggaaaatgctgtccttttgaattttgattatgtactttttatttttattatatttttgcaaaatatggatatttcatttttgtcaaccaaaaaaaaggcatggatattttacagacgaacgatgtcgttttgaataataaatataaataacctaacaaaaaatagaaaaacgtaaagacaaaacgggatcctttctcactcacttactgttttcagttttgtgtattttaatttaaaaaatttctctgctaaagagtaagagaagagatatagtttataggtatagccatggcggcagcaacgtcggattctccaatacccgattctgactctgatttcgattcccaatctaaccctaacccttctaatgcattggtccctaactcctccagcggtgccaccgtatgtctttttagattcgctggtgactcggccgccggtgctttcatgggctctgtttttggctatggtacttcactctatatataacttcctctttgctcttaaatttatgttgagttgattttcttgttctcttgagaaaaatattgagttgattttagtatatattgggtaaattttaggtgatttttattgggttaaatttgtattttcttattaggggttggggttgggttttgtgatgatatctatgtttgggtatattttcctttaaaacccataaactttttccttgcatttgggtggtggataaggttttatgggaggaaaatggcactgtgatttgtgtgggttttgttcaatattagtgctcaagctacataatgtttttgttaatggatttttataaatgtaaaatttgaaatgaccatatatgttttgatgtgtgttattatacttgtgtattgtataaatataaatatgtatgcgtttttaggtgcggggcttgtaaagaaaaaaggctttaagggatctttttccgaagcggcatcctctgccaaggtatgtctatggatcccagtatcattttcattagctataatagtattttgttgaatgagtggatttagtagaggttgcaattattattgaattcctcattttttaaatgtatatgccattttttctacttctttcagacatttgctgttttgtctggagttcatagtttagttgtctgcatattgaagaagattcgaggaaaagatgatggtatactaagtttgaatgccaaattgtttctttagcacagtttgtgctacagttatttaatctcactttcttattgtgcagttatcaatgctggagtagctggttgttgcactggtcttgctcttagttttcctggtaataatcactggcctttcgggcttacatgggaaatttaatgcttttggttttcgtttatcaaagtgaggcaatggggaagaatggaagatgatcttaagatattgtttgggaattaagaacttcactaagccaaccctaagtaaaagatggctaaaaactcttaaatatggccatcctaaaaagtttggtttaatttatattgggccaaatttgaccaagtaataaatgattttttttcagttactgccatggaaaaatttaaatggtttcaacaattattaatggatcattaatgatagttaattcttatatcaacttgcattttataaatattattgtggattagagcgcagtgcctaatgttgcctcataataatataacaactgtacagcttttttcgccaaattcaacactatcttttgatgtcttattagtcttttaggcacatcaattatcgtatgcattcatttatatttaaatctatattttattcccttgaaagtttgcataattgcccttttcatgcttgtgttgtatgtgtccatacatccttaatctcagattcacagatatcctttcatcaaatgacatgtgattagtggcaagcaattgttgacttcaatattccatttatgtataggtgcaccccaagcgcttctgcagagctgtcttacctttggagcattctcatttatcattgaaggccttaataagcagcagccagctctggctcatcaattttctgcaattaagcaacacaagcactacaatgtccgtccgtcgaggacccttcttccccttcagttccctcttccgaatgaactcggacaggcgttctctatgttttgcgagtcgttgaagaaacacaagaatggtcctttatccacagccagttaagaagttctggtcgtgtttttgtggatttccttgatcattgtgttttatttgtgtggtggtactaagaggagttggttaggttcgctaagacagaccatgatgtagtttgtaaatttttagtcggaactggatttgctggtaataacatctttttctatctagctgtcattcttgattgccaatgccaatgccaatgccaagagctttttttattgggaaatagtttagaactttatatgtaccttccactcttgatatttggactttatatccaaaataaaagttgtttcggacaaaatcacgtgtataattgcagcataatccttcaaaaaagatacgcatatatattgcagaaaataaatattttaatattataaaatcagatcaatatcaaaacttttttttttttaaatgaaagtcatcatttattaaacgaataaatcttttaccaagagctcggtaatagctcaaccggaaaatagtgttcaaattgaaaatgcgatcagggtgagatatagaggcccttacaaaagaatgagctgctacatttgctgatcgttttacaaaataaaaagaaacattatgcaaagtacttagtaaatccttgcaatcactaacagctttgccaaacaaggaaagcataaccacggagctacggataacttgtacaaccgaaagacaatccgtttctaaaaccacactgagccacgaatgatctttgatccaactcaactcctcccggaccccaattgcttcggccaccacaggagaaatcaaaccatggaacaactttgtactgccctctacaaaaaagccgttagaatccctcgccacaaacccaacaccatgggtagagttatcattaaacacagccgcatcgacattaaccttaatactattaccgcttggaacacaccattgctccgccccatctaccgaaatgaaaccagtgaacagtagcccattatttttaaattttgagcaacacgccattgattaaggtagtttgttgcagacgccacaatgctttcgacccccatcactttgttttgccaaactttatcatttctaccattccaaattgacacaaggccaccagcaagcttgagttatccgaatcaagcaaaacaaattggtgcatacaccagcccataaacgagacgtcctactgcaataccgtaccaataaccacccgatcccataccgctgctgcaactagacaagataagagagagtgctcaatggtttcaggagccacagaacagaccagaaaaatagggtttacattcactctctttgattgaagctgagtcattgttggaagacatctttttcgccgcgcgccacaacaaattcttcattttggaagacaaattgtcaacctggacgtcggtcagagtgctaggtgtcaacctgggcgttggatcccacttttggcctcctagaagttccatttggtctcgaaaaatagctgaatattaatcttttctaaaaacaacgaatatgtccggaagagttctctaaaaacatcattagaattggcccaggttgacaaaatnnnnnnnnnnnnnnnnggccttgcttctggtacccaggaagtcttgtttcttccccaaaagaaaagtacctatttttccatttttgatgaagatgagggagatgcatgttggaagttattttaccaggaact

SEQ ID NO: 36881 - DNA, 5261 bp, Cannabis sativa
  modified_base (3523)..(3530): a, c, t, g, unknown or other
atatatatatgtactaattaaatgtcagttcattggttcaacaaaaaaaacaaagagcaagttgagccaacttttatcatttacccctccctttttttttgggcatagttcagctttatgtaagagctttttcagaaaataaagaaagggaataattttatttcgtcttgcaggttgttgaagttgatataattctttgagagaagaaaaagaaagtcttaactttctctttattcaaaatctgtgcaattttttttacacactatcaaaagaaacctttatgaataattctttggaaagtaatattacctatttaattcattgccttttatgtaaggaatatcaaactcttttatcagctcattatttttcgttattttgtgcatagtttaacagataatttccttctagatatgttagcagtagaggtagatgacagttagttaaaacccaaataacattaaatgacttgaaactagtttattccatgacacaatggcacatcaaaagaggcaaatgggttcttaaaatgagatcatatcttcttactcttaagctttaacatgtcaaagtaattttctgaattgctttcttgatttttgctgctgttgaagaacttgatcccttgatctgcaaaagagaaggaactcactgtcatcatcaaaagaatttataatatgaaagttgaaatgacagaaagctacaaaaactgtgactaattttcttaccatggatttgattgtcaaggaaatgacaccatccatagtggttgattgaactgagtgagaatctaatttgagattgctcaaggcatccatgatttctagcaacaccccctccctccaaggacatcttatctcaattatgacatctttattcttcatattgacagctacattatcaactgaacattcctttgaaacatcatgatttttctctggctcaacttcacctatgtcacaagccttccttttgtttattaactgtttcttcccactactaattttcttttgtctgtagttgtcagatgttccctctctagcgtcatggggttttctctttgttgttcttggttctatatcagttgaatccttgctagattccaactcctcaacccttttttcaagctctttcaagtattgtatagcatcatcaagtatagaaactttgtcctcctgttcaaacaagatgtgaatgcatattatgtttgaagttaatgtcttttaatcatagttaagtaagagctgtatttaccttgtttagtgaagggaccattccctttagaattgaaaacttttcatttaatctttctcttcgctttcgttctgctaatgcatggttcatgccaatctcatcagcctcaggtctccaaaccccacttccaatgctattatcttcttgggaatcaactacgcggttaagatgcatccgaggaacttcaaataggatcttctttactaagttctgtggtgttcctcctcttggtttaaaaagtttcaataacatttccttcttccaactgacaaagcttgattcctgatgaaatttcttattgtgagtccctaaaatcaattggtgtgagctctttaagagggttgaaagaacaccctgatagtgtaaatctttggttcgcagatccactggggtcattttcatgtgattgcagtcttgaaggtcttgtaattgatgatcatctatcaattcatacagggctttttctggttcaactctttcatgatttactagagtctgagatatacaatcacttgagtccaatgaatgaagtacacaattacttaactcatcatccatgatttgccagctttgcacttgggaagcagccccatttattccttccacaatcaaagaatcatcacctggttgatttggttccaacccatttgagctgctactaggagaagacaaattttcctctctatgaattacaactgggattgagttgttgttaagaaaatcataatcaaccatggcacatgcaaaaccttggccatttcttatgcttccagctctacagtttgacctcttagaagaagctaaagggtatggagtggcagaaattgacattttgacacgctgaatgagagcatggtcctccagaacctttaaaaaaaatagtacaagagttgacatcaagatctagctcttaaatgtaataacatcgtatgtagcattttgagacaacaagtaccagatcagttgttcccagctcgatcacgccacctgtgagtggaaagcaaaccacagtctggaatacaaaacacaaatcaaaacaggttaagttagagatcctcaactaatggttagaaaatcaagggagaaagatcgttgtattagtacctgaatcgatgcgctctgagcaagaaagtagtcacccaacatggaaagaaagacacagaacaacaagtttgtcaagttttccaactcatatgaaaaccagaaaacagtaatttgatgttacaattcagattaaccaagaacaaaaaagttaccttcgcaagaagagagcggccaaatactttgctttcagcatagtgagcattgtatagccaaacaggttgaccatttgctaaagttcttcctggcaacctatagagaacaaaaaacaaatattgtatgaggcattatcaatattcagtaagcttcaagtcttttaaaatataaatatgtattgaccactgcttaggatagaggattaacttcaaagtaaaagggtgaagaagagttattatacccttggccaatattgaagacaaatgacatgcaaaccaggtagtaccactcagcttcagataagtcttcaggagataatgctgcagagggccttttggcttgtggactggtttcacctgcagagagtgactcataaagctctctcaattgctcacttctttgaaaacccatttgatcagcattaagttccatggcttgtactgtttttctggtcttaatatctccattgtaatagccatcaccccactccaacaccctgcacatttaacaaacatgtcagtttagttgatctgttgatggtagcatatttgtttgtaaatataaataaagaaagaaaagaactacttggaatgaaacaaaataaagttaaaatgtcgaataagtatcaaatcttgatacccttttgttttttttcatgtacaaaagaacatttcattgaagattaaaggaggccagaaagaacaacaggtatggccaccttttctatgatttttataggatcttagacattagacaaaacccagttccttcaacaaacaaaaggactaaaaagaaagtaaaccataagaagtgggacagtccataccctggttgtgtggatgaaatggaccagaagatagcataactccactgaatacttctcacagcaagagcaagctgtttcttgaagttattttgcagtgacaacccctcctcgctttgaaacccagtagccatattcaagcatgaatttttaagttgaaaatcttttaaaactctctctctctctctnnnnnnnnctctctctctctctctctccacaactcaacaagaacaggtgtcaataacttgctgtgctatcaaatcctacctcttcatttccaagaacccaaatcagattctttccttggaaaacttcccctcagagaatctcaagatatattatcctaaatgagttcgactcaacaccactccagcttcaagcaccaaccaaaataaaaaaaccactattccaaaaccaacatttttatctagagaaaagaccctttatagaaatgggaaagcttgaaaagatgatagtgaatgaagagaataaacgactaaaattcattgttatgaagtgtagaacacatggttgatggagtagcagtactggtacactactaccactatgctagtagtagaggtagttataatggcaatagtagtagcagtagtataaaaatcacttttattgttgtgctggtgaatcagaacactcactttcacgattaaaaataaatgtcaaagaaaaagaacaggtaaaaaaaaaagagtaccttagtttgaaagtcatagatgagatgggaatcaaagaaaccaacaaaaagaaaagcctcatctagtggccatagctagagggaaagaggtggggatcacttcacatgcaccaaaaaaaaaaaaaaaaaactcaaaggctttatctttcttctgctgtagttgttctcagtaactctcaattcaaaaaatacacacatatctgagtaaagatagtaaaaagagacaatatgaaagaaaaaagattttttttgatctctgaccccatgaaactgaaatcataagggacctacttaaagactctaaaaccccatattttaatggcctattttaattaaccttgtattttagtgattcttattcaaagggtttctttatatataaataagaataagaatggaaataaaataaaataaaataaaattttaaaatgcatacaaaaattgttaatttctttttcatattacattggtagtaatgaaaatgccaccttaagtggtttctgtaataaaataaaataaaattgaaataatttttattttatttttttacttaattatattttgaagtattaaaatgtaattttaaagtaatattttattttaaaataaaagaaaaaaacaggataagaaaattttaataatttttttattaattttttgtatacattttaaaatttgattctatcaaatgtctattcttattgttatttcatccttatattttcattcggattaattaatcgtcaaataatattaattgatgtgttgattaataattgttttgcttcgaaacaaacaccaagcaaataaaaataacccacatgttcatttgaaagaaataatgcattatggttatctcaacaaaccatatcaaaatagcagaaagagagattcccactttgaacttgtgcttgttctattccaagtagtaagaatcatattttttgtaatatagaaatgataatattgttcataggaaatacagttcttattggccaaagtgaaaatttaatatataacataacgaagaaagtggtcctcacttccatatatcataggctgttctaaattggccttatatactttaatgttgggatgtggtgaaaaattataaacaaataaaaaaccaacaacaattattgtgtcagtaacactgtaagtaactgttttctttttctttgttggattagtttactaattaaacttaatttt

SEQ ID NO: 36882 - DNA, 2771 bp, Cannabis sativa
agtcaaacatgtaagaatacaaaagggaataatgaaatatctaagctgttatgacatgagaatcaataagtgaagaagggttaagatcaatttttcaccttcttaagagcttcagcaagttttttctggtttaagatcaagtcattaggtacatcacttccccatgtagcaagatttttctcatcagttggagcagttgtctctgcaatgcatcatattcaaaaattgaatcagaacatgataaaatgtactaataacattagtaataatgacagaattacttaccttcagaagccgctttccgatcaatgttggctttcatcaagtctgctactgcttcagcagcctcaattccagctgagccggtgcaatagctgttctttactgtttgtttacagcatttatagccccattggtgatctttccaccaagaaccccagacactggtgtggttattgatataaacatcttcttcgtatttgcttctgggaacaaatgcttccttcaaaagccaaaaagataatgcaagggaagaaagaacgcgataagtaaaaaactcggaatagttctgatggccatattcccatttcatgaaatattacaaaaatgcaaaatgtaagcaattagcacctcaacatgtagattttctgcattgaacttttacttttcagcaaaggtactcaaatctatacaactgcagtagttgtaatatatatcgaaaaccatgctaagacaatccaaaaagtactgtattttaatggttataggtacaaaaatcagtatcaagagctcaagcacaatcttctccatgtaataactaatttcttccaccttgttcatcatctacaggaaagccatttgaccacatcttagatacacaaatatccgcctttaaataaaaccatttgaccaaatcccaatttaaatttacttctcataatgcagcattgttaagagcataaattatttaaagggagtgtagacataccatgccttttacaattcttcctgtccgatcatattctacttctttctcactttgtcccaagagaagctccctcggaagttcttcttcgcttgcagcattaccatacttctccattatggtgtttttcatttgtgacttcaacttctccttaatggccttatagttcttatacagaagttcagcttgagatggagcagcttgcatgtggatatcctggcccttttcaaatgcttcccatgcatgtaaattaagttgtttgaactccaacgcttgtccactcgttctataccggttatcgccctgtgtcaatagcacaataacacatcaaaatcatgaattttaacaacatatagagtataaattaaagttacacaatcatctaaagaatactcactccataaaacttctcattcgggtcagcatcaggaagaggatcctctctcatggaccgtgttttaggatcataataagcagaatttacatcgagatttaaaagatatttagcgacatcctcacgaattcgcaaattcctgcgcagtggaacaaatgtatattagctttcagagtaaattaacttcattaacaaataacaaggacatggaatgtgaaaagcatacctaaccgttccagtgcttccaccaccagttgtgcgtctacgcttctccactttagcaaagtccatttgtttggactcatcaattttcgcctcatcaactttcagaccatcttcaaattcatcatcactgcttgcaccctcttcatccgacttattatttttctcctccaactttttcagttgttgttctttcaaatatttcctccgggcttcatctcttgcctcatatttctcaataacacgagcataggctgatgcatcataaccattccatctgtcacgtttcccatcataatccaactcgaacgtctcaatcttctcatcgggtgctatatgcatgttagtccattttgctccttttattcgcggcctttccacacaaaactttgcttcgtgggtcatagccccgcaactgtcaaggaagttcacaatcgaatcaaacttaagacatatgatataacatgacttgctcttcaagaaatgacatcaagtttgccaaatcaatggaaatcagtacaaattatgtgcttgcaaaaattcaactaaaactcaaagttaataatggagaatcagcaataattcaacttacttctcacaagcaccttttctgtatttctcagcttgaaatatcttagctcctctatcataccaagacttagtataatttggatccgatttccatttcttctgatgttttaaagtctaaaacagaaagaaagaaacaaaggaacaattctgcataaatgtccagtgtcaacattagattctcaaaaacaatttaacttagcaatctcagaagtctaaagctttaccggtctctgagagttaatataccaaggtgcagatgacatatactgaggaatatgaggattaatctctttcccatcttcatcaacctctgctggtgcaagtccagctttacgagcttcctccaattcaagtttcttcctatgatcctcccttgatttgaatgcaactgaaaagccaacataacaatgagagcacataaaaattataagaaaattctacaacgaactctcttttcttcaaatggatgtaccgatgcagctctatctgttttggtatctgaaatcattttttagttaaattttttttcatgattatgcaacttataaaaaaaatttaacatgttgaaaacaagattca

SEQ ID NO: 36883 - DNA, 4923 bp, Cannabis sativa
gtaattttgggatttaggtaaagtaggcatatttttcatagtataaaatgtattggttcaaaaaaaaaattttgaaaacttttaagtatagaaaatcaaatttccctaataaaaatgcaaaatcctcatggttcttctcaaatatggtaacattggtaagctatgtatgtctctaaagaaataaaaatgggaccttattattaagcattatcaaatagatattaacataaactgatttagtactctcggactccaaaatcttcaatactcacctcctgccccttattgcttcaacgctcaaataaatatgtacaactaatatctagatatagtaattacaatgcagactccattcaatacataaacctgaaaaaataaccgaaaatgaaaaaccgtttaggtctctgtcattttcaccatccatgtctcagcctcagcgtcttttatgatatcccacccgtcttctgaaagttcgttctgatcatgcttcttcacgctgtcctcttcagctccattcgtagctgtcacgtcaatgattgggggcagactccaatcatctggctgtttagaagacttgtcttcctcatgaataataacagatgatatgcttctcaaggatgacccggatgaagctaacttgcaactcgtctggctagatgaaactgacatgcttaaaggaaggcgtttgtcaaacttctctttcagcaaactaacatcctgacatataacagagatttctcctctgcaaaagagaacaatgtgtgttatctcttcattgaggtcaataaaaagaaattacaatatttgacattcaacatttcataatttagccagatataaaggaaaacttactgtaacatgtccaagatgcgaccacgatccatcaaaaactctcttaactgccaaaagaaaacagaagaatgagtcactaactgttaaatattcttcaataaatcaaatagttttcgaaagagttgctactttagagttatcgtcagctgcctgtgctattagctttgcctcctgtaccacattctccataatctcctcttgttcagctagaaaaatcctagcagattcttccctttctagcttttcctgctcagctgctctctttagatcttcggcagcagctagtcgtgcttcgagggtcttccgcatctgcatgtacgaataaattactacaaaaacccataaacacacacacacacacacacccgatcacacacaaataaatatgaacctcatcaagaattgcaagtgatttgtccttttcatctgataagcagagaagtctagactctagctctctcacttctgtagctaaaattgccttctctccatacacttcaccagcttgctgcacacatgtacatatttgtaaaaatataaagctttaatgcttcttattagaccagcttaattcaaagtcagtaatactgaaacataaactcattgagcgacaactaaccatgctattcgcttccttggcatgttccagcatttgtttcagttcctggaccttgatcagaatatccagccctccaagagcagcttcctcttttgcacgctctgcagcgctctcctgaatttccacttctttcatcatgttaaagattgattccattgcagaaaacaaggttttctgcaccattgtcaagtaattagaaactttttaaaagaaaaataaaatagaaaaaagggatgtaaaacataatatacataataagaaaatgagatcatgagcgttaacaaacgggtccagtgcagatgtccacatattagtattatattccaaaactaccttactacactagtagtaaaatgagtggtaacataatttctcacacaaggctgattttatcctaatacatttcatcttatcctctgtttcagcttaatacttaaaaatatttgcttctgcaccccatccataaaataatttattagcaataatagatacacaacgatcaattttgctgccaaaattttgaaactatagaaaggcgagaaaaattaggtaagcacaacaattatcgttaaatgagctaagtgtgcctaagtctgatttaacatgatttacttctccaattgaattaacaaaagaacaaactagaagtgattgtattcagtcaaaagcttaactttgctcgcatctcatttaacaaagtgtagttactattcccaagctaaaaaatttataagccatcagtaccttattattcttggcatcttcaataatctcatcaagaatgtcaattctgcaagtttcattggattgtaaaactgtgctgctttccgagatgttatcccgaatgctgcctgttctactagcaacaaaacagtctttctcaggagtaagacttgaaaaactccttgcttgatcttcatcattatcatttgccataaagaacttttcctcctcaaagcatggagttttcaaactaccattaagcccctcagtcgacacaccaaattggctttgatcagaactaactatgggcattatttttttgggtgaaaaagaagtttcaaagtcagtatctgtgcactcttgctcgacatcagttcttactagctctgcaacctctgacaggacatgattagcctgatcaaactccaatgaaacttccttaattatctcattagtgtaaatatatactttttcaccagtatcatttttaatatcagaagttgaagctttagatccattcagtgatacgttcagatgtgtgtgatcagcatgcagagcaccatttgtaaaatcgatatattcctcatcttcacaaccatgagatattagttttgaagatatccctgcatccccaagtgtggtatcagcatgcgtaccacttgcacaggcactatcttcaacatgtctaaatgaactggatcttgattctgtagaagactcagcatctgatgggcaacagatttcgcatatgcatatcaatcaaataagtgaataccacacaataaaccatttaagaaaaaagaaaaggaaatattggatgacatttaggctttgtttagaatttggattttccttttgtgaaagaaaagactagaaataaaaaagaggaaacatgttttcctaaaattctattatacttgctcttgcaattttccatttttctaatatagctgtaaaaaaattctaatcttttgtttgaatataatgcaagttcagaggatttcagtacaaaatacctcttaaactcccagcgttcggataattgatgttaggaaatgttgaacttccaataggcaagcaaggaagaacatcagtcagaatgtcattaacagctgcatcagcatctttagaatgttcaatagcaacagccttcagaatgcgcacatcaacctaccaagtgattataaaaaaaagattaagtattaacccttgtgcttgcattagatcaggcacaaataacaacctttataatagatacttagaattagagatgcttcatcaaattcacatgccaaaacaaagaaggctacttccttacataaagcaatgaattatagcttcttcaaaatttctcataatacttaattattaaaaacattgaaaaacaataacaacaacaacaacaacaataaaaatactatgacaaaatgaagaaaatagatgcaatataaacaatgaatatatatatatatatttgttagaccgacttgaaaccatagtgagaccgaggcatatacctgaggaaaaatctcttgcaagcagcggaaaaccgacttgaaacccatactcagagtcagagctttcaatctatatcaaaaataaaaaattaaaatcagaataagagtgcttatccatcaagaataaccaagaaattctaaaactttatttcgctgggaacgaaccacataaaagaaaagttacctacgatgatcaagagtaatgaaattgtacccgaaaaaaaaaatgattttaaacacaggaaaacaaaaatgagaggatcatggcggaattgagtttgaaaaataaagaaaattaatattttggaatgaaagttgtactgacctttgagaattgagaggagaggagagtgaatagagagagagagaaagggttttgtaatttgtagggtatttatttgtagtgttgtgggaattattatcgggagaagagaataactgatggaccggggctttatgagttaggagggaggacgaggcgagcagacctaggcagggaagctaagtaaggaactggatttatttgtcatttaccactttcgaggttattttagtcttttcaccttttacgcattgtgttcttttgcataagatggaaatttccatttattattatggaaatttctcaattgagtttgtggtgtattactcctcaattgagttttagtgctggggatgaaaaatgatgtacttttttttatggaattagctcccccaatgtacacctaacttagcgtgatttttaatgtactatgtagctcgatactaatcaacgagattattaaaaatcgtgattaattaaaatttatttaattaattaaaaatataaagtaacatacttataaaattctgggatcccgtttacaaaatacatttacaaaaatttgttattcatatacaaaagttttgtcgcctagcgactatacagcaaaagccctgatgtcccaaagatcgtacgatccaggcataactgcctcgacatatacaatcttcatttgctcgctctcacggttcctcagctttagtcttgcccttacctacacatgaaaataacactgtgagtcaacagactcagtaagaaaagcataacataaaacaaaacaatatcccgggttataaccaggcgcccatacacctgaccataacccttgtgataccctggaataaagaaatggattagcaaaaccctaattagataattatgaataattg

SEQ ID NO: 36884 - DNA, 3181 bp, Cannabis sativa
aaatgaaaaagaaagaaagtgaagaagaaagtagaagagtggaggacggttgataagactgatggaggtcgtgtcagtttcaactttttcaaatttattaatttttaacttcaaaaacatatataatcggttactattttttttaatcctaaatactcctacatcaactccagcccttagattaaataaccactctatccaatgactgccgtacatcacagaataaatttcctaaagtacactaacgggacaaaatcgtgtcccttgaaatatatttctattctgtttattaagcattcagcaaatgtagtagttcattcctttgcaagaactttttatattctggtggtatttttcatatgagggatattccaattaatttgctcacttatttagtagtagagtttaaagtttaataaagtttgattaaaaaaaatgcatcaaatgaaattatgttaaattagcgttctccacacgcaataaatttcaatcaaaacttcaaattacaaactctagaatagttgatcataacttcaaaccttaatttgtaataatattttacaattcacaaaggtaatatgtaaactttcctatagagcataaatattatttcgtgcataaaataaaattattattaaaaggatagaggacaatatcatcaaatagggtgataattaattagacatgaatttgagctggggttaaatgggactgtccatgctgaccattattattccaaccatcaaaggaaggccttggaatgctatggtggttgttcaagtcaggatcagcagcacccaactcaccattactgctctccaccgtccgatcatcatggtcattcaaaactacttcgtttgatgagttttcaatcttggacttcactgcaaatgattgcactactgcccttggattcatggtccttgcatagcatgagttgataatcagaagaacaaaaagtgggactcctatctgggtcttcatggctatatatataattatatttatatagttgtatgtatatattcttttatataattactgatgattcaactcatatggagaaaattggttcatatttatagaaagagtaagtagtgacaaagctaagacatgtacacagtgagtatcagttaggggaatgtttgaaaaatatcttattattatttagtggagcaataatattagttccctatttggatatacattttatatttcagaaactttacttgtcatcaatataagtgatgtgttaataacatgtacagtgctagcactatattaaaaacaatagtttatatactaatatcatgatgtttcatgagtatacttctttagtgcggctttgactttgcatttaattccaaaatgaaatggattattataactaatgcttatgtttccactagatatcaaacctaatatatatacacacctatatatgtatataaatactatatatatgcacattcctattattaagtgacatgcaatttttatgatcatttaaatcaaaatatatatttatgtaattattaggcttttagtgagacaaatgatattttatagtagaagacttaaattgagcgtatatattgtaccaatcattatctttttaggagtattaattataatattttattataattttttagtaatttttatcttcaaaatcacatatgtcaaaatattttttaaaaaatttcgaatacagtactaaaaatatagttcctgatattttaatttatcacaagttttcacaaaaaatttcaaacgtatttctggcactataaactatttgaattttttttttaaaatttacaggaatgatgttgtaagcataacaaacatccgccatgaaagaaaaaattaaaaaaaaaaaatccgacatgtaaattttgagcatggaggttgactaaaaaattataataagagatttacgataacactcctcttttttattatagtgtaatagtatcacctattgtaatatcctaataagtctaatggtaaataattatagtttataattatattatgggttaatcaggtaataactaggattatgatcctactagttcaacataaattttaaatttgctatacgtggacaaataagcgtattttataaattacggagatttatatagtatatatgaatgcaatatgagttactagtgtaataaaaatatttctagtttatgtgatcttggagacttgatcggggatttaaaatgtcataatagacttaactaataaaatttatgggaatattgtgataaattaataatataagtattgagataattaagagtacgtgaaatttaatttagaaccctaaaagtaaaaaatttctttatgactaagaaacaataagacaatcattaataaaaagtatttattaatattattatattattattataattattactgttattattattaatatattattatatttttataaaacgtatcagtaagtttaatatatgtatgtatatatattatatgttataagtttataaacagtaaacgaacgaaacaaaatcttcattctttcctttcgataaaattttctctttatatatctattttcttcgattttcaactcgaaatctagcaatttaagctccggtagtagcaagatagcgaattcttagaggagaaaaacttaaggtaaggtttaatttcgttttaagtttaaaataattagtttcttataggagttttgtgagttagaataattatgaaggttctgaccttataggattgttctcgggtagtcatgggactatagttttaatattttcttgctgaaattgaggtgatttttgggataaaaatcaaattttaaactttttaaagctaagtccaagcttcaatggaatttttcgtttaaaaactcgattttaatttctggtacgtaaggatggtagtatttatgatatatatgtgccatgtgaagtttggagtgatttagacaggttttggtagtgtttcggtgagtgcgaaaattggaattttcgtgttctactgtttttgaaaacttcttggtgatcatcagaaatcatatttttgtcataactttttactcgaatgttcgttttcgacgttctatataccatttcgaaccatgtgatgagctctacaatatggtgtatgttttagagccaaaata

SEQ ID NO: 36885 - DNA, 5061 bp, Cannabis sativa
  modified_base (4997)..(5010): a, c, t, g, unknown or other
aaatacatatacatttttttcttggttttttttttcagggggggcgactgcccccctcgctacaatgtgggtccgcccctacttaggaataatatatgtgcatgtgtgtgttggaggagagtaaattgaattgtaagatgggaaagtgtatttttttatatatatttatattcagttaaatttaaataataataataaaaaaatatttttgagttgagttattatcttcttgtacatgtgatctcgttagattctaaaaaagacaaagcaagttataaactttaatgatccatttttataatcaaattagaagaaaaaataaataaagtcacaaccccaccccatgcatcttcaggctccaaactaccaaccccaataacccttttttaagtcgtgaaatttgcttacaacaaagaaattaatgattcccacccaattatttatctctgttatggctccaaaccagcaccacatgatcaatgtaatctttcaatttctgacttgtacaacatgtattatgaatgtggtaaattactctgatcacttgttattatgatcttaatttcttacagaaaagttaatccaaattaactccatttaaatgtcatgaaggaaaataataactacatcttaaatattaaaattatatatatatctatatatacaagctgtcaaacattaatacactcatggggttttggtagaaccaccacattccaacttgtacaatgctatattattttaggctttacaagtgatattatgttatatgcagatgtatattcttcataaaatattgttttatatacattaccaaacagatatggtggtatatatattcttatcatcataaggatcatgtcagatatgcactagtgagagatatggaactatataatataaaattttcaggtagaaatataattgtttgactttgttaaaaaggcagaggctatagccaagcctaacaacacattatttcttggaaattttcttttcgaggtaataaaagttttgtgtgaaaagtgctatagtctccaagtttgtttccattgagaaaacatttcttagtactcagaaagtaatttggtcttgctcctcaaataactccaaagcaagaagacttttaagaagtgtatccttgttgttgtcttcatcatctcagtttatgtttatgtctgaaaataatctcagattattaaatctaatgtcactttcttccatttaggatacccttttgctttttagtccagaattgacactattggggccaattatatttcaatcaaggaagcatatatatacaattatacatagccctttcagagtcaatatttctagattgagtgcaagtattgatttgaatggtttttttgttgctattattatgattgttttggggggctaagaaagagaatctaatgtggggttggaactctttagtaatttagtttagaacctctccttaagtagagagaagactgtaccaaaatttgtaaagcaaatcaaaataaaacaaagggtcgtgtagaggagagaagcagatgaaagaattgaagaggtggtcagattgtatttatttcatgatcagctccaacccatggatggttgacacgtggagacaatgctgcatatgcacatgaaaacagtaattatccagttgtacaaaaggactgctggtaattatatcacaatcaaaacacacaactgtattctatagttacacttacctattacccctcctcctggtaattcaaactcatccaggttctacttatgacaatttggtagcatttcaacactagatttactgtaaaacatatctgttttatactcgtacagtaaatagtaatattaataattttggctgacacatattgatttttcattgagtagcaagtattttggagattatatggtgaaaattgaaacacatcaccccctttaagttatgttgctttcatatataaaatatatatacacaaaaaaatatgaatggaattatatgtaagtttcatttcatagagtggagattacttgtaaaccacgttttagaccaatttaaactctactgaaacacacacacatgagagataagactgagcacattatttactaattgatatgttttttactgtataataggtgctacgtgtattatttaaagttgccttagtttaattatttcatctttaattaaatttggtacataataatcatataataagagattttatctttattaattacttggagtttggtaggtaagctgatttaattcatcaagagaaatgcttgctgtgaggatactagtggaagaagttggaatgttagaaatattcacgttattggttgttttaaaattgaagagacttgattacaattttaaaaggacatttaattgaagggactagaatgtgtattttttatttatatattttttttaactgagatggataatggatcactggtttagaccctatcagtacatttttctgaattaaatttaatgaccttgatgctcagttgtcagaatccataaaattgataagtttattatcttcttcgtattcatatataagatattgttttattggtagaaaatattgtatacggagaagaccccatctaaaactagaggtagcataaattatatgtctagctattcccagcattattaataataataataaaaacaatagagagggaaatcacaaattggtgaatagtaagaatcacacattttccataatgcactactatttctaggttaagataaacaagttagagtggctagaaattttagaattgacatattagataagaacatatgagaataaatccaatagcgatactttttgtattgaccaaatatttaaaaacaacaccattgacacttcattgaattgattgtcatagctaccaaaagtttttcctttctcacaagagcattatgtgtaccacattgactagcactactaggaaataaagctcgataattgattagcggttttttataatctaagtgaaacccgatatagaattacaacatagccctttaacaattctcttctaaaaaatatacaaagtgattacgtcaagacaagtaatgatggcatggtgaggcaggcttagaagggggaaggagggcccatgttccttaaaatcaaaatttgagagtggttaaagaagcccgtatcattggcattgaatgagccctaattaactgagcctaattgggttgaaattaaataatgaagaagaagcgtagtgcctaattctggttctggttctggtccccaccccaggaggcttggaccctcactgcctcttctcttcaatttttcttttaatcctgtgtggctcttatgcctcaatatcaataagcaatgttattgagggtcaaaatagtgtgtgagtgtgacttgtaagttgtaatgaagaacagggcagccagtaatactagtactagctatgtataataaataaaaagttgctgagactcagacccacaagccagtttttgactttttgactctaccaccaaagggttttcatttcctattttcgtttgaatgaattgaagagtgaagactctcagctgattttttttttactagcaatgaaattacataaataatctagaacggagaaacgtgcgcacttactaggtctaatgtcccacgtattatagaagtggagtcataaataccatcacattataaatgatccattcttaatacttgaatgtactactatgttacatatagtttaatttaaggtaacaaagagtgagtgagccgttcatattacttcaattcacatttatcctgttctcaaaaaaaaaaaaatcacatttatccttttgacacaggtctcatttgatcactaaataaaactactttttatttaagtattgtagattaaaacactatcttttctttacgtcttcttatgctttaatcacctattctttggaaactaaagccatcacttgtaattttttttcgccttaaaaaagaaatcagcaatcacttttcaatgaccacttttcaccaaatagttgtacgtatgagtaagagaaataaataagaaaattttcattttccttttcctcctacaatgaaatacaagcaaaccacagcattacaactgtcaagtgacaaaatttaatgcaatcaccattatgacaaacataaacgcgcagaggatttaaacaagatccttgtgtgtagctttttccaacaaaccaacccaaaaagaagagaaagaaaacaaaagcatgaaacaaaaacctatctggtaaaaagtgaaaactatttaatgggggcttcctcacaacaaaccataagcccccctcccctatatgcggcacttacccaaaaaaaatcaatgccttcaagaactgttacccttgcatggcagcaatagtgctgactcttaataatacagtatacgtggaccaaacactagcaaccctcgatttgagagactttctagcatcttttaaccaaatggaaactgctctatataattagatgcttcgtttcacttagtcttgttttgaggagctagagttgtcattctctgtaatttcggatgaaccggtagatgacatctcactactagcattaactccattctggtagtttttcgatgccagggcagggttcctttgaggattgtttgctgcaggcacttgcccttcttctgctaatttttttattatgttcataacagtggggaggaacttggttgacaaggaaataagtccaggcagctgcaaggaacattgaaaaagatgacaaaatcacatacagcgatttagtattgttcaaaaaaaattgagatggtagtagtacttagttattacacaaagtagtgtttgtgcaaaattaaatttatctgatgagcagaagtttaggtatttatctcagtacaattataggcagcacccttcatataatttcctaataaatagttactaaacaaatttnnnnnnnnnnnnnnattttaaaaatattaaattattaaattttgatccaataaagaataataaaa

SEQ ID NO: 36886 - DNA, 5637 bp, Cannabis sativa
ttttttttttttttttttctcatgtcgtttttgcattctgggtgtcgtttctatggttcatttttctcattcttctttgttttgggattttgaagggactttgatgactgcaagtgcacatattataacagctgttattgggtctggagtgctttctttggcttgggcagttgctcagttgggatggattgcaggcactttggctcttattatgttctctgtaataactttatttacttctagtcttttggctaatttttacaggttcccagatccaattactggaacaagaaactatacttacatgcaggctgttgaaacatacttaggtatacatcctaatatcacatcccttctttctctttttcttcaaagattaaccttgtgtttctttctttcttttctttatttatttatttattttttttgactcatttgttattagttttccttatggatttcagtatttatattactggtttgcaatttgattttgagaaagaaaaaacagtttgattttgagaaagaaaaaaggatcttttcagtttgattttgagaataaaaaaaaggaaggggagggagggatcttttaactcttataaataacggtagcctttatatattaattgtttttttttttcttacaagattcttagtttttgaataattttatacaattatgtgtaatttttttttgagaaacaattatttgtaatttttcatttgcaactataatataaagggtatttttcatttttatactttaaaacagtaacttaaattgcaacaaaaaaaatcgtatagaaacccctatttcaagcaaccactttaaaaacccaaacagtaaatttgaaaaaaaaaaaattaaaaaactagtgtatgaagtaatttccctaatataaatatattaaatttgaaactataataggttgaaaaaacaaagttttgaaatcgtccataaaaaactgaaaaaaaaaatacactttaactagaagggcataactaaattgtcaaaaaaaaaaaaatatcctcaaaacgtatttatgtttaaaccatttttcgttatgtctttttaggaggaaggaagtacaggttttgtggtatagctcaatatattaatcttgtaggatcatccattggctatacaatcactacagcctttggtattgggtaagctatatatttgtatacacatatatagtgctataaaaaaattcaatgtctctcacatttttagcaatttaaaggttataatctggtcgagtgtgtgttcttgaatgaaatcagggccataaaaagagcaacttgtattcataaaaatgggcatacagcagcttgtcatgcatcaaacgagctctccatgctcatatttggtgttgttcagattgttttgagccaaataccaaatatcagcaagctatcaggactatctgtcatagcagccatcatgtctttcacttactctttcattggcattggtctatcagtctctagaatcgcaggtcagtcacatcaaaaactacaattagtgtttttgtttgtgaagatttgagtaaaatagaatgataattctactgtagatataatttttttatatcttactggtagggtgtagtccatgatcctggccatttaacatagttgtacccttttgatagaattttcttaaaataataatattggtatgcctaatactgaattgtaggaggggaacatcccaagacaagtataactggtgtagaagtaggtgtagatgtcacaagtgaggagaaaattgtgcgctgctttcaggctcttggaaacattgcatttgcctatgctttctctcaaatccttatagagatacaggtgagagcttctctctttttggtcttcaaatgaaatagtcaagacaatatctataatctttgaacaaaattgttgcaggacacactaaaatcaagtccaccagaacacaaagtaatgaagaaagctaccacagttggggtcactatcacaaccttcttttacatgctatgtggaatactaggctacatagcatttggaaacaaggcgccggggaattttctaaccggttttgatgagcctttctggcttgttgactttgctaatgcctgtattgttgttcatctcgttggtgcttatcaggtactgaaaccataattctctaacaatcactctgatttccttgctcttacttttccttctcgagtttatctccgatatggaattgtatgtaggtattttcccaacctgttttcagttcagttgaagagaagagtcgaaaatggtggccggagacagcttttgtagtgaaagagtatcccattaagattccatttttgtgtactttcaagttgaatttcttcagagttgtgtcgagatcattgtatgtgacggcaacaactactctgtcaattatatttcctttcttcaatgacattttaggtctacttggagcattagttttctggccattagctgtgtacttccccatagaaatgcacatagttcagacaagggttttgagctattctatgaaatggtgggggctgaaagtactaagtggagcttgcctaattgtttctctgcttgctgctgctggttcggttagaggcataattatagagctcaagacatacaggcctttcatgtctgtatcttgattcttgatgacagtgtactttaaatactgttatattgaatttatttaccttgagttttcaactagattaaagctttaatcaactaatcattgtttagtgttagtatccttgtgaaccagaattggccttctctgttattttattagagttttactaatttggtttttagtttaatcatgttcatctattgcaccaatatgcaatttgagattcattagaacaataatgagaagtagaaaagaaaaacaaaaaataagtatcacgaaaagacattcttttgataaaaatgcaatagtacccaacaccacctcaatgtgtcatatttctgttagtggtctcgcatatttaatttaataactatggtagaaaactagtagtgttgggcaccaccacatatatatttatatatatatgggcatgagcactccttgacttacaatgaaaaacctagtaatcaacatataatatatatatatatatatatataggctatggatatatataaatcaaattgagatttgcacagaaaaaagaataaacaagtcattaaaatggcagcatgtagtaaagattttccatatttcatttctggccttgtatgtaccttttggccattgtaattgggatacaagaatctaaaatatatgttcaagtgtttaaacaatgcatctttcaatttacacgcggtgccattgttgagatcctttcttcttccagaagtgcatatggatccacatactggggtggtgaaattggagtttgggttccatcatgaacaaaagctggtccaaagtactggccaataaaagacaacaatcaatacttaatattttataaaccaaaaagaagtaacatacatatccaaaaggagaaccatagacttgagaaaatatatattaaggaaaataataagcactattcccaagtaatcatttccagcccatattctgattctaattcccacttattaacattgtggttcttaatcttaataaggattactctaattcaaactaagttatagaagttcaatcattatttaagaactctgagtccatcattgaatattagcagactttgaattatgtgttattatatttacaagtgtgtgtgtgtgtatacgtcagataagcaaattaatatctctgaagaaatctggttatcatctattcaacaacaacaacaaaaaaaaggaagtcaaaatggatagaggaagttacaatactgaagataggaaagagcacttacaaaatatagagcagagaaagatgctactgttattaggatcaaaggccaaaacgccaagaaaaatgttcctccaagtgttagtagcagtttggctcgagggattaacccctgaaacagatgaaaatctcaagtatgttaccttgaaaggtgaaactatataacaactaacgctcaaaaagaaataaaggaaaccaataaacaaattgaagggaaaaagaaaaggaaacaagggtcaacctcaagtccttcactgttcaatttcaaggagcgctccctttgattagcaagacttttctcaatttcagttgatactgcatttctctgtatgaaagctctagcttctttcccaatctcattattgactccatattcacttgtattggtttcttcttcaagcaacgaagtgggagtcataccccttctcctcaattctttcatgaacaacgattcaggaggttcttcacctgaaaatcacatttgtgaggcaaaaaaaaaaaaaaaaaacacaaatggaagagtcctccaatgaccaactaaaataactaacaaagttttaaagaaaagaaaaatatacccttaaaaattcatagctcaagcagataattttgaaaatactacatcaaagagtgtcaactgacaaaaaaaaaagttacacctcttcccttatttgttggcatttcaaataagcggtaatatgaaaacatttctgagctgaaatactattactttgacaaattaaagcatgaattttccagttgccatacaaatttcccaccaaggtttctcagatgccaaatagaaatttctttcctttatgcaattcactaacaaaaggatccattttcttcttcattaaaataaaagtataagaaatcactgaaacagagtaagaagaaaaggaaaaataaaacttgcctttgctatctttgtcagagtcttgagcagcacagaagaacctgaatctcttggtcatatagtatcttgatccattagagcttggggagcaatgaattattttcctggaagaaaattgggagaaaaaagagttgggttttcctagaaagttgggttgggagatgggaaatggagaagaattatacttcagaaattgtagagaagccatttggttttctgcatcaatcagaatccaaactcattcatttcactgctattaaatcttatattattaatctttgaagagagagagagagagagagggagagagagtgaaagctttgttattgtagaggaggagacgcaaggagaagagtgagtgaatacaaagcaagtggtgacgaagaagagccggcgcatgttagcgtatgataggctttcgtggctttcatgcgcgggatgtgttgcgtggcgtggattagttttgtggctacaaaattacgtgtagactctctcacccacaaagcaacaaaaagaaaatcagagaataataaaacaaataacaaaaaaaaaatgttcaaaatttctttcaatgttattacagtaacaggagaagtgtatagtacacgccggaatgttttgattgatgaatgtgaaatgtgttctcggaaaaagcagctgtagtagaattatggaaaaaaattgagttgagtgttagtaaattataatttttaaagtcctgtgagttgttaaaattctattataataatgataatattttaatctagtttattataatcacatatatatataataaatatgttatata

SEQ ID NO: 36887 - DNA, 6198 bp, Cannabis sativa
atcctaagtttttaattatcttttattttttctatatatataaattttatattctaaaagcgcatcatagaaacctatagagagattaccccactctacttttctatctaggccaagtgggtcttactaaacctttttgtttttgtttcaagctttcagcaatgcccatatcactatcttatctccatcacttcttcacactcaaaatctacctagacatgcaataatattccatattgtcttagagaataaaaagtagagatgcactcacaccttttagctaactacaaaaagtaattagtatataatataatataatataatagatatatttatacatggaagttagttcaataaaattataatttaaagcctaatgatgtaaactaactataaacacttgcttcaacttaactacataaaaaccccagctctacaattatcttaccagttctgaatattgaaacttgagttataacagttaagacactcttttcttgatttttgtctttcatggaactaagttttccaagtgtaaatactaaatattctttgttggttatatgttaggaatggctggcatcttgttcttgttcttttctgtcatcactgctgctgttcttgctggtgttcatggagacaattccactgattcctcttggcttctaaaagtaaaatcagaactagttgatccatcaggagtcatggaaaactggtctccaggagttaatgcatgcagctggaatggtgtgatatgttcaaatggccaaatagttagcttgaacttatcttgggcaggactatcaggcaccatccctcgtgagctatggcggctctcgtctctccaaacacttgacttgtcatcaaatactctcactggtgaaattccttctgagcttggacaacttcaaaatcttcaaatactactcctacactcaaactatctatctggtatgattccagaagagattggtcttttgaagagcttgcaagttcttagaataggaaacaacatgttctcaggtgaaatcacaccagctattagtaacttgaatgagttgagagtattgggtcttgccttttgccaattcaatggaagtattccagttgagattggtaacttgaagcatctcacatctcttgatctgcagaacaacagtctcagtggccttataccgaaagagattagtggctgcaaagagcttcagaactttgctgcatcaaacaacatgcttgaaggtgttataactccttcattgggatctcttaaatcactggaagttctcaacctggcaaacaacagcctctccggatcgattcctgtttcattaagtaaccttcaaaacttgaagtacttaagtttgttgggaaacagattgagtggtcaaattcccattgagcttaatcagttatctaagcttgaagtacttgacttatcaagaaacaagctttcaggaaccattaatcttctcaatactcagctaaagagcttgacagctttggttctttctgataatggattgactggtaccattccaagaaacttctgcctcaacatttcaagtatgcaacaacttcttctcgctcgaaataagctctctgggagttttccattagagctattgagctgttcttcactcctacagctagacctttcagataacagcttaggaggagaattgccacctttcttggacaaattagagagcctgacagatctggtgctcaataacaacagcttttcaggaactataccgcctgaaatcggtaacttgagtaacttagaaagtctttatctgtttggtaacaggatgacaggcagaatcccagtggagctgggaaaactgcagaggctagaagtcatatacctctatgataaccagatgacaggagaaataccaacagagttaacaaactgctcaagcttaaaagaaattgatttttttggtaaccatttttcaggtttgattccaaagacaattgggaaacttaagcaactagttttgcttcatctcaggcaaaatgacttgtctggtcccatcccaccaagcttgggtttctgcacaaagctacagatcttggctctagctgataacaagctctcaggttcattaccatccacattcagattcctttcagagctaagcaccatcactctttacaataactcctttgaaggtcctcttccatcatctctcttccttctaaaaaatctcaaaatcataaatttttcccataacaaattcatgggaagcatctttcccctcactggctcaaattttcttactgctttggatttgacaaacaatagtttctcaggacctattccaattagcctagccacatctaggaacttaagccgtcttcgacttgctcaaaaccgccttactggcagcattccttctgagttctctcaattcacagagctcaattttattgacttatcattcaacagtttgataggagaagtcctacctcaactatcaaactgtaaaaagcttgagcatcttttactaaaaaataaccagttcacaggagtaatgcctctatggttaggaagcttaaaagagctaggtgagttagatttgtcatctaacaacttccatggaatagtccctaaagaactcgggaactgttcgaaactactcaagctttccctgtacagcaataacttctccagcgaaatcccggaagagattggagatcttacatctctcaatgttcttaatctgcaaagaaacaacttctcaggacccataccagtaaaaatccagcaatgtaagaagctatatgaattgaggctctctgagaattctttgacaggttctataccagttgagctaggagggttgactgagttacaagtaatccttgacctcagcaaaaatttgttagctggggaaattccatcatcactaggaaacctcatgaagttagagagactaaacatgtcttcaaatcagcttcaaggagatatcccttcttcacttggaaaactaacaagccttcacaagttgaacctttcaaacaaccatctccaaggacaaataccaacaatcttttctggattcccactgacctctttcatgggtaatgatcacagactctgtggcccaccattagtttcatgtttggaatctgaggagcatggtaaagggaggctatcaaattcacaagtagttggtatagtagtggccattgtattaacatctacactaatatgtttagtgatgctttatattatgctacgaatctggtgcaactggagaaaagtatcaatctcaaactctgattatggcattggtgggactgatcaaaatcagcagaagaaagaatctgagaagaaatgggcatttaaaggggaaaagtggagaactggtgagtactggaaaatggactctctagctttggttacttcacaagataataagaaaagtccaagtagtaccacatcatgcattcttaacctcaaaatggctcaagattctatggaacataccttagtctaatgaaaccatagcaattcttatgttcacatatttattttagagaggggtttggatcaagaagaggtattttttctcttttcagttgtaaatttttctgtttgtatattatttgtttcctcattttttctcaaagataattgtgtgccatgtaacctggttttattgtttttaaattttaacactaaaggatttgtagaacaaacaacaaaaacagtataagcctattagccactctaaaatctaccataatgacacgtaattaatgcgtgtatatccaatattttcaattatgactaatacaagagagcataataaatcttcattgagattttccatcaccattatagtaggcctacacaatcatcacacacccaatatagctgtgatttcgtatatagttggctttactatgataaaagtgaaccgagggagaaaaaaaagaatcatacaaagaaaaatttggccaaatgtttttggttttaattagcggtggcatcaatcatacttgccttttctatatagcgcttttcggattaactaagattaaggaatgtcacaatgttctttttactcattattaatgtgatatatatatacatatgtatgtattactaacatattttgttacataaaagaaccattaaactaagcagtttcttttagaaaactattttcctaggtgtcccaccatagtttttctccaagttttaacttttcaacaaagcaaaacttacaaatacctagtcaagaacataacagttccattccatgcaactgaatatcatcataaatggactgtagaattgaccactccacctaacccatgataggtttaacaagttttttttcttaaatatctagaactgttcttatggaggcgacagctcagctcaacatactttttctactgtaaataattagcttagtgacttagtcaaaaatcagatagtctccaccaaaagtgaacataataaaatcccaaacactgttccattacaattttgatgagtacttgtatttcacatcatccaaacacaaacaatactgttattattttcttttctatatatttttttcatagtaaactcttaaacagcaaacattggaaattcacacttgttttgctctgagagatcatctaccctgtttttaacattattacaaaggttgtttgaagagaagggcgaccatgtttatcttgttacatcattaagactatggtggccttaatattcacagcccagaagccttaacttcaatggagccagcttcagtaagaagaggaacaagctggcctgtctggtgcttctctaaaaccgctgcaataatcccaaaagagatttttacttataagggtttaatttcatttctgttaaataaagttactatgaataaagatgatcaaactcaagactaatgagagcttaagttcaaaacaagcaagagactaaacataaggaaaacaatgaaagttggaaacttatatggccttacagtcacagccaccaacattttttcctccaatgaatacatttggtacggttcttctgcccgtccactcagctagagctgcttgaatatcacttccatcacctataaatttatgataagattcctcataaaactaggcactaaccaaccaataagcaaaatacattacttactcatactaagtgctctaattcatgtattgtttaactgcatcttcagagtgaaatcaaaccttacagaaaaaagacaccaaaatcttccaagctagaaaaatcagagttttttcctttttagataaatgaacgaagaaagttttgaaaactgttactgcaagaaaatagtactcaaaaaaggctttatcatacacatgatatgtaggtacccaaaagtcacatcaaggtaagtttttgactccaaattcagcacaacaataaaggcatgtatttataaatcagaaaatgacatacgtactttcttcatccagttcaaagactttgtaagaagctcccacttgagtcaacaattgcttaaccctctcacagtaaccacaataagttttactgccataaattgaggttgacaccaaaatcagtgtttatataattctctttatgtatgtgatttatagaaattaaaattacataagcaaaagaaaagaacagaaaattatccaatttccagaatcaaggtcaacatccaaaattgaagatatttttttttttttccttcttctaaagaattaccatattttatgagtttggttgtgttctaaattaataaaaattgaagtttgtgacaataaaaatcgaaacttgatgaacaaaaataagcgtaaaagaaaaggacctgaagacgacgacagggtgagaggagacgatctccttggccttgttgagcgccatttgaagctcttccttgctctttttgttagtgcccacaaccgagcccatttggttagatcaaatatatgtatttatagctatataaatatatagagagagatatttgagggcaagtgttggaagaagatgaaaataagggtttgttttccctaatcaggtggcaaagaaatgaaatgagttgatctgatcatggcgaccgctttcttttaacgcatatcataaccaatgcccacatgaacatgatgcatgtcacgtgtccattgctagccattgtgatttttttagcattatattat

SEQ ID NO: 36888 - DNA, 3945 bp, Cannabis sativa
atagattcaacttccaatgaaaacaattgaaaatactatctataaaagaagtaaagaaaacagaaagagtaatacgagtttctgcatacctttttcaaatcatcttaaattttgatccttatcaatgaaatcgataccttaatcgatatgctcacccaaaaaaactgaaaattgtggcatcaatagatgttgaaggttccaatttcccttgttccactgagatagatgaatggagggaattagagggaggtctgacgaaagcttcgatttaggtttcaatgactttgattcgcaagggacaaaccatcttttttcgtttgattcagttttgattctatatctacaaatctttctatcgacttcgagattaaagctctttcaccatctctcaactacggattgaaaatttcaatagaaaatttttaagcctcctctgcgattgaaatatggtaaataatttttgggatattttatttttcttatttttaaatgttaacgggaaatgttaactctccgttagtttttatttaaaaaaaataaaaatgttaaaaagaatcgttaaatcaaaaattctgctacgatacttttggatagtttctttctatttagctcttcttcacttatttccatccatataaataggttctttctttgatatcatgagatgattatatagtgatgaatgctcaaaattaggaggctacatacgtttacaccaaaagccagtttgattttcctacaaattaaaatgtacgaataaaaggcctcccactcttgaaataggttatcaagaaaatattaaaaagaaagggaaaaaatggctctaattaaatgaaaatgaacctaattttagactgtatgattacatgttcaatgtcaacaaaaggtgcattacataagaaaaaaaaaaaagttttcatatattctatatgttatccgagtttgcagaggcttttggagcaccacaacacaagtggtatagttttaagagttgaatatattttgtcctcttggtggtggcctgtggttcatattctgcatattggaatattgttcatccggatgtcctgggctgtcaggttgtccaatgccttcatttggccctgcaccaacatactgttgtacaaccaacacagacactgttgctgcgaaatccgatgatgcaagcagatccccaattgcaccaagttctgggcattcactccagtctgtgagtccagctgtgagaggtgatatcattccttgtcctcttccaacgatgaacaagtcatggatattgtccattgaccttattgctgctactgtctcctctccattattcaccaacttctcactatacataattgattcatcgttcatggtttttgtcctaaaatcattcacaagctcatcatccagatgcctttccattgcatcatctgtttcaactgttagcattctcgggtcattaagattgtcacgaggttgtgccacattagaatcatcctcacccgaaatgaagcgcaaaactgtgagacttgtccctggatggtcagacattctccaagcataagacaatgcttctctatcatctggtcccccaaagaatatcactgctatatgatgagtcacttggtttgcagctaagcgtgtggagccacttagccctctatcaacaagaatgccaactgagcaaggtgcattagctagtacattttggttcaccatccggaatgctggatttgtagcttccattccaccatcaaccgtttgttgtttatggaaaggaatgataatgaaggctactcgtttgtcctcagccaagttgcaaatgtcttcatgcatggtggagtaaggagaaatggcagtgagaggttggacagtaacacaaccagcgtgttgctcatagttctcaaaggcattgatgatgtgatctgactgggcctgtgttctattaagagctggtctgccggatttcctcgtgttgtgaactatgagcattgcagatgcacggccagtgagttcaactaaatggagaacatatacgcatataggagattttttggtggggtgtgaagcttcaagaaggttgatgattgttggcacatttcgaggggtgtggatgcaaaccaatactcgtaactctgcgtctggttttgacctttgaattgttcttcgtttataaggtacgaacttccttgctggcttatatattgatgtgacaactggcgtgataattgcggtcattatcactgctacaattaccataattgcaaaggactcgtcatctaagacctgcaaaaacatgaaatgaatatcattagtttttttaaggtgatataatgacatgggaatatttatgtgattttcttactttttgatctcttccgacattgaggactatcatttcaacgaggcctttagagttcatgagaaaaccaagagtgaatccttcgtgaattgtcattttgtaatacatggcaacaagaagagttccaacaattttgccagcgcaggcaagaaatatgatgagcattaaaaatccccaagttccaatcgattggatagttgacacatcagttttaagcccacttattgcaaagaatagagggagtaaaagccccgaaataaaatcctctagcttctctataagagtaacgccaagaggtccatttggtataactaggccaaacacaaaagctccaaaaacagaatgagttcctatagcgtctgtgatgaatcctgagatcatgaccccagtgagaatgagacatatattgaactcactgaaactctctccctctggtgttcttcgaaccatccatgatataattggtcggacgatcaaaacacaaaaggcaacaaaagctgcacttgaaagtatgacccagagggaagccaaggagctagcacggttttcagctaaggcaatggccaaagcgaggagaatccaagcacacatgtcatttatgagagcagaagataaggcaatcctgcccagctcggtgttaatgagtttgagctctgcaagtattctagccagaactggaaatgcagttacagagagagctacaccgagaaagagtatgtaagtgccttgtgtcatgctctcatcctttttatgaagaataaaagaaaagcatgcgccaattatgaatggcaacaccattccagcaactgcaatggcaagggactttttccctgttcgccgaataaccgaaaggtccatctccactccaaccaggaagaggaaataaagcagaccaacatttgccattgtctcaagcaccatcacacttcttagaggaaatattgtgttggcaaatcttgcattgcgtcccagtactgacggccccaataacacaccaccctgtacacaatacaatatattttttttataaactttacatatttatatacaaggaaaggatccaattatgaataaatgcacataaacagatatagaagaaaatgatccaacagttaaaagtactatgcttataaaaagaacataccatgatttcagagataactctaggttgacgaaagggtttgagaaggacaaccaatgtgcgagtggtgaccacaattaaagtcagctgcaagatgaatagaggaagagagtaatccaaaggattatctccttgccaaataccgttggttgttatcatggtcggagcataacacacgatcgtgtcttccgttttgttaggcgtcattcctattgtcgtcgccatcttattttctggtcactgttgtaaatttatatcaaaatcaaaactattcttcctatttgaattaatagtaactatttattaatatagtgactacaatggaacagttaaatttttcaaaatgttccatgtgcagtagttgctgattgtttgtcctcctttaatttttcctactccaatacaagttttgttcttgaacatggaattgagagaggttttggttgagtatgag

SEQ ID NO: 36889 - DNA, 7313 bp, Cannabis sativa
  modified_base (7105)..(7115): a, c, t, g, unknown or other
gtacaattcatataaaaaaaggtatgtttcaaataaatataaaattagagataaatttgattaattgattaataaaaggggtacttttcaacttaccccctaaatttatcgccgttaaccggtccaatagtctcctaactcgttgagcatgatttcctgatacagtgggtagtgtagacattttaaggattgattaattagtagcctagtcatccaatttgaaggattggccacacaatactagtggattgaactgggcatatgcatttttaagtaaataaaatttgtcgttgaactatgaactttgtaaagttttttcccatgaatttttttctgttgcaaaattttttcttaaactataaaaattgctataattaatttttttagttatattttgctcaatttctataaataatttgttgatgtagcactaacataatattaatttagcttagttcaagagtctagataaaaaataaatgtataaataacagtctaataatgaattatgatgaattgtgagaatatgtgtatgcattcttagaattaatatttgtatgatataaaccaatatattgaagtttggctagttaaagttgttaaatagatcatcatactgcaacaatacttataaccaagggcgaaactagaaataaaattcattcagggtcctcatggtgcctagcacccctaagaggtgtcaatcgttattgatgcaatttaatatcaagtcttacttattttaccttaataatgattgtagaaaattgctaactatttttaggatgttaccctataggggtgttaggcaccatattacctaatagcaatgtgccctctatcaatatattttttgtaactacactaaataatattatttaataatattgaatgagacgtatttgtatggaggcctaaatttttttatttaagtcctaaatatcttataacgggtcctaaatttaggtgggacaataattttatttggactcaaagtagctttacccatgcctataactcatagctacaaattgttttataaattagcgtaatgtaactaaaaggaatatttgcaaacaatttgtataattggtaagagagttttgcaacaaaaaaagaattaaatggtaaactctactagagtcatacttataaaaaataatcttatttcttttaaatttaaagcatttcaattccattgtacaaagctataaggaagtcaatcgttcccttttccaattaaaaagggccatctgtcctctattagcagttaacaaccttcaatttcagcaaacattaattaatacatgatagttcttattgtttgactttaatataaataaaataagaatggttgattcagagctattgcaacacgcattggcgtcaacgtacgtaggtagttcaaatttcgaaaaacagccaagtaataaaaattgttggacactttctctctcgtaaaaagtgtcataaatcataaatataataatgacttgacttgaattagaagaagaagacaaccaataggtgagatttatattgtttatgtacgaatgaatgttattgctttgcgctgcgcattcacatccacaggagcacttgagctgcatttaaatgggcagactggaaaccatctcaaacttgtgttggggcggttggtcccctattctctaaacaatacaattcaattaaagtgagatgagattgagttgtgttgtgtctgtgtctactgtctatagctgtaaaggagcttcagtttaaaaaaacaaaaactcatttagccctctttttgtgctgtaaatatttcttttataaatatatttatatgggcaccgacacaatgaatcactttcaacagaattttcatcctagtgatcaagtaacaagcaaagccaataagtcattctcttttttttttcgctcttcaaacatttttatatacattatctgaggggaaaagatattcataaaaagaaaattttttgaattggtttgagttagagatggctaaaatggcagataatgaggaaaagaattggctaaatctcaatactcttgttggattttgacagattcctttcatgaaaagtcacttaataaataaatttgtggtttcaatggaccacacgtttatctctaatcaaatattaattataacacatgagaattaataatatgtgtctcctttgcttttatttgcctttacgtttttggagaggaatatttatcgtttgttttgtttaacataaagataataaaataaatattgtactgctgatgtccgagagtgtagataacagtatagtggtaaattctggatcacagctggtaatatttggtctctaatttcttgaaggaacaactaactaaagaaaatatcgaaagaaaatttgtatcacatttattgaaacttatttccaatatttgacaaaatcctaggaaaacagaactaatatgtagtttgaaactcaagtgtgaattcgttatgtcctaatgacaattaagaatctaaaactccgcgttgaaaagcattttaaagtcttatccagaaactaaaaaatgaaatgacttgagctgtttaattaagacgatatttatatataacaataaagaaaagaattttagaattgtgtccaaataaaattaaagtaaacctctgttttaaaactaggattaataaggcaaggcgtaagcgttcacgtgtcgccatgtggacggctttattcccaagataagtaattgcggctcctagacggccagatatgtcaaactctctcctttcgccacatgtcccaattatatacgaagtaccatcgattatggtaccctaaactaaactagtactcaaaaaacagcatattcttttttatttttttttaaatttaatttgtatatatagcaagcctcttttttcttttcttttctccttaaaccgaaggtagatcacaaggccaaaaaaaaaaaaatagctctgcttctcacttgcttttacttctgtctatgtactctgttccatggagtggaaaagaggacacccgatcggccgtggagccacctcaacagtctatctcgccacggacaacgattcaggcgaactattagccgttaagtcaacggatctttcttcttgtttggttttcttgaggaaagaaaagagttttctttcaaagctaagctcttcttacattgtaaagtacttggattattttgtcactacaaatgatcaaaacaactgttctcgcacacacaatctttgcatggagtatatgaccggtggcacactttccgatgagatcagacggcgaggagggaggcttgatgaatctttgatcaagctctacacgtatcagattcttcaaggtttggattaccttcatgggaaaggactagctcattgtgacatcaagagccagaatatcttggttggtgaagatggtgtcaaaattgctgatttgggctgcgctaaattggtgagaagagttgattggatcgaagatgaagaattgtacgagtgggatgctgcatctaaaatctctgggacaccggcttttatggcgccggaagtggcgcgtggggaacagcagggtgttgaagctgatgtatgggctttaggatgtacaataattgagatggccaccggtggtggaccttggccggagttgaatgatccggcttcggcgctttaccatataggatataggaattgcttgccagagcttccaagttggctgtcggaggaaggaaaggacttcttgagcatgtgtttaaagagggactcaaaggagaggtggacagctaaggaacttgttggccacagatttgttcaagtgttggagtctcatttgggacaatatgaggcccaaaagacatctcctagtggtgttttggatagagacttgtgggatttgttggaactgtcggagtctaataatagtagtagtagtaatgaagaggttcaacttgatgtctcgtttttgagttcagcagctaaggaaaggataaaggttttgattggtagtggtgacacattttcttgtcttccatgcacacctgattggggttggagtagtgatgataatgatgattggttcactgttagaagcaatgattttgaagaagacccagttctggattctactactacaacatctttcgattcaatttttcacgaacaaggagagattgtttatccctcattatttgatgaaatgtcgtttgattattattattctgttgaatctattagtacaaatattagttgtgaaacaagttttgttatgacatgtaatgatgttgatctccaactccaaaacgaaagtacaaataaagaaaagaaatcaattttttcccactgtcactatggattcataccttttactttcttgttttctcattctcaatattttttatttgagttaattacgggaaaattttcaaaagttttacttccttaactagcaattaaacctccaaactcaagcccattttgttagcaatttgtcattctatttatttttggttgttaagagtgatggtaaaatgtccatgtgtatatattgtatacatagtacaattcaattggtccacctaataaaatattaaaataaaataaacttaaaataatataataaatcataatttcttttaaataaattagaaattaaaattaaaacaaacaaaaatcattaaaaaaaaaaaaaaaaccctatctcctccaccctttcttctgcctccctctactttattctctttgcagctcacggttgccataccagacaagccacacgctgttgctggcggaccccaaacccccttctctaaccacctcgcactctatctctctcccgttttaatctctctcacactctctttcccccattcgctctttctctttctcatgagctgtccaccccaacttcggtcgagatttttctggccacacgatggtgtgataaatgccatcttcaaacttgggaccacccgaaactcccaaccctatatcttagtccttattctgttgtcttttcatcgttgtgagttcctcatcgaagatcacgtcttcgtgtctttcaagacattttttaagcaagtttagacttcaacatgagatcttgtcggagacactcatgtttaggtctgatcgacccaccttcgtacccagtacaggaaaataattttgctcttgtgctacccttgattagggtttatgccctaaaaagcctatgaagacatttctgtttatgaataagagttgaacatttttatatatgcttgaatgttaaattactaatatttgatattcaaataatttatatatatatatataaatgttaacccgaaaaaattgatctcggtgatgtggacatcaatattttacacgtggtaagaaagaaaacatctcatacccaagtcatagacctgagaggggtccctagccctatgcttaggttgactctgggaactccaaaatgggtgtttagattttgccaagttgtttccaactcactatcttttagtattatgtaccataacaacatgaagcatccaaattcaaggatcaggagctgaaaaatacatgaaacgacaccatataaattaacccgggcacctagggtttcacctcgcgtccaagttgacaaccaaagtagggtttcagttttcgatgttgtcttagtaaaaatgggtcaaactttgtattgggacatgaattagacatgtcatgaatatatttgaggcataagaatcagatttggagaacttccattttttagcacactaagcaccagatggcacaggcacccaatgcctaggatgacatattgtcaacctggaccacttccgagcatcaaaccgaaaatccatctcgggcattttctttgtcttcatccaaaatgagaaaaaaaaaagtacttttgaggaagaaacagacccaattggaggccaaaatgaaggaccagctccaaagttgacattttgtcaacctcggccattttctagaagtttttcggaaaaatcttccaggcatattctccgtttttatggaagattaagatgcaagtatttgtgaggagggaacgaaactttctaaagcttgaaactggacccaatgcccaggttgacatattgtcaacccaagatgtttccaataattttctgaaaaaacgctccgaacattttttccgtcatgagaaataatgaagataaaaataaatttaaggagaaaatgacaattctaagggcatgaaagcttagctaagcacccaagttatcttggtgttgggctcgagaattctctttgaaatggtcataaatgggataggagacctcttcctcgatttaaagaaccttggaagtatcaaaacaacaacctagaagctttgaaaagagcactcaatgctcaggttgacatatggcctagtgcactgggtttttcttatctaattttgattccgtctcgaccatttgtctattttttcttagtgaccagaagctatgaagttagaagattcatagcttctaatttaagttaaaaagtacccataaggtcagatcatctctctctaatttctctctatagaaattagagctttcagacttagctatttttctttaatctatctcgtgagaaataaaagtcaaagtagatgtatctccattattgtcgtgacacagggagtgaactactataaattgttgtgtctctcttatttatacttaactcataatacattctcgccaatctagcaagtgggtgtggaaagatatttgtgtctacaaatcactttctacatggtggcaacacagtcctcaagtgttgaaagaataatcaaaacaactggccagcaaattgggggcacgccagtcacttaaactggtgatgggactacacctacatcgtagatgatgtgaggtcttgaaaccagctccacagctcgtcccctaaggccaccaacagctcctagtaataaactaatgagaaaatttcacatgtggaatcacgtttagatttaaaagaccccgaggaggccaatcctcgggttgaacaacttaaccaaatagtggttgacctgcaacaacaactagggaatattttaccaggatctannnnnnnnnnnaagtatgttgattaacatcctaattatgaatatctctaaaacaatgaaataaacacataagggttaaataaactatacattggtggcagcggaatacaatgacccattccgttaagatctctagcccttaattcctttctgtagcagagcactatcaagatctgaacctagatctctttctctccttcaggtttggtt

SEQ ID NO: 36890 - DNA, 2363 bp, Cannabis sativa
ctgccacaattaaagactggctagaaatcggggtgactttgtcaccatggatggaggcaaagagccaaccggtgagtatattctattgcaaggaaagatattcttaatctaagagatcaaatagtcaaacactacaaaaagggcatggcaagtagttaaacgagtacagtgaccccaataagaattgcaagttctgttcatcactatttgaattataccttaattgacaattgtgaaaagtgtccaagatcagcaaacatggcttctgaacctgtcaaagtcaaattgcttataagaatatattccaaggccccccttttcttgcttgtcttagataacaagaccaatcaattttctttatgcaacagtagaaaattttacctgttatacacaacaatattccacccaaggacttccaaccttcggattgagttttcctcaagaactcatacatataatacggagaaagagctcggtacacatgacgattccatttgaaaatattatagacaccaatggtactgatgcatagtagccaagtcataactataggagcaaaaaggaagccaaccctgtgagtaccgtaatgttgaagcgaaaacaagccaattagaatgatacatgcaattgggacctcaacatctgcaaaaaaaagcatgatgaaactctgttttagaacactatagcaactaaatgcactgtggagaaaggtaaagataaaagagtgttattgaatctaactgcttatgaaaacaaaaccacacgtggtgtcaaacaaagttcaactttttctttccccaccttatttcctcctctctcctgagaaagaagaagaagtttggccctctatccagtcagtatagcaagcttaaatgacaagttttagtactttggtctgggaaaaatttaaggattataattgggaaaaatacacaaaatgaaaaaaggaaagactattattaataaggaaagaaatgagattttctactgtagttaaatcaaagcaacaaatccattaaactatgaatattttgataatgatgatattagacagaaattaaagatcttacatttgtgatgctccttggacatagaaagctcaagaccagaaacagcagaaaaaactgtccaaaattcaaattaagtaagtcagttccaaatttgcatcaaacaaggaaaatcccagagaccaaaaagatttttacctgaaatagctggtgtaaggacaccatcaccaatcaccatacaagtcccaatcaaagccagaataagcagaagcctctgcagaaccctgtgcctctccaacatggacttcaaccttgacccaatacttgagtttttttgtgtgttattgtctttcttgtactcagagagctcctcatctgccacctggcaattgggcagtgagctaactcgggcgtgtctacacagtaaggagtaaagagcaaatgtccctccttcaccattatcgttggcatgaagaacaataaacacgtatttgagaagaggaacaagagtgagagtccagaacacaaaagacaacacaccataaatctcttcattggtttctgaatgagaaatatcttcagcaaatgtactcttatatacatataaaggggaagtgcttaaatctccataaacaactccaagactctgaaaagccagagtaagaatagtcttccatgatcctttctgtaatcccaaaaacaagaaaagattaccaaactaaaacagattacagaatgtgttgaaaaactcaagaaaagaaatgaaaaaagttactttctctaaccttagcttggttatgaaaacccccagtttccagatccatagtgattggtcttagtgattcaaaaaagccattgttgctctggattgaaagggatttaacaaagacccatttgcagaaaccacaccgttcttcttttgttgcttaggaaaaagattaattttttatttatagacttaactttccaactctatgatgggttgcctttgccttgcaaatatagaaaaaaagaaaagaaaagattagatagactcaacacaaagacccttcttttataaaaggaaaaaaacaataaaatctcatcaccctgctcttgaaaaactacaaagaacgtttgacacgagattaaattctcaggagaaaaatatatataaaaattccatttcttttttttagaaaaaaaactctttagttgaacaaccattaatgtaaacaacaacaataagattaccaaacacgaaaagccacagaaaaattgaaaagggtactcaaatttagaacaaaagtatataaaagagtagaataatatttggaatgagacttttttttcttttctttttaccagagagagaga

SEQ ID NO: 36891 - DNA, 6359 bp, Cannabis sativa
ataatcaacttgaaaaaaatttctatcatgaatagatgtaaaattgtattcagtcttgtcataacacatctaaattaggttattatttagttttattttgccaaaaaaaaattaactcacagtgctattttgtactattttaaaaatacatgttctaatttattatttaacaaaaactgaggtacaaccgttaaatacatcatctaaaagagagagattagcacttgagactataaacaaaatagagactaattaaaccataattgaaattactagccattatctcttgtaatgatgtcaagtcaattatatgaagaaggcaaaagtgttgaaattaagaaagatgggacacttaaattgttaaaattttcagccacaagatgtgtgacactattcactttccgattaaatccaagaacatattaattgaaagaaggattatctaatctcaccactacccaataaatttgtgttatcctcgtagtgtcattgtcatctctataattataaaaatggtcctgaaataaataaataaataaataaaacatcaatatctatctagtagcagccacaaatatccatgaattattctagttattatccgtgaaataattaaatgaaattaaaagggctggtagtgacgtaaaaagaacattatttggcaccaaatacagaaatgacataaatgaaatggggccttccattccattaactcttttgcttcattatttaaatggcacattcttgtttatatgctaaagaatcttaatggtgttgtttccacctgaaattgtcacttcatatttatgtttgttattattatgatttaattccattataccgaattaactaattaatgttagatttgtgggattctcatattcaacaaagaatggttcgtgagaattatataaatgtttttaaatttctttttattacaagtagaaaataccatgtcaaaaaccttcattaagcaaatgttctcacctaatcagcttatggtctattagcatttttggggttatattatacttttctaccgtcatcatgtacgagtagtataatcaattaataaaacactaaatactaataaaaaaattgacaaagaatatgtatattaaactaatactaaattgagtaatgctaaggaataccttaagcactataaaatgtgttaattattattaatgtaaattaatatcaaatttggtatgtgttaaaaataatacatttttaaattaataaataatataaaaattattaattaacgcactatataaatatagtattgtgtcctaacaatagtatgttaaattcgggtataatcctaggaaatagctaatgcatatggatccacgttagtactaaccccattgtctggcatgacacacgtgacggcacgtggctagctaataatacttaaccttagctacaatacgttttcctttttctttgtttttcttctacactatgtttgtcctttctttgactatttggtcataaataatcataataataaattaataatgtgtcaaagccaacactgacaagtttaagagatcaaaaaaactgctttaagtttatcagttcattaagtaaatttattttaaaaagccttacaagaaagaacttacagcaacaatatctgatacatttatatgatggctcaagccatgaatagctcaagcttgaaatgaatgcgtcttcttctttcttctctgcaactcaaattgatctatagttgtagcggaagaaacaggaagagacaaaagaaaaaaaaaaaaaaaaaatgaatggaatatgaagagagagtgcatcaacaccaacagcttaactttcgagggtcaaattaatttttccgttagcaaatgctcttattctgtcaagtgtctaaccatttacatgcgcttgccttctccctgcaaaaggataaaagacacccaatagcgcagagcaaccaaatattacatcatcatcttcttcacacttactctatcccttttttcccttgtcataatttttacatcattaacaaaattacacagaaataattatattaaaaaaaaaaaggtgggggcctcttcttgacggccatctaacatccccatggatccaaataagtttctttctttcttcatcttgttcttgattatatggggagagagttatcttagaggagaaggcaagtctcaggttgttgtttaagctgttgcttggcttggtgctgggaccagtatgcgtgggctgttaagaccctgtccaacaagtcctgtgggacaggctcacctctcctttgttggggtgatattcttgccgtgtgtactagtgttttccacttgtcctgcacaaacccaaaaaagaaaaaaaaaagtacacattgctcttttagctttctggctcagaaaaaggaagtgttccaggaagaaaagcaactaaacaggtcgaaactatgattagactggagtgggggcataatgaatccatacatgaatatgatcaaaacagatgacaacaaagtttaacagtcaagaagattcacttgaaaatgtgataatagtgagatgagaagggtattattgtgagtatcacaacgatgagggcattttagtccatgagggcatgtgtggaaaaaaagaaagagtaaacagtggatgtcgtgtacaacaagaactcgtgagattccttgataaggttgtatttgaaacacgataaaagtaagaaggctggtaaagctatccactaaactgcctaatcacttacctgtagtacaagcaattatttgccagaggcctaaacggattaaacaaagaaaatgtaactggcggaccccaagcacataaagtagaccttttttggaaataaaatataataatttaaatttaaactaccatctgttacatcttggatcttataggagtttgcggttaaagacttgaacattagcgtgtatgtacaactttacaccaaccacatagcataataaaataaaaaataaatcatttaagttggcaaaatagacctctcaccttcaaatcaacatatgtccgatgctttgcattatcaaaagcgcgcaatttaacatcacgccacctgcatatgagcacaataagactagtagtttaaaaacagagtaaataaaacagagcatcaacatctacttgacttgactacatgaaatttctcatattgagggtcataaggaggttgccactagtaaacttatggtgattttttagctaaattaccttccagttccaagtttttcaaccgcttgaacaagtgcttctacttcagtaacagaaaatggacgacggattcgacgctgtgccatatcagatcgcttggatttccgtagtgctggaaccacagataaggcctctgcattcatttcagggacagttaccaatgcttttgaatctatagtacttttgtctactgatgtatcagttggagagggggtcgaatcatgatcactctcgacaaagttacttaaattggcaacatgaggctctggcaagacatttgcattggtgtggccaaccatttcctggttgggtggatacctagttaagagagcaattgcaaagtaagttcaacatatcacacaagctaaacattcataaatatcatgtgttaatgacgattacaaaatcaagacactaacaaatttagagtatgcagggtacttgtgttaccttgcaaggatctcaggtgcatcaccagaaagcaaatgtggagaatctccagaacacataggtgggggagtttgaggagagttaggctccaaggtaaatcccaaagcatcaagctgcttgtcttgagaaattccagactgcagtagagttacgttgtcatctcttactttctttccctgcaggagtacaccaatatgtaaaccgcctccaagtattgctgtcactgcatccatgactgtcctctgttgaatgaacataaatgatcagtgacacaaatatgaccatgtaaccatcacacaaataaattgtataggctgctggtccaacaataggtttagtggcaaaaaggtaaaatctaaaattagcagaaatagacatggataaagaatttgaaacatcacaatcaaaggagtagacattagtgagaacgtcgttatgtaaactgtacttactcagcttaaacatgataatcaagaaagtatagcagaagtatatttctctaagataaaacaataagaaaattacggttttaccttcagtgaaccaacagttgcagtctcaggaatctcaataaaaagctctggcaccctgaaagacttgatccttagcttcactgagtaaaagaaaaatacaacttcatataagaacctctttcaatgtcagccaatcaagtcaaaagaataataaccattccgtcataggttctcataccatgagaatccctgcgttggaatgatgtgcgttgaccagcaactgagcaagaagttccagtccctgtataatgactttgacttagtagactgacgaggtgtcaaaacactaataagctctaaatatcaatcaagaagagccaatggtttggaaaatgacctccttgcaactttgcacatgaatcagaggcatcaccaatgctcttctcaattgagttaaaaaacccctcactattagtacctccatcagatgcccaaaccgagctatgatcaaaaagtttcctcttcttgaaaggaacagtcatttgagtcctttggcgtttgtagcagtccttcctaccacggcaacttggtttattattgccatctgaaatgtaaaacaaatgtaattgttagaaaatgcaaaagactaagccaagaatatttccaatagaacataactaagagcttgtaaaatacagaggccttttacatattgcagaaccactcaccaggactcgaaagtgtctcgtccttaaactttgacccgactttccaatatttagaagccaatatttttcttatccttcggtctccaatccgtggtactcgtttcaagtacctggttgtggtgctggggtgggtacaccccgaggatttttcgtcatcatctctactaactactttcacatcatccctagtagagggaagtgatgtctgcgggacgtggtccccacacaaaggtgcctttgcactactgtctgaagtgggcaatacaagaggtttccccttaaagacagttggatactctgaactgcgcctatcagctgcagtgccaattagcacttttccagtattatttgactcgtcttttacaagtgtcttagtttcaccttctaatttacagtcaccagactccctgtacatagacaagccttctatttggctacaagaacttcctacttcattcttaattttgctagcatcagaatttattgcaactaacctctcagagcaattagaagttgtcattatagaagtaaagctcgaatgatcatcatttttaggaaatgaaggcttcttcgagctgtggttcacactaggagcttgtgatacttgctcagaaacaaaaggtttcctgtcacaacttccttgatcacaagtttccaccttcaatgccacatttccatcatgccgatcttgatcaacaattatgcacttgtctttctgattcgatgtattacttgaagcgggagtactctctttctcaagcaataacttaccagctacagttgccagcaagtcaaatgcacacatttgattttcttcagctctctttttaactgtacccctccgctaaaaacacagaaaaatggacaatatgaataactaatgtttgaaacaatggagaaattaacaacagagctgatattgattgaataatagattgtacttaccctagctgatctagtagctcgaggcatggcaggtacttgataaccattgaatccatagtctaacctcttctgcaacaccatatcgggaaatcataacacttattaatcaatcacaaagagatagcattcctggggacgtttgttcactacactagggccttcactagtcacttttgatcacaaagtccgaaaagaaacaccctgaaagaagaatgagacaaatcaattagtacgatcaacataactgcgaatatagaacattaaacatctataacaccaaccctctatcactaaaatgcttaatgtaagatgaggaatgaaagacatcaccctcggcaataaagaaattatatataattcatgtcttaatcaagattcaatctcaaactttcataaatttttcatttttataatggtaatttgcacaacatcagaatttcaaacattgtccaggacttgaggtttaaagaccacttctatctcttgaaacttttgaaagcggaaatgaaaattaacac

SEQ ID NO: 36892 - DNA, 6298 bp, Cannabis sativa
tttatataattttaaaaaccaactattattataaatattgaaagtttatatttagattaaattactatttaattctgtgttataaaattattattcaaatacatactatatctaaatacaatatatttaaattttaaacatttatatttataaaaattataacgttcaagaagaagagtaattttcgagatgaatgtacaatgttgaagaataaattgatataaaaatttcacactaatttagtggtctgaccctaaatatgctaaaaaaacactttttttttttgaaacaaaaagatttattgagtaaccaataccatacatttttaaaataacactgttaaaaaaaaaaaattaacaaaacagaaaatgcatataaataaaataaaaaaaaaaaaaaaagttaaaatgtagagaagagtagagaagataagccgttaagccttaagggacagttggaagcaatgtatgccattgccactctcaccttcccaactccccaattgcgccttaatccacacccattttccatcactttcccgggaatctctaaaactttctcttctactatcttctcctcaccccacaaactctacctttcccatgttccttctcgtgctctcagagtctccgctagttcccaaccctcttcccctgcctcaaccgagacctcgaagctctcttctgtcccatcccagatgaaggcttgggtgtacggagaatatggagctgtagatgttttgaagttggagagtaatgtttcggtcccagaagtgaaagatgaccaggtcttgattaaagtagctgccgctgctcttaacccagttgatttcaagagaagactcggcaagttcaaggccactgattcaccacttccggtaagttcttcatttcctttcgagcttttatagtttttagtctgatgggttgatgagaaaatgcctgactcgtattgggtattattagattttcccattcattagctgctttagaaaattttctgttttcttagtctgtttggttgatgagaaaatgccagactcaaaactgagtactcttataattttctcattcattagataatcgtgtttggttgcacaaactaccaaaaattacactatgagaccataaaaaaaaccataaatttacattgttgcaaatttaacattttcatgttgttaatggttataaatattattttgagtatgaaacttgtagggtcacaagttctgattttttcttattggttttgaagactgttccagggtatgatgtagctggtgtggtagtaaaggttgggagtgaagtgaaggagttaaaagtaggggatgaagtatatggagacatacatgagaaagccttggatggtcctaagcaatttgggtctcttgctgagtacactgctgttgaagagaaacttgtggccttgaaacctaagaatattgactttgctcaggctgctgcacttcctcttgccattgaaactgcttatgagggccttgaaaggactggattttcagctggaaaatctattcttgttttgaatggtgctggtggagttggaagcttggtcattcaggtatctttttagttttacctacattgctaaaaacagaatagttacaatggaaaacgacaatgattacaaaccatgttccaaattccaatcatgtgtaataaaactacagtaacttcttaagcattaaaattaacatagaacgtaattttcataatgagcactataaatcttaccttaactcgttaacactcattgaaatttgaggcatgtaggcctagtttaaattctgagctacaattcactccaaagcataatcatttgcatgagcaaaccacatactttgaaatgcacatattagctgttattaagtcattacataattggtctcctgagcacataatccttttgttattcaattcagtaattactaattactctaatatacatcaattattacaagagagtgagtgagttactgaccacaaatcattccaatatggaagtattgggaatgaaatgcatttgaaatttaatgtataagccgttgcatattgttttcattctcttaattaatagtaaagctgtcaatttctgtgtcttggttcttcacagctggcaaagcacgtatttggtgcttcaagagttgcagccactgcaagcacaggaaaactggagttcttgaaaagcttaggtgttgatttggccattgattacacaaaagaaaacttcgaagatcttccagagaagtttgatgttgtttatgatgctatcggtaagctttattcattaactgcatccgcaacaatccttttactcaaacccgaataataacaaaaacagaaatttatgtttcttttctcctggtattgaaccagagtttttcattggggtaggcatgataattttcttaggggtcatttggtatctcatacattattttgaaaagttaatgtaaaattatcaatatgtgttatccattgcatgaatgtttagaaaccaccttaaaaagctttaaaagctttaagattacctctcagggcttcaaaaatagaaaaatttcattaccaaaatgagattgttgaagatctccatttatatggaaagattacaccataccaaacaactcctagagtccaataaaactaatcagttgcggactttaaaattgaagggataaaagattgaggaggcatatgacagttttgaggatatatatttttctcttgtagtgaattaaggattttgaaggtggcaaaacaaaacaaggaaaacttttactcttgggtttaagattaggatatattttcaaccaatacattattatcatctcaaatattttctatattatgacaatggcagggcaatgcgatagagcagtgaaagccattaaagaagggggaagcgtagtggccttaaccggagcggttacgcctcctggtttcagatttgtggtcacttcaaacggtgaagttttaaagaaattgaatccatatttggagagtgggaaagtgaagccaatcatagatccgaaagggccatttccattttcacaggttgttgaggctttctcttacattgaaaccaacagagctgtggggaaggttgtcattcatccaattccataagacgaaatatatctaaataaataaaagccattttttcaaggcatttgaattatatacgctatggataatattgcactataaactcgaaagttagtctgtataaattaatggtataagtgttcaatgttctctaccattttaaattttacttccatctataaatattacttgttttattatcatgtgtattggtatatgcttttcttgttttagcatcatcacattctcatgcagaactagagccaaaaaaaaaaaaaaaaaaaacttttatattcagagcagcgctatggggacacgtgagacacattctataatagattaacggtattctataattaaataagtttaatcaaatattaaattacactaaaaataatattttcactaaaatttaaatttggtgtatataattcattcagtgacgctttaaaaacagtatttctataatgcattcttttaaaatatatctatccatatgaaccttaatttgttgcatctaaaaagatttgtttagcttaatttttgtatggtcgactatgttatagctatttaagacattcaaatatactgaaaataaagtttaaacaatccttagcacgtgaaacttttttattttatacgtgaaataaacaaggttcaaactcttttattttgacaaataattataaaaaaaaataagaataaaattgctattagacatcagtagtgtctagtatgttcaagacgtgtcgccttatgattggttagagatactctataaaagttattatattaaattatataggacccgatacttaattacatcaatagcgatattgacacgtagaagggtactaagcaccagtagtagccctttagcatttttcaaaaagagcattgctattagataactataaatgttattctattataaactatatgagacccaatacttaattacactaataataatattaacacataagagggtactaataataccttttaccatttcttcaactctacgtaaattgttattcattgctacacaaaaaaaaaaaaaactctacataaattcattttcaatacatcaattaaagcattatatatcaataattagtacgctaataattattctacctaactatcccttaattattaattaattatatatcaaataaaccaatctcattaaattcaaaatcatatgccatacgtaagtaacttaactaacatggcctactattcctaaccaccttatttttccctaaccaattaatttttgttcttctatttggagtttgaagaactttttaaagctttaaacttcttcctcccatattttttattttttttctttttaatttcacaaagtcattgaagaggcacccattatcacagaaggttcaaattcaattatgtgcacgttagtgaagaaaggcaaaatcttcatactaaccctaacggctcaagatgaacacaggctaaacccaactcttatcgattcaattcactcagccatacgcagagtcaggtcagaggcttcttcttcctcatcttccgctctcattaccacagcccaaggaaagttcttctccaatggctacgaccttgattgggttggttcatcccaaacccgtggtcctcttctcgaatccaagctcaaaccactcatcgcagaccttatatcgctccccttaccgaccatagccgccgtttccggccacgcctctgctgccggattcatactcgctttaagccacgactacgttctcatgaggaaagacagaggattcatctacatgagcgagctcgatattcgactaccgatctcgacctgggtcgtggctttgatcaagtgcaaggtcggcgcgccagcgactcggcggcttcttcttctgacggcagcgaaggtaacggctaaagatgctatggaaaagggaattattgattcggcgcacgatagtgctgagtcgacggttaaggaggcggttggtttggcggagaagttagtggagaggaaatgggatggtgacgtgtatgcccagataaggatggaactgttctctgaggtctggggtcaaattcgcgtggacaactgtgcatccaggctttgattattgggccggccttgccaaaggcccatatctatctaaatctacatataggggtttttttttggataaatatgggaatatacaatagagttcacttttttatatgacaaaaataaataatgtaaaaaaatataggattaaaaaataattaaagtttgaaatatgaaaaaatataataaataaatttgataaaactttaataatgagtttttctggaaaagtcattagaaaagttattattgccaaaaaagtaattgaaaaagtcactaaaagtagatgtcttagtataaataaaaatagaattaattttataatatattggataaaaataaataacacaaaataactcagtttataattgaaatataaccggttttgaaatataatgaataaaaaaaataacacaaaataaatcaaaccagtgttataatgaataaaaattaataacacacgaaataactcaaaatgattataactaaaataaaatcagctataatgaacacaaaaaagtaacatgcaataactcaaactaattgcaaataaaaaacaaagagaaagtcaattacttaaacattaaaacatatattaaagacaaaactagttccacaacaaaatatctcataacacataatacctcatacaacccgttataatttttttttaaaaaaaaatgggaattaattctaaaaaatattaaggcataaatatgaaaataatcggttccataataaaataaataaactcaaattataacacataaactcaaataataacacacaataacttaaatataatatgaagaaaccagctatatttattaactaattaaaaatttgagaaaaaattagttccgtaaaagaactaagataaaaacacacacacaaaaatcagttaaataaaataactcaaacaaaaatacccatttaacatgcttcaacctaccaaataattacactcatatcatatctaccccaaaacactcattcattatgatatataaccggttttattttagttataactgatttgagttatttcgtgttatttgtttttatttat

SEQ ID NO: 36893 - DNA, 5845 bp, Cannabis sativa
agcaaatacatattttatgttattcatactaataataataacggatatatatacataatagctagcgcataaaaaaaattatttgttgattatttttttacactttgtgatggaatcatttcgataaataaagtgaatgtgaattcaaaaacttagtgtataatgtgatgcaattatatgacactacaccgaacttttgatttagttaataatgtcactaatattatacatttatttgtgattatatcgtagcaagtgtaattgcaatcacattcaaagttgtagtaagtgtatgatgatgtcaattaaaaacttctatataggagagacatatagatgcggattaattgtcactcatcatattaaaatatatatacctataatatataagtaccatatttgcctaggaaaaatgaaaaccttggatcgtaaacgaacgactttagtgggaaattttgtaggcttttgcttagttagtactcttaatgagagtctaaatctaaacaagatcactaaattaatggctcttttgctctaaaagcacgtaatcttaatctaatataatacattaaatatatatataatttggtgtagtttagatatataatatgtaattcatattttaaccctctcatgcgcgtacaattcagttctttttatgttttggtatagttataacaaaattagctacattttgtgtcttgcttttcattagctgcattttctgtttcttagttaatgtatgtacgtaaaacagatatatggattggatgtgaacaaattaggtttgtattgcacagtaatatattaaattgtataattttgatatatattaaaatattatatttgtatatgcacacacgagttcatacccaacatcgtattatataatatataatataatttaatataaaaatataacaatatatatcattatactacaaacccatataattatttctatgaggttggtagtgaacaaataatttaccataataagtacactttaacaaattataacgttatatactatatttctatatcaaactatactaaatattaaaccaatggtgcaagttgtggatttgtcgactttgattgcatgtgcatgctttatttcatagttttaattgcttgataagaaatcaagctataatgcacgcatgtgcaactaattcgatacccatatatatttctatcaaagcaatttaaatgttaattggggtactatagttttggcagatcgatagctaattaatgcaaggattttagagaaaacacaaatatatataataaatatacatttatgtatataaacaattaaaaaaaaaacaagatgtaaaggaatttaatgaaccccttaattaattataaaccgaacgttgaatattgcattccatcttgacaaagtatacaaattaataacaccctctcgaaagtaaacgtatagctctaacaaaactgtgttaagctttttcaattaagaatgtataatggaaaaataaattataaatcaatggatacattttatactcataaagtacttcaaatatataaatgatgaaattacacacagcttcttgatcatgatcaacgtaataaaaaatgcatgttaataatactaaaattatatgtattgcgtttttgagaaccaccaattcatttcacgtggttttgttttattgaatatattgcgacaaattaaatgacgaacctctcatcacgtatatatatacacgacatgatcaatcattattatatgacgatcatatcatatatatatatagatagtatcattttttttcttgatcaagcgtagtcacaaagaccgtagatacaatactgtgtatccttacagcgatagttacattctccacaatgcctcttgtcgaaagccaggtcgacgcactcccctcggcagcaagtctgagtgtacttacacttcttcttgcaggcgccgcagttgtgctgatcgtacatcaaatccatgcacttgttgttgcagcaagtagtagcatttccgtagcctgtgtagcacacctcgttgtccttgtggcaatggtctgcggctctagggtttctttcctttgtatcagccagaaacctactcactcttttcgaaggaactactttctctccatcttgatcattttcttggttcagctctcccttctgactccatccaatacctttctcttcttcagtagggttggtcagggtgatcaaggccacggataaggccattgctatggcgaataggaagattatcttgatggcttccatggctacttgataccttatttaagtctgttttgttcactataatatacttgaaaggggaagatgtagagatggaatgagaagaggaggctagagagagaattaagagagagaaagaagttgtgatttgtttggcatgtgatggagggaagacttgaggtttatagtagggtttgacgcgggaaaagtggtgaaaggtggtggtttttggggatgtgctacgaagagtgtggtcgaataattctagggcttatactttatacatagaaaagaaacttaaagaaatagtgatttagagcactccatagtatatcatgttaatgacatgcttgaaattacaatttcagatggcatgctttgtggaaagcaaactaaaatgtcagaaagtcaaaagggtaatatcggtatttgtgatccttgatttgtgatgaagtaaataggggagtgccccattagcaagagctcattaattatgtgcaatattgggccgacctgaagaaattttgccatgcctttaggagaagcaaaggagttttggtgtaatgataaaaaaatattaatgcatggggggaagtactacacacactatgccaacagccaaatggacccttttcatacaagactagttgacgttttccgttaattaaactatatagttgaattgaaccctaagatgggtcttagtacaacccatctcgttttccatacatattactctttacaattataattataaaaattattcaataattaacatgtaactgcaaagttagcaatctctcaaggctagagagaatacacgttttctatgtaacaagtaatattggaaaccatagtgagtatcgaatggaagagcaacacatgtcatgatcaaatcgcgcgtctccttttcttttttatattgtttgactagttatgtttacaatgaacgttttctattaataatgatcatatataaattctgttattagtgcagtgttttttagctttgtccctatagctaacaaatacgtcttattatatataatcatatatatatatgatgacagattcaagcaatagaaaataaattaagaaaatgaaaattgatctgcgcggcttcaatttaatactgtttgtttatgtttatgatgttgccttgttgtagtgagaattaatgcatcatcatgttaaggttctttctattatttataactaggaaacaaattaaaatttgggtgcagttatattttgtttagtaataataaactataatagaatttgtatttgttatttttatttctttatttcgttagtggactactgctgtgagcttcttcctttgtggtccctttgcaccactttaaatactctgtattaattgtttcctaaaatggtttgaggaaatacaaaaatctttgccttattctgagatggtattagagctgtaaaggctcctccaatggcgtctgaaaagtacaggctcaacacccttgcttgaaaatcaacaacaaaatgacccaccaaattcaataccaaacgttactaccaatattgttgctttagccacttaatttccttcagtcagccaaacactatccatcagacaaattatcttgtttggaagatgcagatgctcaacatcattatccctaatggtctattacaagaaatataacttttagctactaaaaattttagtagccaataatggatatgtggtagctaatacatgttttgctatcaaattttttggtagcgatttgttagttcaattatggtcgctaaaagtactatgctaccaaattttcaatagttgttgctattctttttataacaaaacatatttattctagtagcaaaattattaaatttaaatatccaataaaattatcttactaccaattttttgtagcaaaatatataaaataattaagaataatattaagtataaataatttggtagcagaaatctgattttttttcttttctttaatataatatatattattaatttttcaaatacattatcaagaacttaagtatattatgaaatttaaatatacaaaaatacttaaatttattaaagaaatttaaggtatataatttgtacacgcatcgattcatagatattgaatcacatttttaagtgcacacatgagcaaatctagaagtagtttggcttcttgttttggaatattactagatccctgcacttgacaaaactgcggagagttccaggtgaaaagagtcctcagaatatagtatgagcatctttgattcttctccaagtctaagagcttaagggttcgtttggtatgccgtattacaccgtattgtattgtacagtattatattaaattgtacttcatgcaatatttgtatgtaagactatatgtagtattaagttttatgggcacctaaatatataatattttattataaattaaagtttaatatagtattatataaaaatataatatatattctataatttaatataatacaatacaatacgacttaatacaatgtactaaacgagtactaattaagtagtgttgtcaaggtagctccagaagtagatttcgaataacaagaaagcttctggttgtaatgcaggttttagcaatacttagcatgtggtcaagcaccttcagttgtaatacatgcatttccctctcgacccagtttgatagtctccacaaacaagcacaaccctagcttgtacgcgtcttccgggacctcgcaggctaagaacttattctaaagtagttttgtcttcacattatctgaccggttgaaatagagatttatcaaccgattagaccctgacttggcttctctcttcgtctgttggcccctttgtgaagttgaggcctgtaatcagcgcgaactcccacaccaaatttcatctcgttccttgcaatgtaaaaccacattttgtcatccttctcaacattcacaatcattttatgcagcatcagttggtggaatagtactgacgaaaatgatagagtaccagcctgccaaaattgaccgaaaggacttgcctttgccctatcagtcaaactgtgcttcttaaattttggtttgatcaacttgctaaaaacaccacttcctctgtaggtcacacgacctgcaaaatgctcagggaatggaactataagcttcagagccatctgcaacagagaaaaaaaaaccagcaatgatatcgataacatatcgataatatgtcgatattgcatcaacatccaaggaaagaattaaaaaagagttcatcatcctatttgtcgacatcatatcgacatcctatcgacaaaatattgatatgaaaactatttaacccagtttaatgtctttgctttaatatcgacatattatcgatatcttgttgatatcctatcgataaacagtttaagaataaacctcctcaaatatgtcgacaaaccatagataatatgtcgacatcctatcgataaacaatatttaaaaaatactcctgttcaaatatatcgacaaaccatagataatatgtcgataacctatggatatatagtttaacaaaccaagaaaaatatgttcaaac

SEQ ID NO: 36894 - DNA, 2716 bp, Cannabis sativa
tttttttttttttttttttgagcggttcaaaaaaaattcactaatgaatagttcgcaaataagcttccaactctccttattcaagtggtcagggagtaattcaagaactttctcttaatcttccgatttagtgtaatgttgcttaaaccacttatgtttgatggtctttcgctcactatacctctctaccatctccgtatatagagtccatattagtaggtctcgataggaattcctatcaatattaaaataaaacagtatgataaagcaaataagaattcatattaattcttaaacgaccttataaaataattaaaaccataaataattaaaagctactcacccttattcgattaagaacttgatctttatattgttggggtatatcaaaaaaattgtaaggatgacctagacacaaaagggttacttgctggcccagaaatcgaatataagcaatggctttagttccaactactttgcccgtactaaggtccacctcaatttctaatggtttaccaagttccctccttcattgttaaagtttattgtttgaagcaaggccacaactctttctgaccgttgattgggctttaattgttggaggaaaaagttattctgtttgtacattagaaaataatcatatattaatagtaaaaataatattagagataaaaaatatgaaacatgatttgcaagacgataatactaaagaatgataacggggggccataccatccccactgcggtacgtcactatatcaactgacattatactttactttggagaagaacaatgtaaaaatataaaaatctacgaaatgcaaaataaataaataaaagttgacacaaacataaatgtgaattagaaacatagtgttattcaatcattagagttttattacaaacaaaagtaaaattaaagctacaatgaagaatcactatcatttccatcattcattaagttctcgttttcatccttaacaagttcgactagtaaatcatcgatttttttagcaacgtaatcttcatcaagctctttgtgtttgctctcaacattcactgactagttgtccggttcaacaattacagctcaaggtaaatccatagctttggtatatggtaaattaagtgtagagtaactttgttctagattttatttgtaaatataccaaagttatagtatatttgtaagtataccgaagctatggtacattcttttcaactatttttttattaactatatttgtaaaaaaaatatgaatattttataaaagatgataatattatttaatattttatgtaagaccataattgtaaaagtagattattatttgatggtatttaatattaatgacatttaatttacatatgtttaatttggaaaaatttaagtgagcttttattattattaagtaaataaaattaatcttactaattaactaatcttattattttgaataagttaaaactaatgtaaacaaattaatttttcatttctactataaaaaaatttatggtcatatcagagttagaaaagaaaaagtaaatttgataaaagtaatttttatccaatatgaacaataagcccaagaattttagcataatatatatatatataaattaaatctagactaataaaaaaaaaaaacaatacctcttgcggcctattaggggatcctcactatcttttagtataattacgatcatctaatctaagaacttcgcagaaaaattcacaccacaattttccaaacaagcctcaacactcagaaatagattgagctattagattctataggatgaacaaatttatatattgcagtgtattctcaactcatgagacactcgaatttagatagggtagatcacaatctcacaccacactagatggtgttgtgcgtgtgagatgatgagagagagtctgtgtgtggtgtgcaagaaagagaatgagggagtgaaattcaatttctattttttctcttcttaacgtatatttcaaattgttacctacattttatttatgattctatatattatttataatattataaataaatttttttaattaattctttaaaataaaaataaatatctaatttaatttgaattcagaatttaaattttaatgtaaatatctaataaatgattatcaaaaatcagttaaacctcttttattttattattatctttttagttaaatgatatatttaattcagcaattaatatataattaattaatttaatttgaattattttaaccaataaaataattaaataaaattaacacggtcctttatatgtcaccctacacatgtagccatattttaaggtctaaaattaatttatcagttttactataaataaaatttattatttattctaccaataaacaatattatttattctaccaataaataatagttgattaattctcattaatctcttatttcacaaggattataataaatattattttctttaaaataatatatttatctttgtaatattatttaagaataatattatatttaactaattgatatagttttatctaataaaaccaaatagttaaatactattaattatacaattcataattgttataattattcaaaacaataattttacaaattgttattttgcccataagaatttatttctcatagaaattaattttcactcaaatttatgttagtttttatgccctaaataaaac

SEQ ID NO: 36895 - DNA, 2176 bp, Cannabis sativa
  modified_base (298)..(308): a, c, t, g, unknown or other
tcataattaataaaatgtatgataaattgtaaataattttttatgcacatataatataattaagtactataatgtacataaaattataaattccccataagacacttgtattttgctctcttgcttcacattttgcatcgcctctaaaatattattttatttaaatatgctaagaattggcgcactgcttttattatttttattttactacttttattataatattttatttttaagtaaagatatagggtactttgatggtgtacctataaaagtatatattgatatatatatatannnnnnnnnnnatatataaatatatataagcaatttgcgatgaaattctcttatattttaatttttatacacttaacctttttattttattttttggtggtaaaacccccttaagtttttttttttttttggtaaatttgacacaccggttaaatattaccattaaatatcaactgaatgaccactgcatatgtatatatgtaacagtaaaacttcgaagtcgatagagtagtaatttagttggtatttgacggtaatatctaactgacaccttaaatttacaaagaaaattaaacttagggagtttttccacaaataaaaaagataaaagagttaagtagtgtataaaaaataaaaaataaaggggtttcaccacaaatttctctctctatatatatattttttttattatttttgatattcaaatagtgttaattttaatatttttaatataatagtgtacaatttaagataccctacaaagtctttaaataaataataataaaaaacaaatatcctataaacttttcagaacttttgcataatttacaatacaaaagattcaaactgtctattttacacatatatatataataaaaaaatacacgtacaataaattacttaaaccacgtgttcaacacattacattattctgaaatttttgaaaatttttatgatatatatatcttaaataattacaatatatataatttaaattaaaattatctacatgttgaaatagcatatcacatacaaggtaacattaatggttattatttttgggttattgaatgttgaataaattttttacagcaaataaatctcttgttgaattgattgttctgtatttttctttttttgggaattttacaccaaataactaaaaattctttttatttataattttagtcttataggctttttttttttttttttcttttttatgttttcacatttttcttttcatttatacggtgctaagaaagtggctgacgaccgtggtccccgcttacagttgattggaggaggacgcacatgcgcatttggagcttatcctgtcattttgtttttatgaaattaaataatgcttgaaaactaaagatgatattaaataaaacaattataaattaaggacataaagagaaacctacaaatagtaatgtcattgtaaggtaaaagtgacaactatagagttgtaatcaaattttttagttgttgctatttagttgttcaactaagagaaaaatgagtatatgtttagttttcaaggttacatatatttttggtgagcaagtgtattataattgctattaaattccttttattttgtaagattgttatttgatgtcttatttttttatgcctattatgtaatttgtatattaaagtatagtagttatacagatatttgtttgttgttatttagttgtttaaacatgtattaaagttgtttgggtgttgtatatgttttttaaaattgtcgaaaatatttttttgtgtctacttgatttacatatttaattcgtgttgttttgtatttgtatttttgttgcatatttaattgattttttttttgaataaatagtagtaaatcaacaaaataattacataatttaaacgatgtatataactacacactactagaaaattgggttttagtgacacacattgagtgactctaaaattatatagtgacacttcaacgcgcgtcactaatgagggtgactggaaagataatttttagtgacacttcacacgtatcactaaacccttttacatttattttatgcgcgtcactataggcgtatagagtcagattgaaaatgtaacagccacacacatgaagtgtcactatatctttttttttttcttttttatt

SEQ ID NO: 36896 - DNA, 3074 bp, Cannabis sativa
ttttaaaattcaaattcatttaatgagcgtgatacaccccgcaatcctcgactaaacctcatggtcaactatataatagagtaattaagtcaaacaaaatctatactccaatcatacactgccgcgtgtcgtgactccacgtgtcattttcttattcactgttgagaaaggcccgtggtgttcgtacgccacagaatgtcaataagcccatttcctcttctctctcctccattatatataatcctcagtacaactacaacagccttcacaactctctctctctctaacaaaaaaaaaaagcttggtttctctctctacaatggcgtcctcaactcgtcaaattctgatcctagggttagcactatgcgttatgctaatctcacctgcacattccagtacgacctgcaaatctcagaaattcaccggaaagaagtccttctccaactgctccgacctcccagtcttatccgcttccctccattggacttacgacgcttcaaactcatctctcgccatcgcattcaccgctcctccttcaaaacctaacggttgggtagcctgggctataaatccgaccggaaccggcatggtcggagctcaatctctcatcgccgttaaacactccaacggatccgtttccgtaatgactttcaacatcagttcctacagatcgatcgttccttcgaagctttctttcgatgtttggggacttagcgctgaatccgtcgacggaaacatcacgatcttcgctaccgttaaggtaccggagaaagcgaagactcttaaccaagtttggcaggtcggttccggagtcaaccaaacgaatggatttcttattaagcacgatttcgctccggagaatctcaacgctaagggtacattgaatttggtgaccggaacaactggtggtgatgctccgtctatggctccggctccggctacaggctcagcttcttctccttctggttcaagtaacagcactggtaacggtaaaaatggaggtgtttcattgatcggtaacagtaataatttgggttttttcatggtttctcttctggttcttgttaatctccttgctttttagatttggtgaaaatgttattgtagaagctttttattatttttaatttttaaattgatgaatagagatttgtttcttcatcatgtggagaagatttgactatttgagtatggacgatttatagcttgagaataatatttttaaaaaagaattatgtaattttttttttcttttgtaatttttctcattttggtataaaattatgtgttactaaatataagcgttttttttattatttattgggagagaattgaattgagtggaagaaaatcatctgccattatctctagtgggcaaagctattataacctttttttgttatttttaattaatttacaaaaaaagaataatgaaaaaggaatacccttttcatttttggaaatatatgaattaaatgaagttcgaaaaagggtaatcaaaattaaaagctgaaggttttttgtttgtttcttgatagtatgtttggttgtcgagatgtttaaaagtcgggattttggtaaatttataaaagaagtgcacgtgattgaattgactatttagggattctatgtataataatatgtaattaccagcaaaaaaaatgtataagatgaaagaaatgagggatttaggcaaataattggtactcataaatcataagtattatacttattatcgtgtataataatcatcatagcatactctatttagaaataaagttacaaattgggtttaaaaaaaattacaatttaaattatattttttgcacaataaattaattgatttttttaaaaaatattgtaaatcttaaataccattatgaaacaaaattagattaaaaaaattctctacatacaaaaaaatagtctaagagtaaacaagtgagataaaactcaatcatggataaaactagttttactaaaaagtgatcatcactattaacaatactagaagaatacataaaagaaataccagtatggcaataaaagagtaatttgcagctaaatcttttcaactatgattttacttgcacttaatcttttaatttcaaattttaatggtaaaactcatcaaactgctaaacacttaacaaatttaaggtgctatctatttatcttagttaactgctgacatggactatctacgtgtattattatagtcccctaatataattatttaaaaattataaaaaatatttttcagaatttattttaaaataaaaaataataatttaaatttataaaattattaataaataaataatttgttttttattttttatttttatttcttcctaattttctctatctctttttctcattgatctctctttctcactctctctccctgacccttcttcttccttccaaccttaaatggatgacaccttaacaccaaaatttgaaattaaaaggttaagtgtaaggtaaatcatagttgggaggatgtagctgtatattactcccaattattaagtaataatatctctaacaataacattaataagagtaagataatcaaattccaacaaggggacaagcttcagctacatcaaaagaaaaaacaaccaatccaagtcctagtacccaaagttaagaccaagcttgtatcatcacaaatctaagatgatttttatcaaataaattgggcttgtgttttgtcctaaaacttcactaaccatttctcccaagtctatctacctctaattgagatttcgaggcctaccaacctaatcccatctcatcttattagtcgggttgtttgaaaaactacacctaaaactattctaatccagttaattgaatgtaaaaaagcatacataaattttaaattatttaattgattagctgtattgtcataaatgcatatttatgtgttgtttcattatttaaagggctttttcatttgtttattaaatccttatccctagctaactatagttactagccacatgtattgtttgcttaataatttagcatctttaatctatatagacctctgaatctgaaatcaa

SEQ ID NO: 36897 - DNA, 5569 bp, Cannabis sativa
tgtgggttgggtccgatggggttgtgggttggggtccgatggtcattctcgtggggttggggtccgatggggtatatgggtagggtccaatggtccgatggatggggtccgatggggtatgtgggtatttgagaaaaaactaaccttggacatatttcccaatgtcggtggttaataccggtgctggtggtggtcgtgcgtggtcgtccggtgctaaaggtggtggtgggtggtcgtcggtggtcgtcagaggtgaaccgatggtggtgggatgtggctgtaggttgtgcgtgcgtcgtgttcagcgagagggagagagaaattttgagtttttgattttttcaaatagaaggggtatttgtgggatattaagaatgtggtcatatatgaccaatattattaagtatgcatttagggaaacaattttaaggtcttacatggaatttcaaatttccctaatataatcatgttgctttagttaatctctcatctgttttcacatttagaagatatttttagtgtatatttttttatataattatctaccttataattatttaaaattaagtaattttcaaaatattatataccaaaacacccttttaagtctattagataaatttctaatatttctgtccatatcatctaaaactgtaattaagaaactcccatggtgtgacatttaaatatttttttcaaaaaattaaaataaataaaatgatgaaccgacactcgccggtacccgtctgcaaattcagtgtaaaaataagacatttttctaatttaatttcttctgatttcgataaaaacaaagatgaaacgaagaccgtggccgtttcgatcgaacggctcacgtctctccgcccttccatctcccaacatcaacggtggaaaagaggatgaacgcgcgaggagacaacggagcaccaaattcaccaccctcacaccttcatggatatctccaagccgtcagattcaatcgcgctcgataccttcatcttcggcttcgaaggacggcggtgatttcaccgcacttccttacgacgtactgacgaaaatcgcagcctccttcggcgtcggcgatctcagaacggcgtcgttagtgtgcaagccctggtgcgacgcgctccggccattgagggaggcgatgatgttgttgaggtgggggaaaaggtttaaacacggccgcggtggagttcggcccaatttggataaagctctcgactcattcttgaaaggcgcggctcgtggctcgactctagctatggtcgatgccggtcttgtgtattgggagtcggggaataaggacaaggccatggctctgtatcacaaagcttcagccttaggagaccctgctgggaaattcaatttgggggttgcttatttgcaaggtagtattttgaagctttctatctttatccatggaatccttacaaatactaattaaacatgaactttaatttgtttaaataactgaactatatagtttcaaaaggtgtttaatttattcaaacccattcattttggctgatgcagttagtaacttgtatttttttttggttaatgcatactgtaattgcttgtgcttttcaaggatttgtgaattgtcaacacttactttgaaggttgtgatattgatctatgatttttacagtgtggactagtcactaatgaacgatcaacatctgtgtagctgaacctgcaaatgctaaagaagctgtgagatggttccatgaatctgcaatggctggctatgttcgtgctcagtaccaacttgcactttgtctgcatcaaggtcgagggttggaccgtaatgacatgcaagaagctgtatgcaattcaatcttgttatttgagttttctataaaatgaaactgtttatgtggaaagcacacaatgaagccttaatttttgttgctcactacttattgtatatgcggtaaataacttgtgcaaatgtagatgggttagcttagaactgtttatcttgaaagtttacattataaattgatcttttggtgacacttgcacaatagttttttggtatagtgagtcagtgactgatttgtttgcatacagatacatagatttatttgtcagtgaagcacatgcaaaaaaattaaataaaatgttttgttgaaacaggctaaatggtacctgaaagctgctgaaggtggctatgtccgtgccatgtataatgtttccctgtgctactcgtttggggaaggcttgagacagtgtcatcgactagcaagaaaatggatgaagagggcagctgatcgcggtcatgctaaagctcaatttgaacacggactcgcactcttttcagtatgtcatagcttataatatgcacctgaacacatttttaataaataattagcaatagtagcttctgcttttttggttaatgtattgtgagagatcaaccactgtggctgcttgtttcaaaacttaaaacatatttgatgttttgttgacaaaagaggccaactttaagattacttaaaaacttatcttctgttgggttgtcaaatgacagttggttaaaaccttaacagagacaagttgtttactctttttgatgtgtaattcttggacaggagggagatttgtttaaagctgtagtgtatctggagcttgcgacccgagctggtgaaacagcagcagcccatgtcaaaaatgtgattcttcaacgactgtcagagaaatctcgtgatagagtcctggttcttgcagacaattggcaagctttgccgtcagggtcatgagttttatagcacaggttcactgtcaatatacattttcttgtctttcttctgaggctacaatatcgtcttattgtggttgtggatgaccttatttgataagaaaaggggacatgggttaactgttggctcaatcagctgtttgtatttgtataaaggctcctagatgtgagtgggataactttgtcagtttgcagacctgaatctgaggtttcctccctttgaagtttgggccattatttaatgatatattcgacaatatcttgcaagttgggcttaaactatgtgttgtttagcaaagttcaaccatgaaaatctatcaggctctcattataagttctactttgattaaaatcttaagacctccatttggagctttgttagcactttaacggtttggctgttttgtttgtatctcaattctcaaggaactttagcattattagatttggttggatttttcttcatccgtctgaatttgttttatttttctttttttggtaacaaaatcatgattggttcttttgggaagaaaaacaaaatgaagatgagattgaagtggtgtgggaaactagccaggtgtatgagtcggatgcatttggggcagctcaactttccagcaagcaaatgaaatcataagattgccaaccagattactacacagttcgattccgcctgggtgctgggccaatcgcaggcgaaaaattgtaaagtgtactttaaatgcatattcaagtcttaacaaattaggttgatccaaaaaaaaaaaaatctaacaaattaggaaatataattggtataaaaaaaaatctgaaagaataatatgttttctcaagtaaataaccatgtaattagattttattgtgggataatattcagcttaatatatatatttgttttaggaataaacaaaagagattagtagataaaccgtaatattgttacatattcggtggagttttttctatttaagaaaatttatcatctaatctaggagcacgttaactcaatccatgggttttttgtaacactaaagttgctattaacataaaaaagagatgtgtagaaaaagtactagacaataaaacttaaatatctaaaataataagtcctacttttattttatttctcattctacaatagagtgatacgaatggtatgcctcctattaaatttacttatgctaggggtaagcaaggtaaaaccaatgatgtgttggcttaagaagaggtattttggtaattgtacttagtggtgagctaccttttgtatggagagggaatgttattttcggttatgcaatttgtaatagagaaatctctactgcatcaggagagagctaccttagctctctgccgagtgtaggagagtgtctcattttgcctttaattcaataatagctcacctattgattcaatcctactatgtttctggtttatcgtgtattgttgttgctggtgtattgttgtgttgctgttggttgttgtgaattgtgctgcaggtgctcatcatagagcatctacaaatcaaataaataaatttcaacaaaatttcatgaagtaaatgttagaatttataattatattatgtaagcattaaaaagattcaattttagatattaatttttaaatatatgttatttaaaaaaaaaaatctttttttaaaaatatcaaccattacaatattttgtagtaatatcggagcattgctagcattaaaatgacaacctaacaaaaaacgagagcttcgagcaataaagtgagtagctctattcgcagatcgtggaacaaaggaacaaacaacattaacaaaagagttcaataaaagtttacaatcctcaacaagtaagttaaaagtagacggcatttgtatagaacttgtaagagcctgaattgaagttaagctatccgtctcaaaaataacattgctctattgcttagcctccacccaacttaaagcttccttgatactcataacttcagcaaaaactggttgtaccgtttcaatcttgtaagttgcaaagccctctatgatatggccatcagtaccacgtgcaataacaccaaccctgtaagtgcgctttgcagagaataaagctccatcgacgttaattttaacgaaaccagtctctggtttaacccagttcacaccaccaatgacagctccagaagagactaaaaagggatggaagcatttttcgcgggcatatttccattgagacaagattgactttgtgacaaaaactataacaacagtagaattagacttaactatttcgctaaatataacaagaagaattcttatttaattgcacatttatattttaaaatatattataattaccaattactttacatgttctaataattacagttacttcaaaagatgttctaagataaactctagtaatttatggatatgaacaaacactcattgaaaggttacaagattgtgcagcaaaatactcctttccaataaaaggtaaacaatcattaaaccttaacaagttaaaaagcttcaattgagaaaacggtctccattgtttcattctaatgtctcacaagtaataaggtaataaaatattatttaattataaattcatttttcacctaactccaataatataaatatacatattatataatcatgatggcatttgtgatgtcatctaccttcatctaatcaaaagattaacaaatcaataaactcattttaaacaatttaccaacatcttaaaaatgatgattgtaatgggggcaggtggattaaattgaacttgagattctgcaaaatgataggacccc

SEQ ID NO: 36898 - DNA, 3193 bp, Cannabis sativa
atgtgtaggtcctgtggtagctgatctatatatgcttaatgcttttcaatcatagcgtgctcattatatgtgttcatctccacatatgagttgtgtttgcaactttacaacttcatgcaggcatttatcttttcttcttggatttttaaggctatgagctttcctgctctaggattgaccaacaagtttggagggccttttatcaataaatgccatggctttcattttctggaatttgttgaacaagtgaaataatgaatgtcatttttatagaagttatttagttgtcactggaatactgcatcatgtttatttaggtcccatgttgcagctttatggaaaaaattttaaactttttattttttttgtgattttgtttttcttttagtaaagaaatgtaccgtttctttgcagattgttgaagcaagagatgtacttctgcagaagcttcaaaaaaacagagaagcacaatcagagacctctgagaactctgaggtcccgaatgcatctcaaggtcctatccaagttagcaaaaaagaagggaaggagaatccatcatcaaatgtcaatgaaaagtttgaagttttgccaaaagaacagccagaggacaaggaaattgtccactcgagcggctcagcagcagattctacctctttaaagtttgaaactgaagatgacatttcattcagtgatctagaggatgatgacagtgaagtttctcgtaaattatcggaagacaagcgaggtcaagacggcagaagttcttcggctaatgaatctaatgattgggttcaacttagtaaaagtccagaggctcgaaaaaattccacccaatcaagggagaaagattcagaaggtgaggagtcaagtgactggcttaatgttgacgactttgattaactgatccggtacttgtataaatatcccaaattcttgtaaagtgtttttttcccctcttaatctactctgcaaagattcaattctttttttttttttttacataaaagtgttaaataaataattgaatcatgtttacttccaaactcttctactattaatggcattgattagataccgtgctatttaagtcgaggaaacgatcttagtgtacattagttgaaattgttgtttgttgaaattgaaattcgatccatcttatatgtctatgtgttgcatattctcagattactagggactcgtattgctcaaatattggtaatagtgaattaggagtggtgttgtaaatattcatacacaaaaatctattctactactttttttcatttttttttttttgaaatggtagtgaattataattttaaattataaattatacaacatataagatttttatttaattctctactcaaatactgaacctaaaatattatcgaaatgtagaatgttaacatataacaaatatgggcaaatgtgggaagaagtaaaacttatggggttaaaaacgtcaagacgattttataactaaaacgacatgtcgtttgatcctatactcattctcatcataaacccttgaaaactaaaaaccctcgaaatcaatattctaaaatctttggaagacagcactagccgacgttgctcaccatctttccttctccattgacccatcacctgtcgtagaagaatcgaaatcgtcaccatgagtctaatcgcaggttcatacgagcgattcatatggggattcaagctcaaaccccttaaacaaagctccgacggaaaaacactaaccctaacccctttattctcttacccttcccacgtttcctccatcaccaccgtagccgctgccggacccgccgcagcttctggtggctccgacgacaccattcatctctacgacttcgccgcagcctcatctctcggctcactcaacgatcacactgccaccattacttccctctcgttcttcacccctcccagcatctctttccctcgcaacctcatctctgcggcctctgatggcaccgtctgcatctacgacgcggacccctttgtcctccttaagacggttaaggtccataagaagggaatcaacgacctctccgtgcacccgtcgggaaggttggcactgacggtggggcgagacgagtgtcttgggatgctcaacttgttgaggggtaggaggagctttttttgccggatgggaagggaggctagcatggtgggatttgattctactggggacaagttctttatggttatggatgacaagatttcgattcatgagactgaggatgccaggattgtctccgaattggagaaccagaagcgggttctctgcgctgcctccggcgaggttagttatttttttggttctttgtttctgtcattgctcttggattcaattttgtattgcaagtttattttgtatttgctcacttcatgttgaagtttctggtatttatagtgggctatgtaatggtttgatttgatagttcatagtaaattccgcagagctttaggacattgaatttgtgataccatttgtaaagggtctgtaaaatggattattctttatgcgtttggtcatgaagaaagtaattcttttctgtttctggttcatattgaatttaagcttcctggaaaatggattattttattcaaaagtgttgtataatgttttttttcttacccttatttcttaagacacgcaactgtaatatactacaaaagcaaaacttagaagaactgcaattaggactttgtatgtaggttttgtcaaaaaaaaaaaagagaagattgtttgtaggtttgtgtgtgtgattttggctcttttaatcaaatattaaacctgatttattgtagagtggtcttctttttactggtggtgaggaccggagtatagtagcatgggatacaaacagtgggaaggttgcgtacaacattgaagatgcacattcttctcgtgtaaaaggaattgttgtgctcactaggaatgcgggtgctgttgctgatgacgacccttacttaatagcttctgcatcatcggatggggttatacgagtttgggatgttcgtatggctgttaatgaaaagccaaatccattagccgaggccaatacaaactcaagaataacttgtcttgctggatcttctcttaaatgtaagttttgttactgccgccatatacccttataaaacaaattgagtagatttttttttagtgtcaagtgct

SEQ ID NO: 36899 - DNA, 4688 bp, Cannabis sativa
  modified_base (48)..(55): a, c, t, g, unknown or other
  modified_base (3938)..(3948): a, c, t, g, unknown or other
gaaaaaaattaaaaatacttagtaaaattaaagatataaattttatannnnnnnnaaattattaaaatggggtgtacttaacaatttttggggtgtaaataaaatttcccttaattttttaactttaaaaagggatatttttgtagccaccaccggcaaacacgttttagaaattagagatcattatcattatataaaccgtaacctcttccttttttattttactgatttagagggagagagaatataagaagaggaagaagaactcaacggttaaatctacatacaacccattacagtttacaaacatataaccccaaaacaaaagcttttatctttctattcaattcttcttccccttatttttctttcttcagacttcttctacttccttaaaacccacttctcaatttctcttccatatctttgtttacaaaaattacatctttctcaactatatataacaacttccacaacttgttgtcattctagagagagggagagagttaaggaaggaaggaaggaaggttaggtcgaggtgagaatgtctaaccaggatctagagcgaggaggaacaaaggcaagaggaaatcaaaatccacatgggaattacacgaatccctactatgtagagacctcggagcatcaatggacgtcgtggttgatacccatgttcgtggtggctaatattgctgtctttatagtggccatgtatgtcaataactgcccaaggaataatcttaagtttgaaggagcttgtgttgccaagtttcttggtagactttcgtttcagcctcttaaagagaaccctctctttggtccatcttcttctacgtgagtgttctgctttgatcctatatttttttttatatatatttgattggggaattgctcaattattaatattattattattgtttttttttttgttttttttttttggttactgggttttgagtttttccattgttaagaatcaatgagttttatattagataaatgtttgagccattttgttctgggtttttgtaaagctctaatctaaatcatcataggatgttttgtgatgtgggtttagtttgatcttggctatgttaagtgctaattctttgaatttgttccattgatttgtttggagatggttatgtttacttgaaaatttggctaaagtttttctggatccaacattcccctaatagaaaaatacttatttattttttaacctttttctgtttgttgggatatctttctcatgaaagttggtattctgcttgtaataggagtggttgaaaatgaaacttttgttgaactaattttatttctttagctggtcaatttatagtgacatagcattacaagttcttaaatgatgatttgatattgcaaaactaaaatacaaaagtagtttgtctttattataacgccaaatatgcaaagtaaataattgacttttccctctaaagctattctgttaattggcaattaacaaaaagaatttaatagaattgtgttttaaccttttatagaattgcattcagaagtatttgcagctttaggttttggtgatgatagcctttttaagcgagctaacctggcttaaaatgcagttccattttcagtttcaataaccttttattctatttcattgcacagattggaaaagttgggagctttggagtgggaaaaggttgtccatgggaaacaaggatggagactcatcacatgtatttggttacatgctggtgtcattcatttgcttgcaaatatgttgagcttggtcttcattggaatccgccttgagcagcaatttggattcggtatgtcactgtttcgagaactttttttaaacacaaccattatcattaagctctatgaatcactttgccacaagcatgattacaatcagctcatattgtttgcaactcttgtgaaagtatttactattttcaataattgttcttaccaattacaattatcttactcgatcaatctaatatggcagggcgagttgggttaatctacttaatatctggattaggaggaagcatactatcgtcccttttcattcaaagcaacatctctgttggtgcttctggtgctttatttggtcttcttggagctatgttatcagaacttcttacaaattggactatttacacaaacaaggtttgctgctatgcatttatctttagaaaagcttaatgttaaatttgacacacttttatggtcactaattctctatcttcttttcccttacaggctgcagcactattcacactcattatcatcatagccattaacttagcagttggtattctaccccacgtcgacaacttcgcccacattggaggattcattagtggttttctccttggcttcattctgttaattcgtccccagtttggatacttggagggccgtcatcttccagcaactgctcgcgtcaaatctaagcataaggcttaccaatatatcctcttgttggtcgcagttgtattacttattgtctggtaagcttagcaaaaattgaagtaaaaccaaaaaagacaaaatgttctaagttttaactattcatgaactctgttatgctgtctctaatttccattgtccccattgaacggtgcaggtttacagtcggtttggtgatgctattcaaaggagagaatgggagcaagcactgcagctggtgccattacctaagctgtgtgccaacctctaaatggaaatgtggtaattgaggaggggacttgactcactctctcttaccacttagttacactattaccatcttttgagatgatatgattttttctttcttttatttgtattagtaagttttttatatgtttattctattggatatttttttttcactcgtgtacatgcatagttaataaaacattatatatattgttaatgaaaatttccattttgtttggttttaaatacataaataagcttgcattcaaaaaatacataaataagcttcatgtcattataaaaatgtaaaaggaaaaacaaatggcgtcgcccggactcgaaccggagaccttcagtgtgttagactgacgtgataaccaactacaccacgacaccttaattggttaattacagaaaatacttggattacaacacagaaaatctccatctcataaaattcataacaattattattaattatttttttagcacaacaatttataataattaaatttagagttgatgaaatttgtaaaagtttataatatgattaatataattttttttttgaatgatgattaatataattttgattactttgtgtaaagatgcttgatattagtgtttactaagttaaaattatgaccagtacttctagtacactaattgaattttagtgtttatttattattattattattatttataaatttgatttggctaagttgatgtgtcaaagaacaaaatttataagttctgctgaaatgagaaataagcgtattagtgaaagtttgagattagagtttgccacgagtgatatgttagagagacattctttttacacattatttgttctacaatgatttgttaatattttggggattttagctttgctattttatttgccaaaaatgaattaaacatctaatttaaacttttaataatattttgacatgtttaaatacttttgttttggtattaataatttagctgattaggaattttgtaacttttaaggtcgttaaaaatgccccttgaactattaagattgttggatttaaggacttttgtccaatttagtaaaaaagactaacatggatgaaagttcagggggcatgatttagtacatttcaaagttcgagaggcatgatttggtatatatcaaagtctgggagcatagtttaacacataaacaatcactaaaatagtaaaaataaatgaaattagacaaaagtccnnnnnnnnnnnaatctcaatagttcaggggtattttaaactactttaaatgttcaggggtatgatttggtacatattaaagttcaggggacaaaaatcataattagtctaataatttttaatgtctgtctttctcactttcgtctttttctctctttttgataacttaaaaataatttatggttacattattattcagttaacttttttaaaaaaatatcattgcgatctattcttcgatgtaaacatttcaaaatgtgagaagtatatatttttttgcaattaaaaaaaaatatttaattactaatatagtgattagttactattttatttttatttttttaaatcttagttattatacttttaagaattttgttaattgaattatattaattacacaataattaattagctttcaaaataacaaaaaatgtatataaaaatagtagtttgttatattacatgaaaactcattattttcgaaaataatttttaaagttacctaaatatattttaaattataagctatcataatagaactaattaattactaaaatgtatacaaataaattttggaagtaactaaaatatatctcacattatataatataaaagtgaagttttttttatgtaaatgtaattaattggtttcttatcaactctattagtaactaaaaaattacttttaaaaatgtagaaagttaaataatgataaaaaaaacaaaaaatgttcagatataactcacgcgaca

SEQ ID NO: 36900 - DNA, 3603 bp, Cannabis sativa
aacaaagcaaatagtctggttaagattgttgctacatcttactctataatgacctaaattcttttgctgggtagtttttggtttcaccattattaacttgatatcgtctttggttacatacggttttagccaagtattctagaagaaactaatcatctacgtggtgcaaaacgttttgatgccttgtggatttaaagagtaaattgtaggagtggcacttcaggttatgggtcgaatttaggtttaacctaaatgatacttactaatcagatggatcatggtataaaaatatgttatgtgaaataagtataggtttaacatgtgaacaacacgataggttaatgttttatggacaaacaatcaatacgctttacattgaaatatgttgcaattacaatcaacgacggtgggtttatttatttgctcaacgaaatgaaaaaggaaagtcagacacgctaagaacaatcttaaaatgtatgtccgtacaaaaaacaaactattcatatgtatctacattacttactacaatcctaattgacatttgcctgaataaagccgtcccttatctgtgaggcaacgtctctcacaacacccggtccatgaggaatgaaaactgaattggtctttgacgatgcaccaatctctttcattgtgtcgaagtactgagtcactagaaccatgtccatgacatcctttgatgatgtcccaggtacattagaagagaaggccagcacactgtctctcaacccatcaacaattgcttggcgctgccgagctatgccaagccctgccagatatttggactctgcatccccctctgctcgcttaatctgcagaatcttctctgcttcagctttttcattagcagctaccctcattctagcagctattgattaagagactcatgtcaaaaacttttgcagatatgattaacgcaaagtcaattataatatgattcctgtataataagcttccacttccaggtggcattgtataggaaaaagcaaaaagaaacataatataaattgaaatgtatggaatatggctactgctttgccaacctaatcattatatcagaaaagagagttttaaacctgcattaatctcattcattgctctcttcacacgctcatccggttcaatatcaacaataagcgtctggactatctcaaatccataatgggacatggcctacaatatcgagaaccaatcacatgaaatttggggtatgcagtgggaccaagttataacttacacagaacaaagatgttagtttttaccttttcaagttcctcttcaacagcttttgctatatcattcttttgctcaaatgttgaatccagatctagctttggaacacttgccctgataactgaatcaaagagaatcataatactgtcacctcaaatcagtttacccaagtccaagtagcaggtttaaacttcgaacaatgaaaaatacagagtttaaaatagtagaacaagccatcaaacaaaaaggccctatgtcaactgcatatcatttaattttctttcagaggatgcgtgcaaatatgagttaaatatctatgaaggaaatggaaagtagacaagtttgtgaaggaaaatttggtaatcttcagtttgtactctttaccatcaaaaacataagattggatctgtgctctggtattgctgagcttatagaatgcatcagaagccttctctgctatagcacggtattgaatagaagctacaacagtgacaaagacattatcctgaagaatacaatggatcaacatgagcaaaatatttgtaactaaaacatagaaattgcaatatacatccttgttagtctatccaattgttttgatgctgctaaaattgttaaatgttagtattcaacaataaagaagcttccaagatcgcaccctactctgtttgctttcataaatatggtgttgctgcgaaattcttatttaagcactataaagctaattagtaataattaaacatataaggcatgaagaattatatgccacacaacctttgtctttgtttcacaacggacatctaactgctgaacacgaagcgagagctgcccagccaggttgcttccgaaaaaccagggcacacaatgacatcctggttcaagtatatcatcaaacttcccaaatgtttccttaatagcaacgttagactgatccacttgaacacagcctaaggcttgtcccattttctctttcacctaaaatgttataaacaactataaatatcagtaacagtttattactagaagtaatagacgattctgaagacatactttagagctacaagcagtacttattaaaggcctgctatgctatcaaaccaaaacttttcaacaaccaacatgccactacattaccacgcctcaccagataaacctatgttaaccaaagtcaaatttagccaatactaatgccaagttgaaactaaatataaaaaaacagtagccataaataagttttagaattccacgtccaattgaaaaataaaaatgaaaaatcaagccctgatgtataatttataaaataggatcctttttactttttttctgtctaaatattagtttatcggccacctcaatttcttcgaaaaaattatcaagattaagaaaataaaataataaggaatatgaaaaaaaaaaaaaagaaaaacagaagatgaagaagaagaaataaacggcacggcagagatcaagatcggcaaataaaagtcaaagaaaagctaattaagcaacaaacctttctctctcaataaacaatggaacaatgttgatagactatcataatacactgaaaatttattgattcggttgctactacactcaacctaatatttattttatttatattataactgttatatataccacttccaagatcagaagtttcgcatatttctttcttcctaagcataagaaacaaaatataactattaaataattaataatcaacgatggtgacagatataagaccaataaataattaaatacaggttgtttatggcttcatatcaagacaaaaagctagtttacagtatcaattagcaaaaaaatggaattaaaaaaattgatcacagaagttttaggacaacaattcaatcaaagaactaatttgaatcttgatgattaattgtctcccaaaaccaattagaaatttaccaaagaatttaaaaccctaaaaacaggaacttactttgagagatcatctaaaatctcaaaatctgtctacaagtaccgtaattcttccattaataatttgaaattgctaaaaaattacagaaaatttagagaagaaggtgaagaattgcaatgagcaagaaccgtttagaaatgtaattcgtgtccgacctgtgaagagcttgtaagttgtgagttgaaactcaaaactgagagtgtaagagagagccacagccgtgtatatgtaatttcatgtcagtttccttcggataatcataagaaataacgttatataagcggccatcacgctttacattggtatagttgttttggacggtttatcctatatattttgacaaatttaaatagattactaaatttttccattttcttataactata

SEQ ID NO: 36901 - DNA, 1994 bp, Cannabis sativa
  modified_base (1951)..(1951): a, c, t, g, unknown or other
aaaaacttccaatcacttcatggcatctccgtggtcatctcccatgtcaggcgctgcctcttcattattttcttgggttgtatatggattgtattattgcatctattgtggtggttaaggataagcagatatatcaatcccaaagtttatagcattcattcgagcacaatcatcttggtacatcgcccactccctcatctcttggcggtgttgcttcatgtctttagtaatagaagccaacccattctctattagctctaaacgctctggcatagtcatccggctacactcctctacagatggtggctcttccctagatgagaatgtcaatgtcttctttgttttaggatcagcaaatcgaatcacaacgttcttgtcaaaaatatgctgaggttgtagagtttgtttcgaggtgtattttactctagctttggcacatagtgccgtaatcatatttggatgagcaaacccctttctaacattcagaatatgatccataatagagtgttggatgacattgcccacatcaattaacttctcatggagaatggcatataggagtgtggccattatggtgtcaacagtagaaaagtgtttcgtggagcaacttagctccaataaatcagagccaaacatgatattcatattccatatcattctgataaaagtgtctaatttctccatcttcagtacaaacccatgaggtaatggagtgtctcttaaacttctttaaccaagtcttaggtgccctagtaagtgttacagggaataaaacacattttatcaccaaccacctggtaggcgcgcataagtgtattgaagtcacttatgtcaaccccggagtccatacttccatcgtacttggttgtggttggcatcttgaatccttgtgggtatggtaggaccaatatcctaggagagtaaggttctgacttctcacccgaatcatatccagttacattttagttattggctaccatcaattgttgtatcatttgttcgaaggcattgagcttagggtcattgacttgtcctttcccaccatggccagctagggggatgttattttgacgtccccattaatgttatggttgtcatttactactagtggaattggattttgccttctattcaaatattccctcaaatcaggttgtctttgattgaagtgttctcgcaaatcaggtcttcttctatcccttgggggatggttgttgttgcgacgttaataattgtgaggcgcattattatgaacactaatagagcaacttatagagtcaaatcaactactaccctcagcaaaactcactgttttttgttgttgtggatgatgaggagagagtgggggctgctcagagtatggctcaacgtatggagtcaaagttgtctgattttgagacaaagctatttgcttgagcaggttggcgccttggtggcgtcttttgttatggtcctcgatgtgttggcctctgacgagcataatctttgtgaggagcagtgcgtcacctatgtcccttatgtggttgagcatgtggcgcatcaccacgggaggtggaacacattggttcttgtggagtggtataaactgacaggttggggtaccttataggtggcgatgaggctcgaattggagaaggtgactctctccttttttctccacccacgttattatcctcacagtaaagccttggaggaacaattgggtctcataagctttatatgaccacctccatgtaatggtacatgagtttcttgtgaatatcttgcatgaactccaatatttggtaaagtttggtggtcccccctccttgttggattagtcacaggagcatgttctctccttgggtgcacccttcatctcctagggggagaaggatctcttggtacatgaggttggtccccacgcctttgggcttgcacttggagctcttgttgggttttgtgccctaantaaaacccatttcaatataatcatatttacttattaataaaga

SEQ ID NO: 36902 - DNA, 1474 bp, Cannabis sativa
agaacaagtctcactcattctttgcccataataacgcaaaaaattcaatgactgaactctaggctcagccaaggctactgtcccttccaacatcccaaccacacaccccatgctcggcctcaacgcagggtcctcctgcacacaacacagtcctatcttgatcagcttctccacttcctcactcgaaacaactcgcccttccaacctcggatcaaccaactccaagtaccttctctgctcatgcatttctagtgccaccaaaggaaaataacgctctgaacatgatgatgacaatgatgttaagtagttcttctttcctctaactatttcaagtaacaccattccataaccatacacatcaactttgtctgtaattgcagtgtttgttagccattcaggggctaaataaccccttgtacctctcatggtagtgaagagactagactgttcaggattcagtagctttgacaaaccgaaatcagatatcttcacttgtgaattcccatgcagcaaaatgttctctggcttcacatcacagtgtatgatcttgtggttgcagccattgtgtaagtaagcaagtcctctggctgttccaagagctatgtcaaatctctcatcccattccaaaacaggcccagcatcaccgaaaagagctcggtccaatgaccctttgttcatgaactcaaacaccagaaaacgcttgcttccttcaacacaaaaacctttcaacccaacaagattgacatggtgaatgtttgctatgatggaaacttctgtgaagaactctttctttccttgcacacccaaactagtcatcttcttaactgccacaacggttttatcagcaagtatacctttgtaaactgtcccaaatcctccactcccaatttgagttttgaaattgtcagtggcaacttccaactcctcataatcaaacctcactggtaaaccagggattgatatgtcttcctctgactcttcactccatgaagaagagttcaaacgctctaatcttgtgactttggagttcccaattccaaaaccaaaactcctcccttttcttctcaaccaaagagttgttaagagcactgcagctaatacaagaaccaaacccgaaaagggtatgagtacaaaaccagctaatggaaaactatttccattgctaccactactaacaacggaagaagaagaggatgttgatgttgccacaacgaaagtcttaacatatcccaaacgattgttctgagaagtactagcagggccagacctgatgagtgagcctatttcattcttaatcaaataacaagaaccagaagaagcttcatggaaaatagctaaacaagaacagttagtcgagcacagatcttgacaaacagattgagtgacatttctccgaaaagggtccataaaatcattggcgaaatagtctgtatcattacctagactcacatacaaaacagagttgttgttgttg

SEQ ID NO: 36903 - DNA, 7193 bp, Cannabis sativa
tgtattgtcattaaacattattactttttaaaaaggtgagattgggatttcagtttttgttgtatttgtcattaactagtgcatttttgagatcttaatataattgcagtaatcaagtaattttctgccttgttatgttatgaaatagtgtgtttcagtctcatatttgtgttatagtaggaaatagtgtacatgtgatgtccttggaatttgaagcttttgatgtgtagttcatcacatgttgagtttaaatttctcagatcagaaacttttcaggactttttctagagaagatattcattcatgatcccagaaatctaggccagttaacaatcttagacataagttctgctttcatggattctaagcaagatccacttattgaaattaggaagaatattaaagatcctctttttctgagcttatgcatcttctcgagaatttctccctaagaaagctactaaacttggtttctgttaaaagagctttttaaaacttaaagctaaatttcattggttacccaacgaagcccaacttaacccaacttttaaaagccgaatcaactaaggcttaagtcgctattcctaaagttcaattcggaagaacactaaagaccctgtttttgtgagcttatgcatcttctcgggaagttatctttaagaaagctactaaacctggtttttgtcaaaagagctttttagaacttaaaagctaaaatccactggttacccaatttagcccaacttttaaaagttgaaccaactagggcctaagtcagtattcctaattggaattcggaagaataataaagattctgtttttctaagcttatgcatcttctcgtgaagttctccctaagaaagctattaaacttggtttctgataaaatagcttcttagaacctaaagctaaaattcactgattatccaacttagtctaacttttaaaagtcgaaccaactagggcctaagtcttttctgagcttatgcatcttctcgggaagttctccttaagaaaactactaaacctggtttatcttaaaagtgcttttaagaacttaaaactaaaattcactggttacccaacgaagctcaacttagcccaacttttaaaagtcgaaccaactagggcataaatcgctatttctaattggaatttggaagaacactaaaggtaaagaccctgtttttttgagattatgcatcttctcgagatgctctccctagaaaagggattctgttaaaagagttttttagaactaaaagctaaaagtcaccagttacccaacgaagcccaacttagcccaacttttaaaagtcgaaccaactagggcctaagtcattattcttaattggaattcgaaagaacactaaagaccctgtttttctgagcttatgcatcttctcgggaagctctccataagaaagggtttctgttaaaagagcttttcagaactaaaagctaaaagtcactagttacccgacaaagcccaactaactagggcctaagtcactattcttatttggatggtgacttttcttatatgttgcactaattagatgagacaaaggtgatgtcttttttttctaatagcatattaccatgacatttgattttaatgaggatagcccattggtgaagggcctaatctgctgtcttttgtgtcacttttgttttttggtccttttctaaagggtccagtaagcaaagttgctttccatgttggatataaagcctaccttgtctcacaaatctcagtctcaatctacacttgtatgttgatgttgatgtttatccacctaaatttactacattataaatataaataaaattaacttttctagtgctcattattgttaataaaattgagattaagacaattttattaggtcttactagtagtgattatgtccaatgatgtatggagtttataatacctcatgagtacttaaagagtgtttatggttcccaatgaaagattaagtacaaatactacaaaagaaaaagaaattaattagtttaaacattaaaagggtttatacaatagcatgttggcaaaggatgaatctatcaagattctcctcttgatcatctaggagtcgaattcagaatctcggtgataacaatttctgtagatcatcattaagaaagtacgagacacaatttcttttcattatttagggatcgtatctcactagtaagattacatatcatatctcaagtcgatctattctttttcggttgacagaattctggtaataacaatttctttaaatcatcatcaagattggtcaattaaaatgcattgaaaataaaattgatttgtttttctcttcttagaaagtaaaataataaagtaaaggagtttgtgcaagcaaatagtgccaaaaattgagttgagtggcatattattctcacatcttggaatgagttgggatgtgggattttgatatggcttagtagttattatctgaacatttaacatttttttcttgggacaaaaacatgtgcagatatcaaaggtagaccggataataagcatagaaaacccaacaattttttagtctaataacaatttgtccccataccaatctcacccaacttcaatttatatattaaaaaaaccaactttcccatactttctttcccttttttcatgccaaataaaaattcattttatccaaaaaaaaaatataatacatttaatgaaaaagtgtttttaatacctacacaaattgtaaatcaaatacataaattatatactatattttcttgtttgtctaatcacataactatacaattagaagtaattgagggattttaattaattctccaaaactcataccctggtgaaaattgagtgtgtgtaactactaaaatctttctattttaaatattaagtactattttttggagaatttttatttttacactttataataattttttttattacatttttacataaatatagtaacacacataacaactaatggagcaacataaatcgcaatcaaaattcacataacaatctacatagaaaccactatagcaaccatcagtgtaactcaaaccgtaaattaaaaaaaaaaattaaaaaataatatatgaggtaattttttttttttatctaactattaattattttgctaaataagatattaggaatttgttaataattattattttatatccaaatacacattgtattttaaagtaaagtataattatacaattactttcaaacacattcttataaaatctaacttgtataattaagtttatttttattcgtaaattaagtagatttaactactaaaccacataaatagtgtttatttttattcacatatcatttttaatttatttaatacttatttattgttgatgaaattttgtattacttaaaagaaaattgtagtttgaagaattatttcacaaattattagaaaaagaatattattttacaaagtatatattattatatattttttaataaaagataaactcaaacacatgaattattgtaaaattatataatataaatctaaagtatataaatggataaatgtaataatatttggcaccgcttgaaagttgaaactgaataagtgtttttggctgcatctttgaattgaataatgttgtcctatggaaaaagaaactacttaaaaactgcagttgcattaattgactaaaattcataaatttcaaaacaaacttctacaccactccaaaccaaaccaattcaatgcttttattaccatttgtactaaacataaatttcaataatagtaataaaagaattataatttacatgagaagaaaatgaaaatattttcttaattcacattgaaggatgtgccaatttatatagtgtttatgtgcagataaatgctaaaatgcattagtggtgtttagtatttttctcggtgtcatatcactgttagtaaaattaagtatcgagcctcatataacttaagataataactaacttttatttaaggtaaggaatatcactaacctaaccaatcgtgcccaataaatacttctatgtacttgttttttttctttattttctatatgagaatgctaaatggtactattagtgcttagcaccctctgacgtattatattgctactggtagaattaaatattgtgtctcatgtaacttaatataataatttttatgaaatattattaatgaagatgttagacactactaaatacaatgcttaatcagcacctagattaattatatttgacttataaaacaacattaaacttgcaacccttttcatattttcttgaaaaatattattaatcatcattaaattaattatagcatgctttaaatatatttaaacaattataatttatttcaattgattgtacattatatgatagtacatatttttgttagagtaaacatcccattttgaaaaaattatgaaaattatatttttttagcttaaataagtctccttatgaacattgtttaatcaaattattaatgattgggcaaaaccaaaaataatccctcacatacaaaattataataaaacaccaaaagattcaaaataataaattacacatgcataagaaaaatagtatgcaattagatatttgaataataagttaatcactataaattatttgatttgtttaaaaattagtagaactaaaatacatattataactataatatacaccatcttatttaagttataattatcggtatgaaataaattgtaaccctagtatagaattttcttaaaattttattttaatgatttaaggaaattttatgagatgattaaagattggaaattaaaggcacaagtttcacatatatattgtattgtttccactataaattatttataatattcaatatatatgaaaggaaaggacaatgtgttttggtatattcaaaccaagtataacttatggctaacatttcttcatcttattttttctttcctctatggtcttattaagacataatttcacaaaatggggtccattcctaatcattgggcacttagatcattcttattgggtgaaaggtcaactccatacataataatctttctcactaatacacacaaagtttccattcatataattctctcctaaatttgtaggctacacttaattaattaaattttttattattatgtaaaaaaaaaaactaataagttggtttcatttgaaggcaacatataaatgtatacatgtttataaaaatagattactataaaaaaatatatatattatgttgtagtttattgcttagaaaacaagtaatgacttaatctagttacaaataatgttcaaagagataattaatactactaggatatctatagatgatctagaccaatcacctttatacaaatcatataacctaaaaaaatgtcataaatgaaaactatttgaaggaatgtgtaagatccaaatgaaatcaattatatggtaaataaaaaataaataaataaataaaattaaaacttccacttgaagaacatgtttgtaaggttttttgggaacaaaagtgtgatctttaattaagcttatatatattttaaaaaagaaaaacctaatccataagcattttttatgtgaaccaaacctttttcttctttagaccaatcattaaggaataatgggtaggaggcatatttacctataaagttagtatagatgtgtacaaaaacattcattatatttatgttttcacctctaaattagaagatttaattataggctttatttatttagtataaaataggttatatctactcaataatgttggtcttgaattatctaaaaaaatcccacccaaaaaaaatataattttggaagaaaaaaaaaaccatttcttaattacttatttctctttctatctaatcctcaaataataaaattaataaaaaatttatagggtttctcctaattgggattttgccctaaacgaaggcacaaaaggttgatttaacaagaaacaaaagcatatacctaatattggaatttgggggtggccttataatttctaatattcatataaatataaactaatttctattaatagaaaagaatctaatgtggcatggttttaggtgatgacaaggattggatgttgacctatcaacaaaagggataataccaaacaaatccatttcaaatagtaatggattatatatatttaagtgggttttttttcataaattattattataattattaattaattaaaaaaaaacacaattagttgaaatggtacaacaagcaattttttttttttaaaaaaattaataataattaaaccaacccctctccctctcaaaggcccaagttgtcaaaagtaaactcaattccaatttgggcccaaaaaaaattgttaaaaagtattattgatactcagtattttttttcgatgttatatcgctattaatataattaagtatcgagtctaatataacttaaaaaataacttttaaagaatatcgatattcaattataaagtaccacctataaaaatattagacaccattagtaccaataaaaaaaaaatgttcaacaacaaaatatcaaggaaacttgtttggtgttttgtaattttactttttactatattttatataaaaataaaacatttgtctttgtctcactctaatctcaatgtggatttttcttttatttatatattattatttttaattaatttatttgtttatccatccaaacaagtacttgtatgtcttctgagctcaaaacaaaaagaaccaatagaaaagctcaggcggttagaagagagagaaagtgtaaaaaaagaggagagagaaagtgaaaaagaggagagagagagagaaagagaagaaaagatgagagagaaagtgaagaaaagaggagagagagagtggagtaggagttagtgattctagtgggttccttcaaatgaccccattctttcatttcattcttaattaaataattaaacaaaattaacaattaattaaataattaatatgctctttggttttgtagttttttttaatggagtataaacaaaatcaaggctttaagagtttaagttctttagataattgtctaatttgctttttaataatattggaaatgtcagtagtagatcctcttaaagaattattttagtagattttttttatct

SEQ ID NO: 36904 - DNA, 3940 bp, Cannabis sativa
ttaattactggtttatgattgctggtttattgctgttttgtattcctgatctttgcttgtttaattggtgttgtgttggttcttgttgggagttcaagcctccacagtagataaagagagttgactaaatagcccaagataatattaacaacccataccgatattaacataaataatttttattttcttaaaaagtaaaataaccacttgcaaaaaaaaaaaatagtgagatcatagaaaaatcaagagagaaagagagacacagaggaagagagatagagggagagagagaagaaagaaaaaaaagcttctagggttggcgatggtgggttctttggggttgaggtgccattggtgctagggctggcagtgggttctctggggaaagggaatttgaataaataaaatatttgtggatctcacttttttttattattattttctttccttttctttactcgtcttgaatgagtcttcaaaacttttgttaactgtaaaaagtgttttgtggatctctctaggacttttatgatctataaatatagaacttagagagcagccatacgtttatctcttctagtcttattatttccatattctacctttgtgacaaggttgttctttgcataaaaatctagagtgttcagctaagttttggtgcttataattctcttacaattcataatataggttgaagagttactttgaacaataggaggtctttgggagaagacttatcaaggactcacttcgggaggaagtgaatgcatgtgcacatcaaaagatgaagaagttttactatttggtgtggtttttgatgaagaaattttactatttgttgtggttcagagatcagattagcatgctggattataaaaatattgtgacaaatctttagagggagagtcagaattcgttaaagtcaattgtatttgtaatctttaagactttactaatagatttcattctttgggcgtggtcccttactggactagtagtattcgaaggaatactgatactacgtataattctcttgtgtaatattttaattgctgcaatcattttgctgctgtaagtattctttctgtgcatgtgagcaagtatccaacttgttattgcaagtctttacagttacgatgtatttaataactattattatagaaattaactatttttttgcaaaatagcgactttcaaaactaaccgtggaaaaaatcaaggtgtgtatggtaagatgtatacagtatgatatttcaaaattaattggcaataaatgaagtagttcattcatcttataataatattaaattatcacacattatcaacgtgagatggaaattttacctgtggaaatttatccctgcacatatacccaccctatatattggagcgaggattccatgcctaaattggaaacaaggtggagatcacaaggataattccatctctagataacaaggatagatttgagtttttgaatccaaggctgattcacccatagaactgttggaaaaagtttcccaagccatgttcctattgtcaacagcaaggacaatcatcctacaccaattatcctttgaatgcaccatcagtaaaaaggattttttaattgaagggggccccaaattatacgacatctttgtatcagatttgacctctctcgcaagcatctccatctaaataaactcaagtatttccttgtaatttcttcttgcagactcttcacatctcttttctttccaccaaaaagaattacatttctatagttccaaatagtatcacaaaccgaagcgaaacaaaccagaacctgcaatatagcctctccccatgaatgtttttgcacaaaaatagcaaaacctcaatcatgttttggccagtaaacttatcgatcctagaaaggatcagggagcaaaaccagagcagcctagccatgtggcagttgacaaacgagtgtaataaattttccacttcaagatcacaaacaatacagtttttgttaccatcacaactaactttatcccgtgttgaaagtgccccattacacaccctccacaacaagctttgtcttgggtgcaaatggttagaccaaattaatttccagcaagggttagcaagatcaaaccgctcaccttgatcaagccaataagcaaccttaatcaaaaactggtcattagaggaatttttccaaactaacttatcatttcccaagagccaaaaaatatcaatattaagaatcttctcaccaatttattccccaaacaaatatagcacatactttctattccaaacatggtgggtactgtctaacaaatcaaaaaaggtcatgagcttggaagcctttaatctcaccttctccataacagcttgaaaattatcatacctcagccaaggcatccaaggtcaccaccaaatgtttacatctctcccatttgcgataatagtacaggccccttccagaatgattttcctagcctgtagaatccctttccaaatagcaaaattcgaggctctaggccttacaaaccagaaagactcccaagaggaaagcttggcccgaaaagccatagcccaaggtttctcaacattgccagctatatcccaagccaatttagccatcaaagctctgttaatatcctcaaacttcctgaattccaaaccaccccgttgtttaggttgacacaaagagtcccaaatcttagtagccaaaaaatgagcttctccacaccacctatccactagaacctacgaatcaaggcatccatttgtctacatagggtgactggaagcatgaaagtggacatgggtaaataggcaaagcaagagccattgaattgatggcgcgcgacttgtctccccgaataagacaagcttctcattctccaaccttctagtcttgccttcaacctctctttaaggaaggagaaatcatttctacgatttttcgacaaaataaggggacttcccagataaaaatccatcgcatctatcaatttaatctgaaacaactcctcaattcttttttcctgccactagaacaattcctcgagaatagaagtcccgatttatttttactacacagttgcatagaccacaactcatacttttaatgcactccacactacaagaaatatcacttttaccagcacagttcgctactgcactggtaaaagtaacttttaccagcgcatggcaaagaggtcaaagttttaccagcgtacatttatagtggctaaaatctaactttaattaccagcgcatttacccgctggaaaaagtcttttttgccagcgcttttaattttatgctggtaaaagttctaataaaaacctggctgtcttggaacatagcagcaggttcattgagtgcattgaccaggtggattggaagatcaaaactcagccaattcaagaggaatgtattagctgctgccatcagttgtctgtgtggagagcacgcaatctgtctgtgtgggaaagcacaaaaccggttgcagagaaggttataacaggtgaaacaagaagtgatatatagaattaatacaatatggccaaagaaagtctctactgatgatactgtatggttccacagtttgtaaaaaagaacaaaaaatgtagttggttaggatcaagaaatagaaaactatgtacagattttattatttaggccctgtttagggtgctattgtttgtaaaaatttgttgtgagcaacacaaatttcctgattcataaaaaaaaaggttctaataccaatattgatttgccaatccccttttgccaacacatcacaagtaaattctattttaccagcgcaatactaacttttgctagcacaaaaatatattggcaaaagtgacatttcttgtagtgcccccaaaaccacaaccgcctttttgcttggtctcacaaagatcattatatcatctgcaaacatcagatgtaa

SEQ ID NO: 36905 - DNA, 2446 bp, Cannabis sativa
ttaatttttagtgatacaatatattaaatactatgatatatatttaataaaaatttaaaaccagtgtatataatttattatatattattgtaataattttgtataatttttagtaactaatttattatatttagctattttattaatttttgtaaaaaaaaaaaaagacatttattaacttaatttcaagtttaaaaccattttacatctcatcccttttaacattcctaatttactatttcatgtaatgttgggcattgagtaccaaataacaacaatgggtacaagccataaagagaatgtaaatattaagtaccataacattgcataaactaaccaatgcattgccacacattgtgtggtatttttaacagaatgaagaaaagcttcaatactgagttttgcacttaacgttttcttcgatctctctgggtactttcgacaagtttccgaccacccccattttgccaaactcctctaactggcaatacttcaggtggatccttaatgtcatctatttttccttcactattggaactaccatgttcaaaactagctgcagcatcgctgccaagtcggtttctgaggaactttggagtttttttctgttgcttgcttccactaccagtccctgaagttttcttcaaatgaatagattcgttctcattatggtgacaattcgtttgaaacccattgtttgataagacattataatttgattccaatttgttcatactgcttataatggcatcctttgaagtagtgctgcttgcactctcttcacatttctctttacctttcttggtaattttcttgttctttaaacggctactgccattcactgtactattctcattagaaccacagttccttgtgttgaaattgtatgtctcaattagttctctttgcttctccagatccggacagagtttagctaattcaagaacaagatgtgacaagccaaactggcaaacaaaggcaagatattcttctgtactaactaaaccccgtcgaaaccgtgaagatagttctttcaatgcagcgtagttcttttcattatggtctaaagcaatgcgaattctttccacaagagacttgttggcagaattaacatcttccccctttggcaatgtctggctgcttgtaggtattttacgagtttgcgccacattaataggtggaaaactagatgtagagttgtcaaaagacctgttgctgcctacaagtttccatgttgaagcagaatcagtgaccatactggagttaactgaatttcttgacgagctagcaatgctagatgatgcaacttcatgcgattttatcagtctaactgagatggtgctttcagaagatggtgatggacgtaaatttgttgttgtcgacccactttggattataataggagatctagatgttgacggaagcccagaatttgcgacaggccttagccggttagagctaggaagcccaggtctagggcgaaaatctgctgtcaaccaagcctgaggtcgtgcattggaggcagaggcagacgattttttgcttttcttttgacctctacttgaagccacagggagtggtggaaaggatgaatcttccaatggtgcactcctcaagctttgtcttaaagcatgagaggaagatgactcgcgatcacctgtggttaaggattcaaatgggacaacaactgactccaaatcgcttgtttctctaagattggaaactgctccagcaatggatgaagtgtcacgaacactcgcagcattggaagttgcaagattaaccaagttcaagggatgaccatgtcttccatgatgatctcgctcattacttcggttatactgaaagctcactggaatctggtaggaaaaaaatatatatataacaaaaaaaaaattgaagcatttggatctaatgatgtagcaagaatgtagatgaataattcacaggcatgatttatgaataattcacaggcatgattttcagtgacataataacctgtagagcagcaaagcgctgacggcgagacattcgccctccatgctccttagcattatgcctctacaagaatttaagtttcacgtgagacaaattttacatcatagtataagtgaagttgtgcacaggccaaagagagtgaaaacgaaagaaaaaaaaaatgagtacgaagaaaagaaaaaggtaccttcatttcggattcagttgaataaacaatgaatttttttgctaggcaagcctcatcctcacacaagaaatgtgcttcacgaaaatggttctgtaagatgaatttttggggtcaactaagaaacgaatattagaaaagcatagaatctagtaagtaaagtaaacagagcacaactgacctccaagtaatcgtagtttttgaagtaatcaaaatttcctggaatctgctgcctgcattaagcaagataaatatgatgcacaa

SEQ ID NO: 36906 - DNA, 4780 bp, Cannabis sativa
tctttattctttgtttcaatggctaaacgattcaacaacttcaacatggtatcagagcactttccacctttggtggctaacatggcgacgatcaacaacaacagcaccaacaattctcaacaagggggatccaacaatgctaacagatctcgaaacagagaagctgaagattcaccagtatacttcaatcacaccatttctgtaaagctaaatgatcataattacctcttgtggaaacaacaggttctcgctgccatacgagggaataggcttctgaagttcatcgaagatgttactccaccaccgcagttcctcaatgatgccgatcaagctcgcagacattataatcctgagttcttggattgggatgtccaggaccagcttctggtttcttggcttctctcttcaatgacagaaagcctacttacaagaatggtaggatgtaactcagcaaggcagatctggagtgccttggagaagcacttcactctgcaagtatcgtccaagatcctcgagtttcagacaaaacttcagaacattcgaaaaggatccatgtctctcaatgaatacctgctaaagatcaaacagggagttgatcttttggcctccgttggacaagttctctctgcacgagatcatatagctgccatattcaagggattacccagcgaatatgacacattcatcatatcctcgaatactagaatcgaagggtactccgtcgctgaaatcgaagctcttctccttgcgtctgaatctcgcatagagaagacagataaagagcttgagttttctgcaaatttaactaccacagatcaagaacttgcgtatcccagtcttgaagccaatgcagctcaatttggcaggaatttcagagctcccggtaacagtcgtggtcagtattcttctcctcccttcccttactttactaataattctcattttgctagtcagaggaatgttggcagaggcaatactgctctctttcgaggctataatggctcttttcaaggccctggtagaggccctggcatttccaacagaggtgcacgtacagcagctacacaaaatcgtgtgcaatgccaattgtgtcataagatcggccacacagtgctggattgcttctatcgctttgataaaagcattactggtgtctttcctcctactgacacccatcaagctcaagctcaacttgcacatctttttcaaacatctgatccgaactggtatccggattctggtgcctccaaccattgcacaccagatcctaacaacctgatgatgtctactgaatatgaaggcacagataggctttatgttggtgatggcacaggacttccaattgaaaacataggtcattctcttatctcatcttctcaaattaataaaccacttttacttaaaaatctcttacatgttcctgatattaccaagaaccttctaagtgtgtctaaatttactgaagataatgctgttttctttgaatttcacccgaaattctgttatgtcaaggatcaggtaaccaaggatgtcctcctgactgggaaccacaaacatggcctatatatttttgatccccagcagctgcaacttgtctcaccaaccagtcaacaatgtcctaaagcacctcacttgtctcctcacactgcctctgttcatgtcactactgcttcatctagtattcccagcaataatccctgtaacactagttttttagatgtctttgatttgtggcataaccggttaggccacccctctaagagaattgtcactactgtactcaatacttgtaacatctctcataataataaaatgcttgatttggtttgccaagcctgttgccttggaaaaatccataaactaccttttcctcaagcttctaacactgtctattctgcaccattacagttaatagtctctgatttatggggccctgcctttactaaatcccacaatggctacttttactacatgcattttatagacatctactctaggtttacatggatatacctgctgaaacacaagtctgaagccttaaaaacatttcaaatattcaaggctgaggcagaacttcaattaggcaccaaaatcaaaacactacaaacggattggggggtgagtacatgtcctttacatctaccttgcaacaagctggaattgttcatagaaatccttgcccaactacccatgaacaaaatggtctggttgaaagaaagcacagacacatagttgagcatggtcttacccttcttgctcactcttccatgcctttaaaatactgggatgaagctttcaggacagctgtctatcttcacaataggcttcccacccctgttttgaacaacaaatctcccattgaagtcctccttcaactcaaacctgattacagctccttaagaatctttgggtgtacatgttttcccaatattaggccttacaataagcacaagttgcaatttaggtctactccttgtacctttctaggctatagccttaatcataaagggtataaatgcctagattctttaggtagactttacatctctagggatgttatctttgatgaaacaacattcccctttgctactactcaaccagctgtcactactcctattacagttcaggatttattttcttctgtccttatacccaaagtcacagcctcacagctcaccaatgtcaacactactccacctgttcatatttcctctgtacctacagatgtgtctccttatcctagtattcccaccagctttccacacattgctgttgtccctagtgtttcccaggttccacctactgttcctactgatattgctactagtgtttccactaattctgatttgcaggtgacagtaacagcgcctcatatgccatctgtccaacagcagccatcttcaacaacttcagtgttgaataatcacaaaatgcagactaggtccaagtctggcatttctaaaccaaaagtttatctcacaaccactattcctacatctctcaaacaagctttgcttgaagctgtctgggttgaggcaatggatacagaggttctagcattgaaaagaaatggtacctgcatacttgtccctctcccacctggaaggacagccataggttgcaagtgggtttataaaaagaaggagaatgatgatgggtctgtcaataagtacaaagctcggttggtagcaaagggctttcaccaacaaccaggttttgactacactgagaccttcagtccagttgtaaaacctgtcaccattcgtgttgttctcactttggctctatccaaaggttggatgatcaaacaacttgatgtgaataatgctttcttgaatggtgatttgcaagaggaggtttacatggtccaaccaccaggctatgaggatccccaaaatccccatcttgtttgcaaattaaacaaagctatatacgggttgaagcaggcacctagagcttggtttgccaaactccactctgctttactctccctgggattcatttcatccaaatccgatcatagcttgttcattcaacacacatccacctcagttatcatcatcttggtctatgttgatgacatcataatcactgacagtgattctaatctgatatctgagttggttcaggctctcaacactaagttttcacttaaggatcttggccccttatcatactttctgggcatcgaagtccttcacaaagatcacactctccatctttcacaaagcaaatacatcaaagaccttctgcatcgtgctcagatggatggagccaaaccattgcccacccctatgaccacaggattaaaactgtcagcatatgaagaagatccatttgaagaccctcagctctatcgatccattgtaggtgccctccaatacttggttattacacggccagaaatctccttcagcgttaataaagtttgtcaattcatggcacagcctcttttacctcactggaacgctgtcaaaaggatactttgataccttgctggaacaatagactatggtctgcaacttagcaaatccaactctctagatgttgtggcgttttgcgatgctgactgggccactgatgttgatgactgacgcagcacttcaggtttttccatttatcttggctcgaacttagtagcatggcagtgcaaaaagcaacaaactgtgtcacgctcaagcactgaaattgagtaccgcagtttagctcaagcagtttctgagattatatgcttcattctctgttcgctgaactgcatatcactttgccctgttcacctgttttatggtgcgataacctcagcactgtcttgcttactgccaaccctgtgttgcacgctcgaactaagcatatagagctggatctttattttgttcgtgagaagattttacaaggctcagtttgtgtcaaacatgttcctgcaattgaccaagttgctgatggtcttactaagcctgtctctagccctcgttttgtggaattcaggtccaaacttaacattgtgcctagctcacattgtcaagtttgagggggtgtattagggagcctttctgttagctgttagttgtaaccgttttcggttagtctggttcttccagctactggttttgttctgttctgttagtctatataatgctgtaacagtctctccctattgtaatgaattcttctctttggaatatcattcaacctttcttacagattctttcttctcctttaatctctttcctctgttgtttccttggttctttaattctctttattctttgtttcaatggct

SEQ ID NO: 36907 - DNA, 2994 bp, Cannabis sativa
aaaagaaattacagaattgaaagagggaaaaaataaaagagaagccacaagaggctaggcaagcaagttctaagaagaaaaaggagaaaaggtcaaatagtcagagcggacgggattacgatgaaaatgaggtaggccccacatttgaagggtcagactgtgcggtggctttattatattattatatgtatataaaagggctctaaataaatctattgttggaatatctcaattttaaaaacgctgtctttcctaattttcctttattgatttaattttttcttctctgcttataatttcttgtttggaaaaacaaagcaaagaaaaaccggtaaagagagtagagtttttctgaggatcagagaaccagtagaagaagaaaacagcaatggcggatcaactcactgacgatcagatctccgagtttaaggaagcttttagcctatttgacaaggatggcgatggttcgatttctctttctctgtctctacatttatcagatctagttttcatgttttggttaataactagtcttccactcgatcactcgattttgtttttttcgggaaatatgtttttgggggactttttcggtccctgttgactgcatttccttttattttatagtgcttattttaatcggtgagatgaagaagcagtatttgattaattggttattggcgtgacttttcttaattattgatatttaaagagattattatgagattaatttagctctatctttcaagttagacaccgtttggctgatgttagaatttggagaaaagtagggagaaagttggatctcgaagatttttaggattacgtgtttccatcataatttagatgcgaacagctaactggattttcactgttttcatcttagctctaaattgttatttttatttttatatgatattttttttcctacgaatttataaataatgttattttcggaatatggattctaagtgcaggattcattgtagcgcctattttttttttgttttccgataggatgcgtcttgttcgttaatcaatattttaagggtcatctatgttcattgtttgatcatcaaatccgtttaaagaaacaatagctgaagaattatgaagtttatttcctcttcattggtgaaggcatattaacaatcttgtacgtttcgtgtgatataaaaaagtttctaatacgagcaaaatgacaagagagagagagagagagaggtttataatgaccctgaattgaaagttctattacttggaatgtgtctttaaatacaaaccctttgctgtaattttttttattttaatggaatcatttattactgttttagtatgatctagtgactaatatcaatttttgcagttgccaatgatatattattacttaatataatagcttgaatgattgattgttcttcaattgttttgttaatgtattgctgcttttgtactctttgttgttgcttatgtgatttttacttgaatgtgtaatctttaaaatacacagcgaatttgattattcacggttttcatctaatttttgccaaaccacactacgtgttacaagttggggtaactcttggaagttgaagtttgcaatgaaacaagctttttttccccattttgtgtgctagttactaatgacctttcaatcattataatttatgtaggctgcattactaccaaggagctgggtactgtgatgaggtcattgggccagaacccaactgaggcagagcttcaggacatgatcaatgaggttgatgctgatggaaatggaaccatcgacttccccgagttcttaaatctgatggcaaggaagatgaaggataccgactctgaggaggaactgaaggaggccttccgagtttttgacaaagaccagaatggattcatatctgctgctgagctgcgccatgtcatgacaaaccttggagagaaactcactgatgaagaggtcgacgagatgattcgtgaggctgatgttgatggtgatggtcagataaactatgaggagtttgtcaaagttatgatggccaagtgatgaaccattactgccaaatgaacttcaccctcgcaaaaaagagagtataaaaggaggaaaaaaaatttaagaactgggttgatattcaatggtttcctgtttttccatatctctactttttatcttatggtttttgtaatcaagctttctatagatagtagtcagttctggtggtatggtctatggtggaattgatggtgttattaagtcttttaagtcaatgtgacagaatgtatcttttatttcttctattccttatatttcgtgttctctcgtgaatcttaaactgcttagagcattggaagcactccattataaaatagcttagtgttattgttgtccatatttttttaccaaaaatatgtggccatttgagaatcagccacatgccacatgaacgagatgaccaattgatattaatactccgatcatgagaacttctggtagatacattggtatccgagaacaaacaaagatcctaggagagttcccaaagttaagtcatagtctcggcctccgagcattgtaggtgactctttccttaccgacgacaaaatgaatttgtacttagaaatatgatttttttttggatttaacccatattttttttgacattatgttttcctattatcgcttattgacgacttccttttgcactgtcccatcagccgtgaacacctccaatgttgtctcaccaaactcttactttaggtcctaccccatacgtccgttaccagaaattatttcctcggcctagaaaaaagccacatagggcctagagagtaaatgaggatttaccaagagcattgagatacttcccaactctcgcctataaatatgaatagaattctataaaaaaaaagggagttcaattgtaatgagaatgctacaagcattatgtaaagaccgcttagtttaatttagaaattagcagttaatcacgttta

SEQ ID NO: 36908 - DNA, 5599 bp, Cannabis sativa
  modified_base (61)..(62): a, c, t, g, unknown or other
aaaatgtgatttctgatctttattaattagtaaatccgattatattgaaatggattttatnnagggcacaaaacccaacaagttgatcattatttatctagaagaactgatgacttatggattcagtccagtgacattgttgggctttgaatatttggattgggtttgctatttagatttcacatgtcctcttccaaaaacacgaataacatttacccccaagcttctagaatgttgtgggttacggaggcttatttcggacttcatggatggacaggtggaggctaaaggtaaaacctttaggaattccatatactttctgtagatgcaagataactttccattttttgaattaaaggccatatgtgtggatgcatcattagttcatggagtacctgttcgtcgaggaggcacttgaagcaaaataaatgaagtggtggctatttatttttgtgcgagtcttgaggagaatatcatcatgcgatttatcttggtcccagatattgcatttaatgcttaactgatggctttctgaatcattggatcgaatttgttttttggagagtaaatatagaccattgatttgagcttcacgtggatacaaatcctagttataaatactttgtaacgccactatttaccacttttaccgaaatttctttagagcttatagaggagatatcaatttcgagttaagcaattatggagcacgatattgaatactacaaccatcttcttcttcaaattagggcttgagatcatccaaacgcaccaccattagtggttatttgcacgtctctagggaaacagttaacacttgatcttaattctgaaatggattctttaatcgatcaagcttgtgctattaaagaaagatttaattgtattaagcgtccatctatagaaaaactcaatctgatgccatcatttgacatcagtgtttgttatctggagttgaacttctttgcaagtccaaaattctcaccagctttttgacatgtgatttttctctctttaatttcttgagtcttgatcaatatttgaaattagtatatgtttttgcaatgacgtgtgctttatttgtcatttgatgagtagaaaagaggcctgtgactagattttggtaaaagtaggacattctagatactgtattaaataggttttgcatctagttacaactagatttctcattttctttgtcttggaaaaattttccttgcagcagaattgttggcaatatttttattcctctgcttaaaaccctcatggttcaagatgatgtttctatcttccttttatttgattctcattgttcccaatcaaattgttcggagtgattactccattagagttttgattccggatgtaagattcgtaaggggcctttccaagaagttaaaggaaaggatccttttaatccatgttatcttctttattatgggtaagtaactgcttggtagtttctttctttttccttttcgagcttgtcatgtatgaagaagatcatcataaggaggtgacagtaaatgaggaagacattgttgtggaagaggtcgctgcacaaaaacttgtactgagttcttcaccgtgggagatggatcaataccagaacaagttccagaattatgataacctccaaaaatatgagatcaagaggggtctccaaagtgttctaggattattctggaatagactccccgttcatggagagattgcctagtaagtgtatcgaaggaggtttcaacatttggagttggggtcatgtagagatgggagcgcatcctccattaagaagctactttgcaaaattctgcactgtggttgaagtggcaccatttcaattcatcccacaattttatcatttgattgttggatggtatatcttgtggaagcaaggtgggcattccaacctcaaaggagatcttgtacttctacaagatcaagccctaaaatatgcggaaccataaatagaagaccaacttttataggttggataggtattccaagtccctggtttgtccagttagtactatgaagcattcttatgacatccgggactactggttctacacttttgacttcccattaaagttctaactctcactcttgattttgacatagcaagtaagtataactatttactcagctctttcttggctttttttcctatttttattattccaggaacttatccaagttagttttgttacactcttttagattcccttcctcgatcaccttagactctaatttttggagacaaagcatatcttttatcagagccttactgacaaagatttacgggtacaagatcttgtgactactgctaatctcaaagatgttggtctgatggctccccatcagagcattgatgctcttacagtgaaggacgcaattagagatctccattacagtgatcctcctggggtgaaagaagtaattgcccaagttacagcttaggaggtggtaaaggttgttaaagttgaccaagagtggttaactgactggagtcaaaagtttttggagcctttgaatgaggaggaagaaattcacattcgatttaaggatgctatccaaaatgagggtactccaggagtgactacatcctgaagtggtaagacaccattcacttagtttgaattccatccttggaaaatttagatcatgttgaccaagatagatttgactcttattttttagactaagatcatcatagatattcggtaattagatacatagatagggtggacaatgttgttaggagcctgaatcattttgttcttccattacaaactgttaggatagactccttccctaagatgaagtatgcagggttcttctagtatgggagctttttagatagggaagacatcttccaatttgatagagggaacccccagtatactagaataaatggtttggaccatatttgtgtattattttccatattgtttatcgttaactgcttttgtgatattaaaacttacatgttttgttttgcagaaaatccacacacttttcagatgggtctaattgacaatttttttggaaccatcgccaaaatgtccaatgacataagagaggcttccaaagatggcaaaggaaaggggtaggcaatgcagccttcaactgctagaacttaaaaatagcaactccagccaagggacacgaggctcttttttaggcctcggcttcaaaaattattgctctttcccaagttcctctggctatggtggacatttcttcacaaggagaagtagctggagctgctctaacagtggcacctctttagctaagataattattactacataaaagatgagttttcagataatattagaatgatcaagaagttagatagaaactgaacaccacataacacacacacactctctctctctctcttgttcggctctatgaaaaccaaggaacccaaagaatttatgactaaactcttcactccttagcaaggattttagctagaagttaaggtgaaattgttagctaagatcaaggtatgtttttagcctctttcttctttgaattttgaaggaaaaagcatggttttatatggaaattttggagttagtttctgtagtttattttgggttttagaattgttttttgactaccttacattgtaaatattgttgagttgggggagtagtagcagttgtagtaggttttgagtgagtttgagttttagaactcaagctttgctcttcaatggaactttttgatttggtgtttaattatggtatttgagttgtggagcatgtttagtatgttatattttggtgttctggaaagtttggtagtatttggtaaagtttggagcaagttttttaggctcagtttttgaggtcttactgcccaggaatcagtcatatgggttgtacaggactataccaacctaaagtccgattggattgtatcgagaaaggccaatttttgtattttggccataacttttcacttgagtgtctgttttggatgttctatatactgttttaaaatttgtgaaaagctctatagtatggtatataaattaaagctaaagtatctattttattttagggtattttcaccacgtagtttggtagaaaatcctagattttatatatgtgcattaagaagtgttttagagtaaaaacttattagttttacgttaatatgacttaggacctccaatcgtcgagtattttttccactcatgttgattgaaacactaattatggaattaaggtaagaatagtataacagatgtacatgtttagcgtacatgtattatgtttgccaattagataatatattaaaaagagcggtattggtatacatagaggtgcaactggatattaatggtatatatgttcaacaattttaaaaaagtacaaattaatgctaccaacactagtatgcctatagtactgagtgcattttggtattatggttaattgtacttatagtatggattgatgttatcacattagtgcaactagagtactgagtataggcttatattatggtcaattattctatagttaagaacgttcaagacttagttatatgcactggacgcagatagtagactcatggtaattaggtgtatgtgcacctaattacaaatcagatatatgtttatattttatgtttttcttactgagtcggtcgactcacatgtttcatgtgtaggtaaaggcaaagctaaagctgaatgacagtgagtggcgagcttagtaaggattgtacatatccagacaattaaacctgtagagtaatgattttcaggacatcatatgcttagttttatttgtcgctaggtgacacttttgttattcaatattttgtgttttgtttttgaaaaataaattataggatctggactcctaaacattttttaattatgaagtatgtttaataaagttttatttaatgcaaaaaaatttattaaacgcaattttatactaaatcctttgattagcaaatgttagcacaataattaagaaaatatcatagcgtgcctaaactagtagggcgttacaatttggtattagagcgaccaggttgttcttcgaagattgtcaaaatatgtacaatcattattaaagacaagctcaactcacgattcagtaagcctttatatgttttagtagattaaattagataagtatgattagaaaaatgtgatagaaaacgtgattaatagtatgatatatgaataagtgtgtttaaaattttcatgatatacgatataaattgtgattaggaccattactttatttacctgatttatggatcgtgaaatttacgttatgaaataagatttgggaatcacggtaagaatcactgtatagaagttaaggctagaagtggtcataaggactagaattcccctcaagttacagccgtaattgaggtcatagtaaaagcgttatgggtggaaatatagatccacaatatgcttcaataaattgggaacatagggttgcaaaaatatgaatcaaaccctaaggatgagaggtgtgcctccaatttgagaaaaaatcaaaattaggtcaaatctgcgatttctgtacctagtcgcaactagcatttaagc

SEQ ID NO: 36909 - DNA, 3912 bp, Cannabis sativa
tctatatatctatataattttgttgttatgcatgatgatgtggccatctctataagctttgtttcactttttctattttcttaatttttcttattatttttaatttttcataatgacaatagaaggtgaaaagacactaaaaatttctagtttaaatatatttaacaaacaattagcagaaataaaaaagatattagcaaacacaataaatttgcaaacaaaataagagaccttcccactcataaaataagagaaagtttaatgtccaattactctatttttttaacattattaacccgtccaaactacattgatgagttaaaacagtccctcaacgtggcaacaagttagcctctatcttaatcaccagacaaactgccacgtgtaaacaaatatgatcaggtgtttccagcatgcccatcaaagaagtcttccccagctgattattttttcttttttggaaaattaggtaataattattttcattcttatagttcctttttcatagctaaaagatggcttctttacattgtttgagcttacaaaccacaactgctttcatttcttccaaaacccctaccgaattcgggtcgaaatccaagcttttcgctctgggctctcactctttagcgaaaattagaaagccttgcttctctgttcgtgccatgggttcatcttcttcttccccaaaatctgacagcaacattcaaggtctcatctttcttttccctactttgagtgaattcatagagttcatttgatatatttcctggtgaatttacccatggtagctctctctctccttgttaatgtaaacttgattgaaagcaaatacccagataagaaaattggttatttcttgtctatggatgaattacacctatttatcttgtgtattcaattatgtgttttgacaatggtatcacatagattaaacatagtgcagacaactcaagagctaacgttgcaatccttgctcaattttataatttgattgcagaggcagcaggagcaattgactataaatctttaagtgatcaagaatggaagaagaagctaagtggggagcaattctacgttactcgtcaaaagggaacagagagagcattcactgggtatgactatttaaaccttgagtaaaactgctagagatgcttttagctcagtggcttgaaattatggcacatcttgcaattttttggtgttaactgcgagtgttcctatgattactcttttatcttctatgcttacggagattttagattcatttcattagactttgaaaattatggtgaaattttcgacctttgctgttacattatgaagaaaaatcacaagtttggctgacctattaacatatagaagggcttttaaggaacataagaacttgaattaattcaatgtcctgtatggattttcagtctcgctactttcttgcaagttcttctaattttaagaactttctactctttgaattatggtagacatgttgattgctttttaaatttcctctagataaaagaaatgaagaattttgcttctattttagtcctacttcagaataattttacaattttaatcttttgaattctattgtagtttggatttggattcattcacggtacacttgcttgtattataagagtgtttacatcaatggatgaaagaaattgaaaataagaaagacttccaaatcctctttatgtagagattatgattgtccaattacttgtggtacaagttcattactgctgtttagggtgtttcctttgtcataacagaaattgagtctaaatagagtttcctgccattaaccgtttgtgaaaaatgcatctgcacaaaggattgaatgaaaagaagttgtcaccatttttgatgccttctctaaaaatgacatctttttcaatattaggcagtggatcaggattagtaggcttactattcattaagcatagtaggttaatgttactgttttttcagccaccagatttgtaatcctaaattattccttgcaaacaaatataaattgaaacatattatgctttacacataaatcagaattacttatattgatgcacactgagtcactgatgatatttttggtctatgtacttcaaaccatcttatgctactttgttcttcttatcagggagtactggaataccaaaacgccaggaacttaccattgcatatgttgtgacacaccactctttgagtaagtattttagtcaaggcaaactttactcttgcttatctacggtttttgtaaacaccaattcacctgaaatttctgctgcagatcatcgacgaaatttgacagtggaactggttggccatcttattaccaacctataggaaactatgtcaagtcaaaattagatttgtcagttattttcatgccacgccaggaagttctttgccaagtttgcgatgctcatctcggccatgtctttgatgacgggccaccacccactggaaaacgattctgtatcaacaggtaaatttttaaacagctatgttaaaaggcctgggcatggtcttttctttctcatttcccaaatccagttccgtggttatttctaaattgaaccttttttgtttgtgttttgtttatgtctatctctgcagtgcatctctgaaactaaagccaaaagtagaaggcaactagaaagggcagtctttaataagcaaactatgagtatatagattaaagatctctataagatgaagagaagcacttggatttatctacagcttctgttccttgttggtttttctaagttattatgagaatgtggtaatcatgaatacattacagcttaacacttgtagattctataccaataatatggataaggggtaaataagcaaaaaattctaccaacttattaatatattattcattatatttttttttcaaaacaaatagttatctatgaatgataggaatgtagatttttcttatggggatagcctcacggagacccgcccccctctaatggaacgatggttttttgtctaaatggagaatgaggcgggaaggggataacactccctcccttgatagggatttattaatattttatttatattttatatttcatgtttgtatttttaatattatttttataaattgtgttttagataataattagcatattaaataataattaatgtttatgaagtttaatatttttatacatttaaatgtttaatataaattttatttttatttgaggattctttatccccattagggattgggtgaagagattaaaatccttaattaggttgggatgagtagagctctcccaaaaattctccgttcattaatttatcttttattggaatttgcagaatcttaagtgtctcttacaaattttgtgttaatcactcacttatcacgtaatttttttctagttgtggctggactaattcttgtttagagggtttgttttgccatttttttaatatgtaattctaatttctagattatataatctagagaatatgtcaactttttcttttacaatatttacttacacattgatcatctgaataatatcaaagtatatatatttccaccaatcagaacaagaatatatttataagacaataatactttttatttattttaactggtattttaactgttataaaaagattatattattttctttaaataaattactaatatgttttgtttgttttataaatttttgtaaatagcattacatttaaaaagtcaattaaatatgtgtatatgacctaaagaaaagaattatgacctaattcaataaaaatatttaaagccaaaaagagaaattatttatacattttgacggaaacagctaatttttaagcataaagcgtttcctagttcctaccttcctaggtttctagtcaatgaaa

SEQ ID NO: 36910 - DNA, 5171 bp, Cannabis sativa
aaaaaaaaacataagcaacaaatttttgggtttaatgtaaatttgacctatttttaaaattttgaaatatataagtttagggaattaatttctcctattagtatagataaataattaaatttttcattcttaatctatgggtcagtacattgtggaattatatatctataaaataattatataattttttcttttgcagaaataatattatattcatatgtcatgtattgaagaaagatagtgtaaaaaatagtaaaaagaatgtaattgattttttttcaaggatgatgcataatttaagcctttatttaataataataaaaaaaaaaggttgtttttaactgtacacgggtcgctgagatattatttaaatatacagtgtacgaaaatttattatatttatacggttaaatgagattttatttgtaaatataagacactttttaaaaaacctgctattccaaaatagataaagaaataacaatctaaagcttcacagttcacacgacatcatccctttggctccaacaagatttcgacatccattgtcggagctactgaatttaaaataggctatttctctctctctctaaaaattaccgtatagaaagtgattttcttaaaaattatggtcgtaataattgatacaatacaatattttattcaaacgtagtgttacttgttatttaatacaatacgacttttatacgacctaccaaacgagctcttgaagtatttgtgccttaaaaccatgttatcttgacatttctctatactaaggaaatgcattcttaacccaacgtagttccttaatcacttctcccatgttcattctttcttttggtgattccacagagcaggcaagtcctatttttagaacagaatgtaagcactttttcacattctcgttcattttgtcaagaccttcttcgatgtcaaattctaatttctctttcttttttcccattctatgattttcttctgctattgctgatgttgttacctctacttcgctttgaagaaggcttggatccacaagctgcattagtctttctggtacggccatctttgcatattggtgaatattcaagccctctctaaaggtttcatctgtgggcctctttcctgtgaacatttccagcaaaagaattccatagctatacacatccccttggattgatgcctttcctcccattccatactctgtcaattcagatatcataattagtgtgttgatgacatatttgttagtttaaacttcagagatgtaatttagtgtcataaatttaatatcaacttattaagaatatgaaaaacagaattagtaattgcaatataatgcaaagtatttgaagataaaacaaaaaatgagtaacaaggcttaaatgagcataaaccaattcaaacttgtatttatgagttttaagaacttcattctcatataagatttttttaagaaaaaaaaagtcgtgaaaggctattaaattcttataacaagtataagaaattgaagacagaaaaatacaaaaatataaggaaatattacctggtgcagcatagccaatagatccctttaagccaattgtgctactagcttgattttgaggaataccatttgtggttgagagaattctcgctatgccaaagtctccaacatgagcaaccatatcatcatcaagaagaatattgcttggctttaaatcacagtggatgattggaggttcgcattcgaagtgaagatactgtaatgcagaagcaacatcaatagcaacatttagtctttggagaaagttcaagtttcttgaacaatattcactatttatcttcagatgcagccactcctccaagcttgaattcaccatgaactcaaagactagagctttaaattcattaccgttgtagtccaggctggagcatgatgttatgatcttcaccaaatttcgatgcctaatatttctcagtgccatacattcagacatgaaactttttgaagctccattccgttgaaggttgaaaacctttatagcaactaacctttcatcttcatccaaagttcctttaaaaactgagccaaaactaccagaaccaatcaaattgcttggagagaatcctgaagttcctttgtggagcattttatatgaaactttggagaggtgattggggtcccattcttttgttgagagaattgaagatggtttgctttttgaatttctccaaaaatgcaatgcgagaaagaacaacataagtaagcctaaactagcacagctaattatgattactaatttcattgcatgagataatcccatttttcttcctctaaccttgctacatgctggcaattctaattgtgtgatacccccacaaagcttaccatttctaagaattgatatcgcacttgcattcttaaaaactccttctgttggcacctcaccctccaagttgttgaatgaaatattgaaataaaccaaaaagggaagagtttgtagactttttggaatatttcctgataagtgattgagggagagatctaaatatcttaggcctttcaatgaatccaaagatgaaggtataactccttgaaaagaattaccttgcaggttaaggtactcaaggctcaggcactctccaatggttgtgggaatctctcctgaaagactgttttcagagaaatctagttgattaatgtttttcaaattaccaacttctaatggaagacttccagttaaggaattatgagagagattcaataacaatgagagtgaagaaagatcagtaacttccttaggtatggctccagtgaggttattctgagagatgtccaagtattgcaattttttgcagtttccaatacttggtggaattcttccatgtaacttgttttctgacaaatagagttcaatcaattgagtgaggtttccaaaggaagagggaatttggccaaataatttgtttcttctaaggtccattccttgcatgtttctgaacataccaaaactagaaggaatggtgcctacaaagaggttacgcgccatatccaaaacttgtaagttggtgtacttctctaatatgggagggataggtcctgagatttgattaccaccaaggtacagattagtgagtgtgctagttgacaagttggctatggtggatggcaaaacacctccaaattggttgtcactgaaatctagaatttgaatttgggtaaggtttttcaaagatgttaagaaattcaagtcatgggatgaattgcttcctaaattgttagtaccaaaaccaagccaccagacatctataagttttcccaaatcacttggaactactccaacaaaattgttggtggagagaacaacagcttcaagttttgaagcattggataatgaaattgggattggaccagagaattcattgttagaaatggccaaccatttaagattaggaagtgtaagacctatattggctggaagggttccattgaagttgttacttgctgtggagattatagtgagtgctgacaaattgtaaaaggaagaaggtaactcaccagagaatttattagccccaactgcaaaaattgataaactcttcaaattgccaataccttgaggaattcttccatgtaagttgttgtatgggacagagagatgcacaagagaagaaagatttccaactgaagttgggatggttccagtcaaattatttgctccaagctgaagcaattcaagcttggcaaagaagccaagttcataaggtattctaccaacaagtttgttccttgaaaagtctatttcccttaactgagaacagttggacaattgagctggaatttctcctgtaaatgtgttatttgtaagatagaaatattggagcctgaacaaccttccaacttgtattgggatttcaccagagaagctattgttgctgagatctatgagcttcataaagctgagattgccaatgtgtggtgatatggaccccttcaacttataactataaagctccaatgcagtaactcttttatgtcgacggctgcaagtaactcctacccagttgcagaagttggtagaatcattccatgagcttaacacgccaaaaggatcacttccaatccctttcttgatttcaagaagagctaaatgatcgttttcttcacttcccaatgcaatggcaggagtgaccagttgtaaccacagaaagattataaaaaatagaacgattacttgaatatacatagaataagagtaagcatgtatattatgttgatgaagcttcattataggtttgaagaaattaaaaaggagagatacttaaatatatatagacaaaaggttatgtgccatgagattgtggccagttctgcttttataaaccagtatcttttgtaacagacaaacaagttattttgaattattgttatcactttcaaaggtagctttttccacatctactaatataaaaatgatttggtatgaaccacaggaaagagtaattcatttcctcactatgattccaaaggcagccaactttagttgactagcaaaaacttttttagtatctagtggaagcacttcaatatatatatatatatatgtgtgtccacacacacacatccataccttgcaattgcattgcaaagatataaattatataagtcaatgcttacagttgcggtgatcgagttttctcatttttctgccaagttgcttggtgggttcagagtcttcagacccagagtttacttggttgccaaaaaagcaaagagggaccaagcaactctggacctctagttgtgtaagaaagaaaatatttccaattattttttcaagaaataagccattacataaaactaaaaaagaaatgttggactttgttttctgagtaacttgtgcaatgcaatgtctcttgaaaggaacttaattctagaataaatcacctaaacaaaatctagaataaaacaaagagagatcacgtagagtgacatgacaatgtcaattttgttagttgactttcctttcttggtcaaactttctttgaactaaagataattatggatttaattttattcttggttttctataattttagaccacggaccatctttttttggaagagtggttcacaaacaaaagagagctagtatttcaactattaaagtccacatttgcttctaattc

SEQ ID NO: 36911 - DNA, 1476 bp, Cannabis sativa
  modified_base (1375)..(1393): a, c, t, g, unknown or other
ttttttcagggccggccctgattaaagttttattatttttatatttttacagtattctattaaaacacaaaaaaaaaaccatatgaaagtaataaaaaaacaacataaaagataatattcaaataacaaaaaaaattaacaagaatatacaacataaaaaatacataaaaaataaatcgtattttgtgtaaataaaatctaaaattttataaaataatttaaaattctgtacaatagtatttttttttaatttttttaaaaaattatcccttaaataatttaacgatagatataattaatgagaacatcttctctcatatataataaccacacaaaataaagatgagatgatacaaaacttgtaacgatcgagaacttttccttttattgattataatttttaaagaaaaaaacaaatagaaacgtttgcatttactttaattttacgtacgtcttgtctcgcttttttgtgaaaatcatgagctatcgaatttgtttactttatttctgtttgatatattatactctaatatggaccaataatataatgcattcacacatatatattttgtatcttggattttatatattacgtactacagataataatctaaatttgaatttgtagatagttttttttttttttcaaaattagaaaaatatgactggaaataaatggtacaaaattatgttggggagctggtgttttaaagtgtgttaagctagaaattagtacgtgactttgttcgttttcaagttatggacgtacagtttatcaacacgtgtcccatatcaatacttgacctaactcctccaattgccgaaacttcctaaataaagcctaatgaccgtacgtaacatacatttttcttttttatatatataattaaataagggatttttgtaaaaatataactaaattacaaattagtggtctaaaataaaattgttggtgtacacactatatataatgtggtttaaatttgacacatgttaaaaattatactaaatttgaacaaaatataacataaatcaaattttacgcaacaataaatataatttttttatttatttttttgaaactgtaattaataatatttattttacttagagcataattataaaatttaaactaaatataatattattcattcatttttttttttttagctaaattcaacacaaaatttacacccattccttgaagatgatctcatatattaaagcactgaaattgaggtattcgaacaaaacagcaaaatgtacagtaaaaacgttggtgcctgaaatttagtggtccacaagtgttaatgtattactgccaagaaattaataagtcttattctttttcgaatccttttcaaaaaaaaaaaannnnnnnnnnnnnnnnnnnaaaaaaaaaaagaaaagaaagggaaaaagaaaaaaaaaaaaaaaaaaaaaaaaaatttttatattttttttttttgttttttt

SEQ ID NO: 36912 - DNA, 4411 bp, Cannabis sativa
aaaaagtcaaaagccatgagtgagtggctgaactttgtgtattattgtgttggtcattcaacgtcatgtgaaaatataattatgcgcatctgtatatgaagtgtctaaattagtgggtcaattacttacaaaagttttgtatatgatgatgacttatggaacaggaagttcactttgggaaattgatactcttcgccaccattactgtcccgctgtttcaaggtacttgcttcagtaataataaccaggctctttcgtgcttaacccttaattattattattattatatatctgttgttatgtttctaaccctttattgtcctctttctttagatttgttttgtcacttgagaatgatctgacggttagagccaaaacaactgaactttctatcgaagattttagctcgggttcatatgcaacaatttttgcggacgaggtagttctaacatcagtctctctttctctgtcttttgaatatgttatcatcacttgcttacttttactcccaaaacaacttctgttcgggtcccttctgggtacctccatagcaattgctatagttttctggtctccaaatattatagggttaggcggagatcttagtttccaaaagaaactgttcaggtttttcactattaactaatttgatgacttatagatcttcttcccatgtagaacaagtttatatttgtttgtttcaccaacttttgccaacagaggattagaactttcataatccccctctggtaaataggtttttgtcagaatttctgaactgatttaagaattatattacagattagacgaagggtaaaacaagttccactggcattctacaaagcacctcccacctctttgttctcagacactgactttgctggctggactttcaaacacgaagatgataatacttcaccgaaacggcctcgattatgaatctacacaattacactctcaagtaaaaacatgctctttagttgagcaattttgagtttgagctttagcatttttgctcttacctccttttggagatgtcattttatatttattggcttctgcaacaaattttgacctttattctttgtcttcctccatagctttaggcattgcaaactgtacctcatatagtatgacaatgacttcatagtaaagattagttaaaaagttaaatttaaaatttttggcattttaaagttctatagtacaaattagatgaattcaagcctcaaattgagtagtagtttcaaaataatataaacgtatgacccaatctatttatgtacatgagagagataataataacaaaatgctaccgtactacaaaagtaaaatttcccaagaaacaaagacatgatcttataaatgaaactgatttcccttaaaaaagaaagaaaaaagaaagaaaaaatggaactgatttagtgattgttcattgccattcagagattataagtcataagctctgtttatacaccactatctaaggcctcctgaagaaggttcaaaccttctgctgatatgctcctactgaacttgaatttcgggaattcaagccgaggtggcgggtcgggagagaaacaaataatgacgacagtcagattgtcgcaagagtttcgcttcaaggcctctctgaccaactctcttgaacatctttcgggatcattgtgaagcatcaactctttccttgccattgtaactgcacactggctactcatcacatcccacaagccatcacagcctataatcaaaaactcatcttcctcacttagaattgtctcctgaagttccggttctgcacttaagggacacgacgagcctttggcacctttcatgtgccagtccccaagagcccttgctacagatagttggccattaaggtagccatcataaacaaccccacctagcttttcaattcttgatctttcagagatgctattgggtttatgatcatttgacaactcgaccgcccttcctcgtttccccaacacagctcgacaatctccagcattggcaatcaacaatgtcctggtagaagaaatttccatgagttaactcatttgtaagacatgataaatcttttcaactagaagcaaaaaataacattcactttcaaagttcagaccttccaaatataagggcagtcagagcggtagtacccgaggatcgatcaagagagccatcatcagcaaaagcgtggtcagcattgaggaaagcgctcttaatagccttctccacacagaacggaaaatcaatgtcctcgattataaaccttagaatgttctctctgatgaatgaagctgcatctgtaccaccatggccatcaaatacctgtaacaggaaaaaccaatgttcagtttacaaaaggcttctctatgatttgaacatgtttatatttgggatagaagaaatcaaatcacaaaccccatagaaagctccaggagaagggaagttttctgttgcacctagatgttcaagaagattgtcaatacatatgtgttcatcctccatatatggttttgatccaatctctgaacagcttccagaacgaaaaatcggtacaaatgttgagttagaatctgatggcagcctagagctaacaatcccaccatcacattcctaaagaaagcacaccaatcagtaataaatcaagcatatcaatgaacacttcatataacaatattattgatgaaagtagagactttgactcaccacttcagtagcatgagccaactgagcagagcttacagaatgccgaattgacgacacatggcgaggaggtttcccaatatttggagattcttttaagaactcctgaatttcagacttgtcatctctcatcacagtaacattcacctttctataacttctatcaactaaagaaagtggagttgggcaatcagtccctgcggacatattagtttccaaaacatgaaccctcaaattgactaaaattggccaacatccaaaccaatcttcttcaacttctccttgattatcagcttaaaactttaagatcttgggaaagagacactccagatacaaccccaaaatacttctaatattagtacttgttgttcactgtctttttcaggaaattaatattgtgagtcctgcataaacatattgaaccaaatctcaagtcatttatggcttacatgctggtcctaaaatcatgacaaacatgttgagcaaaaacatcaagcaatctaataaaccactttatccctaaattgcccctacaaagatcatatcatctccactaataacaccaagaaaacaagaaaaaaaaaaactacccactttaagattcaaacaacccacatcacaaaactgaaaatttcttccaaaacccaaatcaagttaacaaatttacaccaaattttacttaaagggaacctctacacaatcaaagctagcaaatatacatgaatcaaaaccaaacaatttgtaaactacgcatacaaatcatagaacaacaaccccaaaaaaatataaacataaatagtaacaattcccaccccacttaatctaaaaagcatctacctcaaacaaaatccacaaaaaaaaaaaaaacccaactgggtgataattaatatacttgccgtacaattatggtaagtctcttgtgagataaattgaaaaggagaggagcaaaacccagaagcccacaaagctttcggacaagaaaaaaagagccttttttttttggtgataaatgctcaactattgttttattgaacaaagtcccatctgagtttttgttgacaaaggatctgtcatagtggtttttttttttttttttgtcgaccggtaatttcaggtaatccggttacattatggttctgtctatagtaaattaccgacacgtggtaaatttggagtggacagttcttgcttgtaacctgataaggaaggttgtcgtgtttcaacaattgcggctgcgttaatcctggccgttggattataacaaaaaccattaagagagggaaaaggaaaataatggaaggaatcgttgacgatcgttgactgtgccgatgacggtgacgagttcaacgacgagatggagcgcgtgaggctacgtgttacctcttggtacaatcatccataactcaccaacttctttcactctttcttctccacacggtgccttaaaatgtcagttaccggttaccggtgacttgggctttggacctgaatctattgggctttctaatgggcccctgtctatcagaatatattttgtgatagttcctaaagatagtctaggattttttgttggtgttattattagtataattaagtatcgagtctcgtataatttaacaaaatagcatttaacaaatatcgctaactaattataagactccacttataaaaggtattagatactactagtgtccaataatat

SEQ ID NO: 36913 - DNA, 4808 bp, Cannabis sativa
attgttttatccaaacatagtgttatttattatttaatacaatacgactcttatacggcgtaccaaacgagccctaagaggatgagttgaatgaggaaactttgaatgcttattatgagaatgaggatccaagaggtgctagggactcggtagggaagtctagcattcctgaccttaggaagtctagcattcctgacataaaccctaaaccttaagccttcaacacggaggtctccaaatcacattccctctagtagcacgaatcctcctaaatgtattatgtaattgaaataagaatgtttaacttagctaaaaatatacggtaatttatcgaatatataaaaatatttatagtataaacaaacccactaaagtatgtatgtacgtatatacaaagtaaaataaaatataagatcctcttattctcatagccagcaaaacttacctcattccttcactctacattataatttttacggaagacatccaagtcaaagtagtttaacaatataaaatttcagagttctctttttctttacttgtttttcctctcttcagtttgaaggtaatttaggcagatccatatataaagattctcaccagctacatatagttcacaatctggagcgacgtatgcatttgattgggttaaactgattatgcctccgtcggctaatggaatctgatgaacggatatcccaaccttcaatgttgttggggacacaaacgtcaaacaagatttggccaaggacgccatgaacgttaatgcttgttggtggattaggaaggtggatcagaccttcttgtctatgttcatcttgcatggacccgacatctctgccttcgtagtactccactgagctaggcaagtagagattgtcacctgcagccagagaaatcccctggaaactatttgagctagctgctgtttttgttaaagtagggattggctctactgtctcgtcatgcgttacctctacattgcctaatttttctccttcaagccgttttattctttgagaatagattcctgctgatttacggaggagctctgtcactgcagcctcgtactgaattttgtaattcctatagtggcctgtggcaacatcaggttgagtttgaaaaatagaaacataatttaggaataagaatgcagttcgatcttgctagataatttagcaatatccagggagtacttaagttaagaaacatacccacatgaggtgagtcattccactttacaagatttacatcagccccaagttcttgcagtcgttgagcaaaattgtggataatttggaatggagcaagatcatcattttttgaacataatataagatatgggaccttcatgttctgcataagaatagtagtggttgatagaaaagaataagattaagagtagaactattgaattgaagagaaattaatgcacactttgttacttacagcagtagaatacagagtctgccaataatctgcacgctgttgttcaaacctactgagaaaaagagcatcaagactagaagcaataccatgagctaaccaagatactactcttggtggtttggacattttcatcacagttgggtgaagaatgaatttggttcctagatcactggtaaaatccactggacttgaatcatagatgtagccgcaaatgcagtctttaactagccggtaatcatccttagccaaaaataaaaaagtaaagacagagagagagaggaaaaaaatcagcaaagttgagccatcactatggcagtcatgttaaccttatttcatagttgagccaatgtacacattcatgctcaaataaagtgaagcgtctacagttatcatgacagaattactagtagcaagaaaagaaaatgcataccagatccaattgtgtttcacaaattccctcaattatctgccaaagaagaaatgcattcattaactggaatcacagtaaaaatacataactcaaaacaaaaaaagtcctttaacattggaacatcccgtgtttgaagaggtttacctgaagaaccttgaccatgcaggctttaggaccaccagagaaagaagcaaatactactgggcgtggcttactttttagttcctgcaagcaaattatatatgcgattacttgtaaatcccatgtgatcaatcatatttcagggtgacttttacattacatgttttgtattaccctaatctggtcaggcacatttacaacttttctatattacttagatatggtgttctattaaatctgaatataaatgcaaatttcacagcaactataagtttactcaccactacaagctcttttaaaatatcaatggcaggcggtgttgctttctcggggaagaacctgcataaattaaagagatttttcgaacaaaagagaagcaatttagaactgcctttttttagtcttaccatcacataggaagcaacacagaaaggcagaatcattgcaacactaatgtatttccaaagtctaattctgttaaatagatggcattccattaatttctttttgagtctaaaacattaaatattttgcttcccaagtagatcttatcataataattcattcagtgagatgcagtcatattttgcaaccgaaccaacaagatggaacttgttacaattgcattaaaagttggtataatggtcatattctacgtccaacagaatataatcatcatgtgtgcttatggtcctttaagtttcatacaaaataagtctgtaatgatcaatagtttaagaggaaagctttccacaattttcccaagatatatgaatgaaataatctagagtcgggtatcaatgaacaagaagaaacagaatcaaaaacacttttggaaagagtactctagtgaaagtggccatccaaatagacaaagttgttactggagtatacagtggactattcagccttaatcatgatggaaacaaagatggatcttctcgaaggcaagaaattgagatcgaatggtccaaccgaaacgcggacgaaggaacgtatattgagagtagactaaggttaagtgtccaaataggaaggacaaacttggtatgcttatagttattgatgtcttctatagatcaatttttgtagtctggaagatgaagaagctgcttgagttgtaagtgtgaattatatttttcaagttgcagaggcattcccacaatatagtgaacttgaaagaaaagctgattaggagtttgtacagttcagtctttgttgtaggtgtaagtttctcaaattgctaggaagaataaacatttcaaaatcccataatcaagctttcttttttggcaataaagtatgccctttttaatcccaaaataggtctgtatatgtattttgttcttggtacactatacccattacaattgtttgtcttcgtcaaaaaaagtcaacgtaatcaatgacccaccaacccagaactaacccaatttaagagagaaatcgaaactgaactatctcatcgagacttatcaacagtaataaaattccactctaacgacaatctagttgtatctggaatacatttaagaaaaccacattttgcataaacaaaagaagaaaactcagtgcaaaacccatacatagagctccacaagtgaggtataatccagcaaatcaaacaagcaaaactcaattagatggttttctgaaaccaagtcaacccgtaaaacccacatagctaattatacaagaaacacaaaacccataaaagataattcgaaagctggcaaaaaaagaaaaaagaataccactgaactcacatattgagaaattgagagtggcaaacgagagaattccatcccaaagaggtgtagagctgaacataactcttcaagtgtctttcatggctggacatccatgcgaacactacaacaattccttcaactttctcacatcgctcttttctcccccagtaataccttcccccaaatccccacatcttcttcgttctcgttccaaccaaaaacaaacttttactacgtctaccaaaattcttcgaaaattctcccaaattaagcagataaattactcaaaaaagaaaaattgatattccaggagaagagatgttaagctggtaaatgattttgtcgtatccacaattttgcacaaatgttgtattttttgtttcaaggatatgcgtgatgatcttcgagttttggattaagtgcaatcaagtagttgctgttacctctgcaacttccaacaaaagcggcccacgtaggacccaccatacgatttttctcctcatgaactacccatcatctattgatcgagtggaagaccatcacaatgctagcaagttgggctaaacttggggcgaatttatcgagtttcgggttcaaaaaaataaaaccgaacctggacccgaatagggcacgggttggctggttggcaggtcacggattgacagatttcggttggccgagttgaccgaattggcaggttgactcggtcaactcgatcaactccttaaaaaatttattttttttatttaaaactaataaaaataacaataaattaaaataaattttatatactattaaaaaattattatatatttgtgaactaggtaacaatgtcgcacttccaaccgctcttcaaatatttttaaactatattattttttaaaatacgacaaactaaaaactaactaaagagtcactgtcaatttaaattaataatattaatataaaacatcaaaactatataaattcccttaatttagcagcttcttattgattcgagctaattatttacatacattttattttatcaaattaat

SEQ ID NO: 36914 - DNA, 1943 bp, Cannabis sativa
aattggaccaagctagaaaggaatcatcactaaacgacatcaaataaaatgagtacgagggagtaaaaagacacatacatcgctgggcgttgaagaacatgagggccttgtgaagagcgagagtgtagttatcaggaggagcatgggcgtgtttatggcgaggaacagtcttgacgatgagagtgatcaatccagcgagaacagcagagacgagcaaggtcccaaccgtccaaacaaagatcttacggctgacaatgatgcatcccagatccacatacttcttcttcttctgctccccagtgggtcccaaaagccaactctgctgggtctcatccaaaggccgagacgacaacgccgcccgatcaaagtcctggagattccggctccgatcatcgtcggtagccgaatcagcggcattgatctccaatggacccccccatggatcccggccgtacatggtgattgtgttctagctctcgttctagtgtggtttgaagagtagtagtactagtttgggagaggtagagagagaaagagtgagacccagatctgggttttagagagagagggatagaaatggtagctgaaagtttcttttatggagaaaaatgggagaagaagaagaaagaagaaagtgtcggtcggagtgtgagtgaaggtatggaggagttggatgatgagataaaaatatataatgaaaggactaataagcaaaagatataaatagaaaaggacaaatatgcaaatattaataatatattatattgtcacatttttcttaaaatattataaaatgagaatccaatccagcccaagttgaataattgagtggtcgatggatgggaacagcgccttatgacggtgggtgctttctctctctttctatctctaacctttatttcttttatttattattttaacagttgtcacctattggataattaaaattaaaattcatgttattattattactattctaattttgtaagttacgaaaatatctcattaataatatttattcgttttccttttcaaaagaaaaaaagacaataatgtgtgtgttcattagttactattcatttaacacatttattattaacagtcctctcgatgatccagcaatgtaatgttggtttaggttgaggataatataagtgtattgtggtaatgatattaattaattgattatgtaaatatattaaaggaatatgattgggatatgggttgttagtattttggtttttgttgattaattaattattagggcttttttttttccctttaattgtgcgtaggaattcggtttgtgacaaagaccacccccctaaccagacaaagacactctgtctaattgtttattattattattatctaatattaaaaagaagtgtatatgagtgtatgtatgtatgtatagtggtcttttcttagattacactcgttttctggtagaaataataataagtaaaaaataaaaaaggaaattgactgttagaaacacgcacacccaacctccggaagctcaaaggccattatcacttcttactatactgcccttttacaaatatcaaaattatctaataatattgaaatcttcataatattaatgttaagatttataaaagactctaatagtatctctaatggtagcattttgtaagaatactaaaaatttacatattattaaaaaatgtaatattttattttatctttctttcatattatttttgagagttatggcataacttccttagtggtcaggtttttgcaactaaccttcaattttaaaattttagtggtaaaacctcttaaactcatgttctgttaacacttagtccttccaattttaaaatgtattgtctacgtggacaatatgtatacatggcattatattattggtccacgtaaataaattttttaaaaaataaaaattaattatttta

SEQ ID NO: 36915 - DNA, 9102 bp, Cannabis sativa
aaagaattattgtcaaaactcttttcattaagtttagaacattgacactatatataatactttggaacactttttaatagttattattacttatgtatatataaatactaaacaattttaactataaattttaattttacaaaatattaaatcattagatctaataacaaataataaaagagaaatttatgtttaatttagctatttaattaaataaatatctttttttgcactatataaaaaatatgtttatatataataaaaatattcaagacaaacttaacccttttttatctatctttacccaaaaactttttttaattatttttattttcaactaatgaaacaatctcagtccatataatgtaaaaatgaaagatttttcttagataaaaaaattaaacataaaaactcaaattttcctaatactacctattcatagctaatacgcataaaagtgcatcatatatatactaaaattgtttgttgttacttgttaaacaatgtatatacaatatatatatatatttatataatcaggcattttggtactatccatctcatttgacatctaggaaattgttttagctcaattattttctttatcgtgtatattataattatttatgatcacttgtaatatttataattacttattaattggcaaaaaatttaaataatttatagtgccgaaaataagattcaaatattttgttgcacgtataactcagtggtagacccaagatttaagttgagggagagcgtacttctttttgtaagtgagggtgggggtgtactattttttctacatgatataacatattaaaaattgatgcaaacttgtatttttatagtattaaatatgatttaataagaaaaaaaaaaagtaacaatagaaagattaacttcaatgattgaagtactaaatacaaattttattaataaaggttcaaaaaaaaaattaacatactaaaaagaaaatatgcttttgttaggatttaaaccatgacctccactataatgtcaaataacttaaccactatgccaaagcttatatcatgtttacaattatcacttttaattaattagaaatatgtattttaactaactaatatatatatatatatatatttttgaatttttttaggagaacgactgtctcaccttgtctcaatgtgagtccgcccctggtgtgattaattttttttatacatgttgtatcagggacggaggtatagaaagttgttgtaagggggccaaagtgcaaaaatataatttgagagggtggccaataaataaatttttaatgaaaataaaaaaaattaaattataactaaaataattgaaaaaaaaatattggggggtcaacacctttatggagcatgtagcttcgttcctttggcctgtgactgtatgaatttttttagtaaaaatttataaataattataacgtgtataattataaaaaaacaaaattaaaaaacttgggtagatgttaaaacacatagtgtatatattgaaacacccttcttgaggagtgtactagacagttttccaataaataactcttatgatcaaaaaaagaggaggctagctaggaagtttccattttgagagagaaaagaaatccttaaaattgaacatcaaaagaagatttattatggcaaaaatacaatcatcatcatgatgcaaatttaatggagtcttctccaaccaatggggtccaattttatcctcaagtcatcttatttatcattaatccaagttgtgtagccgcttctctcggattatcaattattaaaaaaaaaatcaagagagagaaaccctagctagcactacttattaattagtagtaatggtcattatgagattatatatatgtaatatgatcgatcatcaatgtcatctctatgatcaaacagcaaaaataatctcttttttttattatttctaatgaattattaataaagttgcagtagtgtttcgtatatgtatatttactatttctatataaaataagattttgccattttaatatgtaaagttgccgaaaataaaccttcagccattgagcatttagtacatatatggccgtttcatctgatgcagttgcttcgataaagtgcttgtttttcgaagagtaaatgcctgtcaaatcacaagtacagagagagaacattttttttaagcccacacgttatctgtggcctgggtgcagtgaaaaaccaaatacttgcaatttttgtttatttccaaattattaaaataacccatttttcaaattcactcactgctttaatttgttaattccgtataattaattagctagtcacaaataaataaataaataaataaatacattgacctgaacttggctaactccccttgaaaaccctagcctctgccatgctagctatatatatgtgtgtgtgttaaattactacattaaaacgtgttgacctcttaagtgcatggcaacctttcgattaatattattaaaaacaaaaacaattgcttaaatgtctatttctaaatgttttaagtcaatcataaaatgattactgggagaatttttagtggaatacgaggcattttgacaagaaaattttatacgtacatctacagccccgagaatttcgttaaactcgaaattatataaatatatatagattatttctagaaacttgggaaattaatttattgatcaaatgatgacacttatcattttcgaaagggctagcttgtatttcttagccgtaggatttgggtcgtatcacacgtgtcatgcacttaatcaccgatgataaaattaatatgtagttgcatgggtgagtttatcaaaagtttttttctttctgggtatgtattgtattggattattgctccgtggacttcgagttgggggtgaaaatagtcttaataacagggaccggtcaaaatataaataaataaaaataaagttgtagcgggttttccggtgaaaggacgaataagcaaaagccgagccatgacacgtggacaaacaggaaccgcttgatagagattcaacgtctaatatttaatcataatcggtgagattcattgaaactggaagagaactgtagagaagtggccagtcatagattttcttgttcatctcagtcatactcatacacacacactttctttctctctctctccctctttctctttcaaaaacccagttgcacatgaaagcgagatagagagagaaagaaagaaatagacagagagagagagagagagagagagagagtgaacaagggcttggttgtcttaaatgagggtcgcgtagcagagaaagagagagagagagtgaaagggtgcagttgccatggcggcgttgcagagctctaattccgtgccattattgattccaacaacgaaagagtagaattgaacacacaaagacccaatttgctaaacaaacagtactgctctttcatctctcattttcttattttattaattaaagaactttttttttctttcgtgtgttattgttttctttcttccttccttttctctttctcttcttctgaaatttggtgtcaaaaagctgcaaaagctccaacaacaagatcgataggagagtcagactactacgtctcgacccagaatcagaatccccaaaatcaggtcaaaaccagaacattatatacacaccgttagtgctattcacttattactttctatacttacttactactactactactgtgtaacactattacactatatatcacacacacactacatacttaactcgcgaaaacccggagatcttgatcacttttatttaattttgtcctttatttcatttaattttattttatgtacttcattttaatatatatattaaaaaataaaaaggacagtaagagagtagcactacttctactactactactactaaacagcttgaggtaattgtactgatatggattttgaccctaaattgaggttagtattgggttttgggtgcaagaaattatggctgggttcttttgcctaggcggaccaagagatcatcatcatcatcctcatcaacaatcatcaaccccaagcagcaaacaagaggatcaacaagatcaagtggaaagagaacgaaaccttttcctttacagatcagcaactgattcagagatctgcaccaacaacaataagcagcagggtggtggtagttttgagatatggccacaccatcatcagcatcaacagcctcagaatttcaacaactacgttctctcctttggctcaagtcctagccgagctaacaacaacaacagcagtagtagtactagaaacctaaacgacgtcgtttctggggatgacccaactagattggggttcacagttatgaggccaggaggaatagtaggtggtggaagtggttcggctggaggtatgaattgtcaagactgtgggaaccaagctaagaaagattgtatccatttgaggtgccgtacttgttgcaagagccgagggtttcattgtcaaacccacgttaagagcacctgggttccggctgctaaacgccgagagcgacagcaacaactcacggctttacaacttcaacaacaagaccaacagtttcgagttcttgacaactcaaaaaggcacagggacaatcaaggagcctctgctgctctaattccttgcactaatactactactactactactcgtttaccttccactacgtcaggtaattaattattgttaaacttgttgtttacaatacaaacaaataagtaataaataataataataattaatattattgattttattcagcttctactactactactactactacttcttcttcttcttcttctgaatttctggactttttctaaacaaaaagaaaaaaagagaaaaataagaaaatatatatcgtttgcatgtgagaaagtccacctccatagtttcccacttgactttgctttttatcatataattttagtttttttattctttttttttctacaactgtttgtcggtaaaactgacgaaaaagtactagtatgaaaattggtttatatatgtgtgtatgcatagatctaatgatgatgagagcttactacatgtacatataaatatagagttaagtgtaataatagcacgaaaaattggttaattaatatttttcttttctttcttaatgattttttttttggattaattagggttggaacttggaggagcatttcctgccgaggtgaactcttcagctgttttcagatgcgtgaaagtcagtggaatggacgatgtagatgagaactacgcgtatcagacggctgtgaacattggagggcatgttttcaaagggattctgtatgaccatggtcccgaagctcattacaccggaggaggagatggctcatctggccggggaggcggaaacggagaagacaatactactcatcctcatcatcaacaccttcatcttataacagcaggaacagcctctgtctccgccgccagtacagccggcggtaacccatctatttcgttacttgacccttcaatgtacccaactccactcaacgcttttatggccggtacgcaattcttcccacccccgaggtcttaaaacaaaaaacaaaaacaaagagaaaagaaaaaaaaaaaaaacaagaacaaaaaaaggtctctcagtttcatcatttatcccctagctagccttaaggggaaaaaaaacacttgatttgtcggctactgatgatctctcactattattattattattatttagtattcttattctggtttctttaagttttcttaaacatgcactgaagtagaagaaggcctatataggatgtgtactagagaatagctaggttgttgatgaggagaagaatatatctattgtctggatatttggcctaattgttttaaaatttcaattcagattttcattatggttataatatatatcttctatcgatgaccccattctcagttttagataaatctttctattttattaattaaatgtgatgatgatgatgatgatggtgaggaggacacacgaaattttttagttttgtttcttattgtttgttttatctatgttatctgatttgttagattatataaatatataattattttcttatctgggtccatattaaatacactttctggttggtgctgaactcgaagctgctttttcctgtttatccgattacttgccggatgaaattatggaatgagtaggtttcgtttcgtgtttggttaagcaaagaatttataatgaattttatttatatatatacctcagaaaaatgttcttcaataataaataataataataataatatatttagtaggtgtgtctcgtttctgtgtgaagatatgaaactcgatcaactcttggttttgttaagataaaacatttactgtacaccacaaatccattacaaaatattggcaaagtagtagtagatcgccaatgggcattgtctgaacatctcagtctaaaaagtgaaataaaagtttgaaagaaccttctcagtataccactctttcttttttctgaataaacctatttagttacgtaaatgcataatcataaatagcattcatgccaactacttatctgcattctgcaacacacaataaaatttagtattcgaatggacatgcatggatgtgaccctaaagagtgtttagccataagatgatccctatgcactttgaaatattcatatcatcatgtgctatactctcctctattaatatttgtcaaaacaaaaatatatacagattaattattatatataaatatattattatatctgtttatacacatataggatgatgaggaccggcctagtgtacctaaactaatactgatcccttatagcataataagatcgatataatggtttccattatagattaccggatttggtacatatatgaaataatacgataaggggccataagaacctaggttactttgtttcgtaacatttgatcccaagggtatcaacatgtgcaatctttctgtatttgtggttctcttggtgatattcatttattgattttttttcttttcttttctttttgttaatttgtttgttttgggcactggcatgtaaaaacttggatagaatatttaagatgcaattttttgcatgataagtgggttcacaagatttcattccttccccttaaggaaatttatatatataaataaaatgattcttgttttattttaagttattggcatgttaaggaagaatgagtacaatttgcctgctgaatgtattaattatataaccttaagtaactattttacatcagtgtaattaatttaaaatgataattaagtttatattgaagaaaatattagtcataattattccataatagtgaccttaatttatcatgattttaattacgtgtgtgtgaatatatatttctatatgtgcacgcaaaacattagttatttgaattagcaataatttggttatacttatttaaagaacatcatcccaaatattaaagaaaattatatcaaatccctcttataaactatatataaaataatgtccctaaatttaatttcttgttgtccttgtaggagaattttgttgtttgattggcttatatatattgttttctcttcatcgttccttccatacattgttcataatcttcattgatttgggtgtgctttcacattgatatctctagttcatattatgacatataatttcaattatatatacaggatgtgtttgctaaatttgcagctttatgtgtcatgtactatattgaataatattttgagtagttttgagaaactaaaagtaataacttatagcttatatatgcttctacatatagcttaatatgttagaattagaacatttcaaatataattatatgaattttatccctgcacttctttttacaatttgttgatttttttaaaataaaattgatatcaagttgttaattttacatattttaaagatttgacgtgataagatttattgtcagaatataattgctaaatgacattatagtagttaaatttattttgtatttaactatatatttaaaaatttaataaatcaccgtcacattatttggtatccaaaataatggtccacattagttggtatctaaaaagttggtccaccaaacaaaaaaataaatataatttaacttggaagtagtgacaatggatctaccacatatcaatgatcattttgatttttatttattggttaaataaagttttatgttaaaattttaattaattgttcctttaaatttttgaagcatgcatctctataaaatgtgaaatacttattttcaaattgtagactttagttgaatgtgatatacttcttttttcaaattgtagactttagttgaatgttgtagttaacatagtgtggatttgaagtttgtatgttacggttgagtttttatatttattttgtgggatcataaaagaatgtgctcaaactcaaacatgcaaaaatgaagaatatagtatattaaagcagagatatataaaatatttgtaaattttggataatatggaactgctagctatattcttagtcatgccgatagtgtggtatatatatatatatatatatatatgtatatgccattatagcaaatagtatttactgatttagtactgatagaaatattgctataagcaaaagaaaactactttctcgttcggtatagagagcacttttttccgttgagaattctttctcaaactatgcctgtttcaatataatataggatccacaatttcttaaatactgtattttcttcaatcatgtgtgtattgtgcatagtttctgatgccctaactagcaataaattataggtgccaggtgatgatttctacaattatttataatatctttgttatcaattttagtttacaaaaaataatgtatataatttatgtactaaaattttaacgaaaatgtggtaattttttaataaaagataaatgaaaaatagttcctcttaagttaattaaaatgtttcatttatacgtaatcaatcctaatatatatatatatatat

SEQ ID NO: 36916 - DNA, 6715 bp, Cannabis sativa
ccaattagtaattggatcggatgatgatttttcaaattcaattactgaatagattgaatcggatgagtaaaaaaatattgaattggatcgaatattcacctctaattataattataatgcacaccgtttttttaatatatatacatatgaggatgtaatatctctaggtacaaaggaaaaaaaaatgccctcaggatataggtaaaaatgatgtccattctccctatatttgtatttcaaattaatttggatttcaaaatttcaaaaaaagaaaaaattaaagtctgtgttgtacattatgtatgcatttgataattaaataataatttaagaaagtcttggttttttttttttttttggtcaagaagaaagtctttgttagaatgctgtaagcaaagttattacattagaatagaaacaaatgaaatttgataataagcaataaataccatagtaagagatttgtttacccaaaacgcactaaatacaggaaaaacttaaattatttaaaatataagttgagtaactaattgaactttgagtttcttatagattataatttctatatataattgtttctttagttcattataacatcgttttcacaaatattgatttattttctgaaaattaatgtaatgtaggcttatcttttcaaaatatatatataaaaaaaaaaactagaaagcgtccaaattgcttaagtgatcactaacagtcattagattctccttttccataaaacactaccacaagagttggataagagaaagtatgcacggacatactcacacacaaaataaatagatttggaaataataatataaaaaatatgaggtcaaccattagaactaatactttgacaagtttaattatatgtacaaacgtgtggtgaaatttgctgtataaaccctaataatacctaatctttctctacatatgacaacaaataaaccatattaataagaaaatacatatataacaagcactattctctcccccaccaacacttttccttctttcttttccctctgcctaattcaaacaaacgcatttaaaatggtgcctatcaatttctaccaaccaaactcaacccaacccaaccaaccatataacatcttccacttcttctactattaccgaattccacccttttggaactttttcactttactatgtacacaaagcccaaacctcaagcaaagaatatatataaatatatattaatatctatatcataataatatgccataaaagtgggacaaatcttctatgtatgtgtaaatgtgtctagcagtaactcctttgttgcttaagaatatgatctgatcaatcccaaattgtatagattcctcctcactaagctcccaagtgataacaacactgccccaccaaccccaactgcctcatcttcacttttccccttgttggtttgatacaccaacggcaattccttcactttcaagttactcatccctatttttccccggactgattcgatggttttcgaatccgccgagtttccaactgcgtctgtaacatagaaaaaattacgagctgtttcaccagaggtagatatctcagcccttgtaacatttaggccattctccctgaatgtccttgtcacatccgctaatagactctgcctatcctctgtgcatagttctagcctcacaccctgaaataagcatatatatagcaaatgattaagaatgaatgcctaatctaaaattttacaaaaatatcaaatactttgtgtcaatggattcttttcaactgaattgatttcttaaaattgaaatatacctctgacgctcttctttgaatggctgcttgtaaacattgtatcactcgttgtctttctggctctgagtttattggggacccatctttatgtcttatgtaaaattcctaataacaaaattgaaaagaacctaattaagttgaatgtttaaacacaatagctacattttttttcaaaaaaagaaaaaaaaacacaataactacatcaacagaaagctaaaatgagaaactattattactcaccaagcagcctctgtctctggatgtgttgatagtagcatggaaaaccacataatccatatctgttaatgtacaaactacatcaaacaaaagcttgaatctatctttgcactggatgttaacaatcgagtaatccctttctgtccagttttgtactgtcaccacagggcaatcctctggaaaatgcaagatgggctttctttcgtaatcgcggtctgcaaacatcatctgatgaagtcttctctccatgtgtgtgacaggcatggaaactaaggttttagcgcttagaatatcgttgtctcctttaagaacattccttaacaaggcttctatcctttctattctctgtgagtcctcaatttggcagcccgaatcagtgtcttttacgtagataagggaagcaattctaccgttgtgtgtccacaccttggcatccaccacgttgcattgaagatctgctagaacagcaaaaacctcagagagcaatcctactctgtctgttccagttagctctaaggccgttaatccattgatttcgttggatttttggtagtgaatggtagcaagagactgaaacatgttcaaacagtttcaacatcattagtttctaggctacccaaatttgccataaaaaatatatcagcttattttgttaaaataattaccttttcaatgtaactaatgacattttcatctgttaatttatctccattttgatcagtcacatggaaaactgcaacaaatcaagcaaaacccaggtcaaaaccaattcatgaaaacacaaatcttcattctaaaaaatagatcttttttggtcctttttgggtttctctaccaaaaaggaaagcaaaaagaaatagtaaatacttttcttttactcaccatccatgaaccatcttccatctgaagaaatgtaagcttttttaatggaaaggttcagatccgtaagaacctgaacagcttcgagtaaaattccatgtcttctagcactatcaacctgtagaacaagtcaagaagaaaacaaagaggattagtcaatttttttcttcaaaattgaaattataagcaacttctggtgcacgttaatggggttttggtggaagaagctaaccttgactagagtcgcagtggagcaaacggcattgtcgatcacgaccctgtaagaaaaacaagcatagaagcataaaggtcaagtcagaaacagagaaatcgcttgaaaagtcttaatcccaataagcatgtgtgaacataagaaaagaataagaaaacaagggcaagagaaaagtcagaaaatactaattaatactcgcataagaagactaataaggcgaaaaagtgttgaattcaatttctgggtattaaaaaattttcaaacatagaagttgaattaaacaaaaagcccaaaaataaatcaagggattttgatttaaagatctgaacaagaggaatacataccaaaattcaagaaaaactttgtccctacgatagataagacttttcttttaaaacaaatgataatagaagagaaaaagactgaaaatttttgggggtatggaactcaaaactaaaacaagaaaaacttcagttgaaacccagaaaaatttggaggatgagaaactgacctgggagtgttcatgcggaaaacgagcttttcatactcatccaaaaaagtaggccactccatagctattattgtttgatgcttcaataatcttcctttataaaactcttgggaggtaaacgaagctaaaaacaaggccaactggaacaagactggtttttaaagctttttaaaaacaaaagtgagtaggccaatcgaagaagattcttccttatatattttagctgtattaaaaacagagcccaatgccttatattcttcaaattcccttagctccaattcagatcctcatcgacggattcgccattaacaatcttcaccaaacacatcaacctctctctttctccacgatgagtttactgtcactttctctatcttctttctctctcttactcaatttctaagcgcaaagcatgccttggtcttaactcttctttcttacttctctttatatatgttgcataaatatatatattcttaagaaaagaaatattaaataatttaattacttgaatcatttattatttaattattattttgaaaacaaagccttcacatgcgcgactaatgcttgccctgcccgcacaaccctgccccttgctgcccccaccctgaccaactctctctgccggtcgaccaataaaaaacagccgcgtcatcctggttccacttgtagtccacctcggatgccacgtggactccgtattttgcttgtgttccactcaatttctaatccaggggaaattctttgatgaattaggaagggttgtccacgtggctttctgtcaacacgtcccactcccttctcaggatgacttaaattttaagttggcttttcgccgacccttaattatgacgtcagcaagggacaaaccaccggctcatctccgccttttctcgtgtctttgtttcggccggtttatttcttaattttccaaaactacccttggctagtacgagcaatctaatggcaaattagtaaaatcacaatggtacggataccgttaatatgagaaaagtttgattcgaatcttgcttacgctagataccatcgtgttaacgtaaggaaaagactttttggagaaaaaaaaataacttaatgacgtggctttaagtgattagctggagtgggcaatgcattaaacgcatcgctttaaacgttaggcgtggaggcacgttttcggactcattatgtctctgatttaccgttaactaacgacgttaaatcattttgaatttatgataaatgaacacgtgtcaaacgcagaagcatttgtcgatgaaaggcaggccacgtggtcccacagggaaaactgtgtctgacaaccacgtgaaagcttccagactaaacacgttcgctggtttgccgctgtctttctgataccaactttctctttctctctcctaaacgatccgttaaaacttaaattccccttcgtcgagccacgtgtagcaaggagatcaagccacgtatctaagttggaaaggcggcatccgttaaaaacgacaggtgtggcggttgattgcctcgtttatggtttggcgggaaaggtcagctgcttcccgccagatcggatgagatgtgggagccaatttttaggtatatccagtatccacgtattatattttaaaaagaaaaaaaaataaatttgataattaattaaagacaaaaaaaaaaatggagaggtaaatactaaatagagagtgtctttacgtacaatggaagagccaagtacggagtgagagtggggaaccaaaagaaacgtgacacgtggatgacagctcagacgtcggttactgggtccctaccagctttttaattatataaaaattaaaattggccatgctcttgggaaacgccgcgctttttatctcgggtttctctctctcgctttttgaccgttaaaagtggtttatttggcgggaaattcgaaaagcgtgtgaaggcgggagtacatgctgagtcagcaggcgagttgcgttggttgtgggtttgatcctctacaacggcgccgcatatttctccgtcagacactctatgcatgtcttcgtaaacatgttcctttgtgctattattttattttatttttttattatatattaagttaaccaaaaaaaatctcaatacgaattttcgtccaaatcttaatctgattttggttatgttttaattttattttgggaacacgattttgcacttttggttttttaaataacagttttcatgatgattgtgggtcctttgtagaaaatagattagaatttagtcaaagtaatacccatgtgagaggttagaagaaaaaagtcaaaattttggaacacaaacattaccgtggactgtaatagtagttaatttgtcctttacttctaagtaatattatttctttagaagctagatgtcatttttaattaaatttaaatatggttattgggtattgcattggaattcatttaaatacatgtaaattaataatagtgtgtgaatggcatagtaagattttgggttttcgtgaatgttattgagtaacacaaggagcatgtgctttttgtgaaatgacatataaccctttaatttcacaatactatattgttttgaatttaaagcacaggtaggatgtgatttgaaattaataatagggtacatttcacatggattttcttttatagcaacatatgatatgatgtgatgtgataaatacaattcatcttccctttactgttccttattattatttttattaatgttttttttttgctaataataaacagtaaatagagaaacttcttagattaatatttgtatcacattgagaatgaaactccacatttgacactttttatttttatttctttttaagggtatttgacacctttaaaaattaaaccacattacatttatattatggaatattcagataaataacttttttcttttaaaaataaaaataatatatatctataattattattgttgacgctaaaaaaatagtcaactctgtatcgtctgataagggatagcagcaaatgaaaaaaaaataataataacttaag

SEQ ID NO: 36917 - DNA, 7783 bp, Cannabis sativa
ataaaaatattttataatcttaatttttgagtaccaaagacacaaactctaatatacataggaatatatattatcgtggaattgctggggtattcgtagaaccccggcgactcaagctctccaagcttgggttaggatacacaagccgaaatgcgtgttcttaatggagacaaaggtgaatgaagaagagggcaaatcaatagagaagcttattggttttttgcactcgatgtcaatccctgttgttggaactgctggcggcttcatgctgttatggaaccaagacattaaacttaaggttagtgactcctcaaatggaatattttcggccataatctttgatcctttaaatggccttaagtggatgttatacactgtatacggtaggccttacgaggccaaaaaaaaagtgtaaaaaagtgttttgggacaacctcacggataaaatcaacctatgtcatctgtcgtggctcttggttggtgatctcaacctcatcgctcacacatgggagaagagggggggaagaaatgttcgctattaagacactctcacccttcaaaatttcatgttgaattcgggcatcgtcgatcttggcttcaagggctgccaattcacttggcaaaacaatcgattcaacggggatatcaccagggagagattagacagagcttcagcttcaagagactggttaacttcttatccaaatacttcgatcaccaactccccccatcatggtttctgaccatggttacatcttggtagataccagtgacagaactagtttgggctataaaccttttcgatcttcgaagcttggaccagagaaccgtcttgtttgacaaccattgagaaagcttggggcacttgtgaccctcttgggaagaaactctctgcaaaactcattgatacccgacgagctctgcagaaatggagaaaagatgttttcggcgactgtgaaaaatagatcaaggaagcggaatcccgcttggcctggatccgaaatcagccaatctccttggccttatctgctgaagaagaaacaattcagcgcctcattagggagctgtggctccctaaggaaagtatatggcggcagaagtcaagagaaatgtggctcaaacttggtgatcataactctaaatttttccacgcatcgacaattataaggagacgaagaaacaaaattgtgaccatcaaagataacaacgataattgggttcgtaatgaaaagaggattggccaaatttttaatgaattcttcagcaatttattcgagtcctgcaactcgatcattggggaggaatttgatctccttttcaaccctatgatctctcgagaggataatgatatgatcaagaaagtccccctgcttgatgagatcacttctacgattgcatccatgcaccccttaaaggccccaggccctgatggtatgccggggtgcttctacaggaagtactggaacgtggttggtagtgtggtttcttccatgcttcaatctttcttctcgaatggttgcttagacagccaaatcaattacacttacatttgtttgatccctaaagaagagaacgcatgcatggtggataagtttaggccaattagtctttgcaacttcgcctacaagatcatttcaaaaataatcgccactaggcttagatgtgtcattgacaagttgatctctcccctccaatccgctttcgtccctggaagatggattgcggaatcatcaatcttaactcaagagttggttcacacgattaacacaaagaaaggcaaaggtggactaatggctattaaacttgatatgtataaggcgtttgatagaatggaatggagcttccttgagaaagttctacggtgcaatggtttcgacagtcaagttagcgggttaattatgaaatgtgtctccacggtctcttactcggttctcctaaatggggtccctcaaaagaagctctttccaaagcgtggcctacgccaaggggaccccctttcccccttcctcttccttttatgccatgaggttttgtccaagctcctcctccggcaacaaggtttgaagaatctccaaggtatcacaatctcaagatccgctccggccattagtcatctcatgtttgccgatgacacaatcctttttgcccgtgcaaacaagcagaatgtggatacaattttgaagtgcatcaatacctatgaagcttggtcaggccagaaatgcagcctctccaaatctagtgtgctattctcgaaaaacaccttaccttctgttaaacagaatattagtagaatgctgaaggtaaaaaagtgtctgggaaatgaaaaacacctcgggatcccctttgtcttcaaaagaaaaaatagagaagaattcaagtttctgagagataagatccttcaaagaatcgaaggttagaaatccaggttgctttctctagcgagccgcaccactttggttaaatctgttgcctcttctatccccatctacaccatgtccacttgcagaatcccccttgggacttgcagagagttagatagcctaatcagaaagttctggtggacagggggaaatgacaagcaacggtatatggctttgactagttgggataaactttgccaccctctagttaatggtgggttgggtttcaggagactagaagacatcaacaaggctcttttggcaaaattggcttggaaattcgcttcggggcgtgacacaccctggatcaagtgtttcaacgctaaatactgccggcgaaattccttctgggacactgagtccaaagggaatgactctagcgtctggaaagggatcctcctttctagaagcatcttgcgtttaggtagcttaactctcgttggtagaggcgtctcaatcgacatatggaagcaaccttggatcccttggttggattatgatgagttcttgactctcatgagaaattttcgatctcgatttcctttgttaaagatagtgggcgacttatccaattcggatggggggtggaatcgttctcttgtctccaaagtgtttggttccgatatgggcaacaaaatttgcaacatcacaagactacctacgaatgggcctgatactcttgtctggaaacccactaaagacgacagcttctctgtgaaagaagcttacagagcactcaatccgaaccaaggtaatgactacaacccgaaattttggaatttaatttggaacaaagacatccacactcgccattctatcatgatctggagggctctaacagggtgtctcccaaccaaagacaaattgccttttgttattgataaaatgtgccctttgtgtgattcggctcttgaagagtctactcatttattttgggactgtccttttactagtgccttgtggtttggaggccctttccctatgaaccttgccaacttcatagactcttctctggctgatagagtggctgcggctgctcttgttatccccgcagagctcttggtccaattctttatctttctgggatgccttttggagagcgtttggaaatcaagaaatgaagctattttcaaaggtcaagttatcaaattgagattactagaaaaattttgctctctagatttgaggaatcaatccttatgagtaatctagatgagtatcatgcccacgtaactcactcggctcctcatagaaactcctcagcatgcctaaatacttctctcatctgtatggtggacgcctcctggaaagaagggactgcaggcttagcggttgttcttcttgatcggttgaatgactcttggaagtggtatgccaaaagtataaaatctgcctcagctgtggaagcagaattacaggccatctcgtgggccatgaagcttggtaaggagatggggcaagactcagtgactatactgcctgatgctcagctgctagtgaacgccttagatcacagacgctgccctccgctatgggatattcgtgctttggctctctcggttctcaatgattgtaatagttttagtttttgtcatttctgctatatccctagattaaacaatgctactggtgactttattgccaagaaggctagaacatatattagatgttcaaatggccattgtattagggaggggtcccctgttgtgattcccaattttctctttcaatgaactctcttgtgttcttccaaaaaaaaaaaaaattaaaaaatgttgtgactaattaaaaatcactattcctatattgtgactaaatgtattagtcacaaaaatcacaattttttgtgactaaatatgtttttaattataatacttgttatgactaaaactaaatttgtgacaacttgtatctaaatactatgatttagtcacaagtaatttttttttgtaagtaaaaaaattacatttagtcacaaaaaatttatcttgtaactaaaaagttgttactaaatgtaaatttttttttatagtgtatagatttttattgtcacagatatttattgttaccttttcatgagaaaattctctcaagactcatgtttgacattcgcattatgaaaagttaacagtctttttcagaaattgagtttgaatcatgtaaatttttattgattcaattattttttagatttatcctatttctttttaatgtttctttgattatgttcttgagacttgagagtgttacattgaacactataggcccctttaagcagggtaaatcaattcttgtcctattttggaagcaccacctatttttataacactattctagaaccaacatttctaatttcaaatgtctaagaatttgtttgccccaatttgttaaggttgagactcacatgcaataacaattataaccacactgaaatccaatatcatatatgtggaaaatggtcattactaaaatccaaatggcaataagaaacctgatcaacaactaattggaaatttgctttagttgtctctagatgtctcaaacatgtttctttcatactcactatttagccaaagaggcttatcttcaagaagaattttcagttttattattttacttaatggtggttagctcttgcctcaagccattcatatttattagaagtggtaggacattatgttatctttatatagatagagttagaccatttacatgtgaaatattattcttgatactaagatagacacacaaaaccatgtgaactctctcaactcaagctagtgtgtccctctttttcaacaaatcacaatgattatctcaaataacctttcaattataactatatatatatatcaaaacaatcaaagctgagaagagaagctaaagaaggggtttggtgttcctatttcctactgttggaacagtcttcattccaaaattttaccaaaactactctgtttgaaattgaaaagtgtgtcattactaattataatgttgtttggttgctaagtctcaatgagaaaagactatttatgaagcttgattttcagacatccttaattcaaggtgaacaactgtccaacacactcaagaaaagaggtcagactgtaatttattctcatcatgttggagtcaaactggatacttatggaagcagtttctttctctgaatatatttatataatcacagttttatatgccacacaaaattatgagctaataaggttagatgagaatactacctagttcatgtaattcatgtcaagtcaaccacagtgttgattttcgagtacttgaaatctgatttatattctaattagtatgtcaaaaaaatactttactaatatcatgatgattaatttccttaaattttgattaagaattttattattatattattttatacatctgggttttccctttctaataaatagcttcaataatatttatatgaaaattattttaagaaaatgttaaaatatttatttcatatgtttataatctgctcaattctaaacttatagtacccccaaagaaaaagctcaagaattttcatagtcctaataattaatacttattgaataaatagtgtatatttattcattataaaaaaataaaaataaaaaaaaaaaagtgtttttttaagagaaattttttgcagacaattgactcactgtttgagacgacatgaaatcgtgtattgatttttaatgcctaatctgcttttcattttctgattctaacttctcccaatcagaacatatatatatatatataattacaacttcttggtgtaaaaggaggatgaagctaatacaatcaaacctggttcgtcgtctttatagtttaatacattctcaatcataccgtacgattcgtttcgacggagctaagccgcggccccaaccagaaagacgtcggccatcttcgtctaagattcgcaatcccacgccttttgtgtccgatgttaaacaagtaaacgacccagatgaagctttgtctctgttccatgagtacacccaaatgggtttcaaacacgagtactcttcctactctgctctaatttataagctggctcgttttgggaacttcgaaattgttgagaccattctcaatcaagttcgagaaaggaacgttcgatgcgaagagaaacttttcattgctttgattcagcattatgctaaggccaatttgatggagaaagcaattgagatttttgacaagattccatctttcaattgtgaacggacgcgtcagtccttcaatgctctccttaatgttcttgtcgatggtggtcggttttctgatgcaagagcggtttttgatcgttcctctaagatgggttttcgtccaaattcgatttctttcaatataatgatcaagggttggcttgaggaaggtgaatgggaagaagcgtgtaaggtgttcgatgaaatgcttgagagaaaagttgagcctagtgttgtgacttataatagtttgattggctatttgagtaaaaaaggtgagttggatagatctttgggcttgcttgaggagatgatcaagaaaggaaaacatcctaatgttgtgacatatgcaatgataatggaaggtttgtgtttgttgggaaagtattcggaagcaaagaagatgatgtttgatatggattatcgagggtgtaaaccaaagcttgtgaactttggtattttgatgactgatcttggaaaaagaggtaagattgaggaggcaagagcattagttagtgagatgaagaaaaggaagtttaaacctgatgttgtgagctataatatattgataaattatctgtgcaaggaaggtaaggcaatggaggcttataaaattttgatggaagtgcaagttgaaggttgtgaaccaaatgcagctacatacaggatgatggttgatgggttttgcagggtgggcgatttcgaaggtggtttgaaggttttgaatgcaatgctgagaactagacactgtcctcgtttggaatcgtttagatgtttagtgataggtttagtgaagtgtggtaagcttgaagatgcttgttttgttcttcgggagatgagaaagaaagatatggaattcgattgtgaaggatgggaagctgtggttgtagaattgtgtggtggtgatgtggtttcatgtagcatggtaactgaactaatttctgcagcctaggagtgagacatgaatagaattttagtttcactaaaattactaactatgtttgcaagaaaaactcatattgctatcctttggcctagatgagtgttacaaagatggatggaacttttgattagtgatgtgaaagggaaaagtgataacaaaattgcagtcctttggagatgaaataagtgttt

SEQ ID NO: 36918 - DNA, 3792 bp, Cannabis sativa
  modified_base (964)..(973): a, c, t, g, unknown or other
ggttgtaattagcactcctctaaaataattggaaccctggaactttcttcttgtttgtcacacatttaaaaagaaaaaaaaaacacacacacataagcaaatggttgagttattgcaacacataaatatcgtctatgaccatgaccaggatatgttggtttttctgaaaactatgcaagttttcctaatgggcatcactgaaaaccaaaggatttgtttgagatttgctcaagatatggtccattaaagaaaagaaaaaaaaattgtagggtttcccattttcatactagcctcaaagtttggagaaatatcaaataacattaaatggaaaaataaaaataaagtatttgtgataatttaataaaaataagttgataggttgagtgtagtgtagtactattttgttgtccttgggctggtcaaaataaggagcatagaactagagcatagatgttcccgcacaatagagtgacagataagatggtcaagctatcagaaaaggagggataggactctataccatagatcttccactacaataatgcactgttttgtatgaataacaaaccaaaaccaaatggtctagttttagttttagtttttgtagaggattagattaatagctaaacaaatgataaagtttgaaaatgagctagattttggggttctatatcttgaccaaacaaaccccattaaagatcttaagctcttctcccaatgtgtaatgaaggacaatgtaataagataaagaaaaaggcttgaggttgagagctggcactgtcagttggtagctcaaactagaataattataagttacaaaaggaaaaatacatataataaaagaagataaaataaaaattatcccattaattaataattaattgaagtaaataatttaaggtagtgagagaaggaagggaaggaaaagctttgggctttggaagtgagagagagagagagagannnnnnnnnngagagagagagagagagaggtctttttaatattttacagtagcagtggcggtggttaatcatcaagagctctctttttgatgtaagcgtgggtataaatgcaggacctttgctaatgctcttttctctttcactctctttgaaacacccacctatacatagtttcattatctctttctctttctctctattaaactctgctactgtcctctatttctgtgtctacatgagtaaaaatctcccttcttttggctgtgacagtgttttgtgaagctgaaaaaaaaataagagaaagattaaaggaaacgggtgtgtttgaacacaccaacccaaattcaataaaagttcttttctgtgagtaaaaagcttgaatggaagggagactaccaaaagtagcacagaatctgaaatgggtatctttctcttgctacttttagttgggtctcaatctctttctctctcctctgtgtctcagagctggggttttctgatgctttctgactagggttttgaataggtatttattatgctgaaatcaatgttctttgcttttaattttgactgcttcccatagactcttctttttttcttttcttccggctcttctttgaactatctttttttagtttgtgtcttgggagaacatcctttgtgtaacttggtacttcaagttcagtgttttttggctttggaaatgggagcttataggttcttgtgatcgttggtaacagttgcttttgggtacaatgggctttcttgtttcagagctccttggagtactaagctcattaattgaaagtggttcttccgtttactagctccttgtgtgctgtttcttttgggctagttagtttcagttcaaattactttaggtgggttaagtttttgatggaatatctttgataccactatgaagtttcttctattttgagtttcaaagattcaggtttgaagcttgttggtgctatatttatgatgatttagtgtggttccttgtttctctatgactatacatctgtcttctctgccatttttaattctggattattactgtttgaggtagcagggtacaactgagagtggtcaattttggaggcttttattggattttgtgtagatagctgggctgagttattaaattcagttattagagtggaaactagtggctgagtttgttggtcttgtcaagaagtaatggatatgggagagaaagataaatttgagttggataataagaatgaagatcatatgagttattcatctggcatggcctcagactggcggtttgatggctctaatcttgcaaatacatctatgggtttggtccaggctgcaaattctatggcaattggcaagggtgatctagttggttcttcttcctgctcctctgctccaatggtggactcatttgtctcaccactttgggaccacaccaccaccaatcctcagaacttgggtttttgtgatatgaatattcagaacaatgcaagcaacttcaactcattaggcattaggaaaggtagtagtcctgcctcaatgagaaatggtgttgatagatcacatgatatgtgttggaatccatcgactccaatttcaaaaggaggtatattcttaccaaatatgcctggaatgatcccacagagcttgtctcagttgccaaccgattctgctttcattgagcgcgcagcaaggttctcgtgcttcaatggcggaaattttagtgatatggtgaacccttttgcaattcaagacactgtgaatctatatccaaggggtggaggaggaatggtgcaaggtggtcaagatgttttagccggaaatgggttgaagcaagtaatgtctggtgtgcattctcaaaagggtcagctcaatatgagtgaagtttcaaaagatacttctttaacagctgaactggggtgcaccgaagggagtccgcttacgaatgagagaaaaaacgatagccttgcgagatctcatgatgaagcaaaacaatgtgttggtgggtctggaaatgattctgatgaagctgaatttagcaatggtgctggaggtggagtagaggaaccctctattttggagggtaccagaggtggtgaaccttctgctaagggacttggctcaaagaaacggaaaagaaatggacaggtaaaacgaatggtttgaaaagtttccttttgatttgtagtatgaacttgcattttccttaccaatgttcctggttctgattgcgcaggattctgatcctgatcaagccaaaggagcttctcagcagcatggtgaatccacaatggatcataatactgaacaacatcagaagggagatcagaacccaagtacaaccaacaacaaggcaagtggaaaacacagcaaacaacaacagggttctcaaggttcagatcctccaaaggaagaatatatacatgttagagctcgaagaggccaagcaacaaatagccatagtcttgcagagagagtgagctttcaactctgaagtttgtttcttaccaaattcatgataactctaaaatatagctgtgtaataaagctaaagtggttattgtctgtaggtaagacgagaaaagatcagtgaaaggatgaagtttcttcaggaccttgtacctgggtgcagtaaggtgggttttatttcgtttagggagtcattggttgaactcttggcgaatttaggtggcattttttataaattgattggtctttgcaggtcactggaaaggcagtgatgttagatgaaatcattaactatgttcaatcactacaacggcaggttgaggtatgagattatgtataacatcacaatctaat

SEQ ID NO: 36919 - DNA, 5584 bp, Cannabis sativa
ttttttgtttttcagaaaaaaaaagtaccttatttgtttggcgacttcccttatgatttgtttctctctctctctctctcttcggattattctgatttgatactgattattaaatttcatatgttgggcgccaattcattttcttttcctattcctggaaaagaatgtgaagttgttggatttctgtcttttggggaagatgtttattctttgttgtactaaagtaatttgtttgaatttgttatgtatgttctaatattctctttttgcggttgtggtaggttgaatttctaacatacaatttttgtgttatgtagtttgtaatgggtaaaatattaattttttttttcttatgatttagaattctaaataaagatctgatggttattgggaaatgggtgggtaaatagtgaatgtaaagaacattttacttgctttgaaaagtgcataacttttgtctattcattttatttatcaagcagatagagcatgtcctaccagcaagcttacgactttaattacatggctgatgagggggaaatggtccattttcttgacgacatggatgaagaaaaccatgtacaagatgagaacctcgatgaatatgaagtggtttgttttgttttgttgaatgtatttcatttatctatttttagtcttgtgctcgattcgatactcacatgatgtggattgaatataaacagctcactaaagtgacagatacttcatctgcccaagcaagaaagggaaaagacattcaaggcattccttgggacagattaaacataacgagggaaaagtacagattgacacggcttgaacagtaccggaactatgagaatatccccttatctggggaggctgtagataaggtttgtatattaccctaaactccttcgcttattattaatgtttttaatctattttaatgctataaagctgtatccatttttcaggaatgcaagcaaatggagaagggtgggaactactttgattttttctataactcaaggatggttaagccaacaattcttcactttcaggtatgcaaatttcaacaaatggtttatgatttagttgtttgtttttctctagttacgtttgtggaggtgttgtcctgtattcaagttagctaagaattgtgtacaaacacaaacacaaacacaaagatacgaaattcagcttgaaaatactcacaaggaatgtccaatttgagatttatagcttaatttgtaacctactgcattttgtatgcagctcaggaatctggtttgggcttcttcaaaacatgatgtctatctcatctcgaattattcagtcatgcactggtcttcgctaactggaaatttgtcagagagtctcaattttgctggtcatgttgcacctactgaggtattacagctctgtctcagtgtgtgtatatcatcataagaaatgcttgccattttctttatttcattcattgttgacatgttagcatataataaataaattaaaaaaaaaaaaaaatccaatttcaacatgttttatgttttcttctaatttccttagttatttcaaaccaacatgattttatctaagttagatggtggggaataagcttcatcgccgagagggaaacaactcgtatattagtgtgctacatcatctgatcttaattttatttcttgccatgtagaagcatgcaggaaatttattggaagggttttcccagactcagattagcacactggctgtcaaggataattttctggttgctggtggcttccaaggggagctaatctgtaaggtttgttatatctctaagatattttctttcccaatgtatatgttaggtcacatacatgttatatgttctgtaatatggttcaattgcatgtttttgccaattttacaattaagtttctgaaattctaaacttcatctctaatacaactgtgtgaagtatccttcaagtttgagaaggataccaagagaactcaaaagacttgtgttgctctgtcacctttccattatgagcttaaattgaccaaagaaaaatgtagcttttgcagaattgttaatcttaaccatgtgccatcttgttcaatcatcacacagaagaattgaaggaaattcagtttgttgcactgcataagccaattgaatatgataaactgaacaaagtggtataacacttgtagatgtagatatctaatgtgaaaatgtatagctggagactcaagtgcagaaggatgttaaggtttttttttcgacaaaacctagtattttaggtagaatttggaaggaaaagtgaaaaggatgctacctttaaagagaatgaagatttaaatgcaaaaactgaggttggggttgggacctaaatgcaaaaggtgggtaggcaggcaggcataggcacataaaccatggttttatttcttataattcaagtcatttaaacaaatcccagcatcagcctaaattttacgtacttatctccagttatcttttactgatgcctgacatcaatgacttctgttgagtgattcagagggagcttagaataacagtacagtttaggttcatgcaaggagctggacaaagagtattggagggagagctgaaactattctgatatctgattatttatgcttattttaaccgatttcaaccataccatagaaattcgttgcatatttaggagaagtgtgtgtggtgtagggggccatagagctatgatgaaatagatcattgttgatgtgacttgaatctcacttacatcattaaatgtggtgattatggtgttagaggatgctgagcttagaagtaaatttgcttgatacaatggattccttttagaggaaatgtttcatacgaagtttttaaagggaaattgtttttaatggtcttattttccatttccaccttctatttaacaagagatcaaattatgttggttagcacatacacaaggaattcctttgacttgaaactaccataatcccacctaatgtttggtcttgggccaccaataagctgtgaggatgactctccaggtgttggtggtcatatgtggtagttgaagaggttgcggtgtggcgagtgattcttccgaagctttaaatgacctcctgggatagtactcctgacaatccgcactcactttttaggatatgggaccttggtggcgagcactttatacaaactgtgtatcttgctgtgttcaacaatatccaactttagcaaatgaatttctccagacaatgtttaaaagaagaaatcagtgaaatggttttccataggctttctgtttatggaggtatcttaacatgggtagtttgtgtggatgcacattttctacctttgcatgccattggcttcctaaaatatttacaatatgacatgaggtgctagcaaatgaatatttaagtggcagtttttggttggctttctgttgtcttcaaagaacttactttttttttttggctgaggataaatgtttcatcatttgtcttcaaaaatggcatgattaaatctgcatgctaagaactttactattttttcttggtattatcgtatgatttgcttttagaccctgtaaagaatggtgtcttataatttacctatttttgcagcgtctggacaaaaagggagttagtttttgtactcggaccacttacgatgaaaatgctataaccaatgctgttgaaatatatgagagcttaaggtatcattgccatttttgaactgttgacctggtgtttaatcatgttacaagtatattgtttgaatggttcttgatggttgatggtttcatttacaaacttattattttttatttttggcaggggtgggactaatttcatggcatccaataatgattgtggtgtaagagagtatgatatggagaggtttcagcttctgaatcacatacgttttccttggcctgtaaatgtgagagctctcttaagcgcatcatatttgaatcaactttcttttgttagcgtttgtgcttctctctcttttttttttttcactaattagatagtttgtacaagtactttataatttcaaatggctgtgagttgctgtaactttactgatagtctgttaagctctaaacaacaaatggggcctttttgttggtgttgggggaatcacttaatttcaacttcattgctttgtgtcaaacatagttgctctacctctatattttcatatctcgtatggatcactatcttacaattacttgttcttcttatgtagcacacatcggtaagccctgaccgcaggcttattgccattgttggagatcatgtagatggacttcttgtggattcccagagtggaaaggtgagttctataaattaacttttttcaatcccaataacaactgtatttttaccctccattttgttggtttacctcctttctctttagagaagtataatgctatagtcttgcgagtaagagatttgagggtttcttatgttcttttattttattttgtttaagaaaagaactacaatgctatctggcttacacaattggttgatgtttgcagactgttgcttcagtagttggtcatcgagattactcatttgccacggcgtggcatcccgatgggcgtacttttgctactgggaatcaggacaaaacctgccgagtatgggacataagaaacctatcgtcgtcggttgcagttctgaaaggtaatttgggtgctgcacggtctattcgcttttcagccgacggtcagttcatggtggtggcagaacctgcagatttcgttcatgtctatagcacaagtgctgattacaaaaaacgtcaagagatagattttttcggagagatttctggggtttcgctaagtccagacgatgagtctctctacataggaatctgggaccggacttatgcaagcttactacagtacaacagaaggcataaatacgagtatcttgattcttacttgtgattgttctcttgtcatgatttttattagaaaaggaaaagcaaatagaaagaaagaaagaaagaaagaaagagaaaagagggtaccctatagatttcaccccgcacctttttctaattgcatttctctgtctacctatgtatgttgttgtctcagttgatttaatttagaataagaaaagaaactccagcctagagaacttaaatagtgtgtatagtaaccgttccaacttctacttttactcaagtgattattgtcatcacaaaatttccttatctcaccattcactcaacataacattagtgagcttgcaaaggaaaatgggggcatgggatgagtttcttcacctacataggaaacggggcagagagatatatgttttttttttttaaagtcactaatgttggttcagacacagttgttctgtttttgtctgatatgtgaatagaaaatcttcaatattttctttttctaattttgtgttttgttgtgttattataaccactatgatgtagtgtataatttaggaattttttttctttccaaatcactgtcaggttaaagtaataaatataactttttgaattatcattttgctaattattattaatgattatttattattattat

SEQ ID NO: 36920 - DNA, 5266 bp, Cannabis sativa
  modified_base (1485)..(1491): a, c, t, g, unknown or other
ggttagttgcaaatacctgaccacttaaggaggttatgccgcaaataactcttaaaaaaaacaaaaataaaaaaataagagcagaaaacctaagatagacagtcaagatattatgaacacctaggacagctgtttttgttaagacaagcatgcattaaaacagcagcagaaatcagtttgaaacttcaaatttgaatattttgatcccactttactcaaaatgacaacagaacgaacctcatttgtaaatacattgttcactccatcctgtttagagacaacatcattatgcaattgatttccagaatctgttttttgcttgacttgtgaatttatgtttgccgattgggtgaattctcctgcaaaagtaccacgttcacatagagactacctcaatttttttcaagacagcttagacattacctcatcaatcataacaattcacttcttatgcctctatgaatgaaataaaaagggcaaggcagagaactaccgtcaaaaaacttgctccatttgatgagaccttgtgactttcatttctagacacatttaaagctgcagttgttgattcaaaattatgtttcaatgatccattttctttactcaatctgtatattttgatcctgtaaaatgcaaagggaatgtcaaaccaatgccaagcggcacaaaacagctaataaaccaccattacatctcacatgtacctccttttgcaagcatcatatggaaatttctttaacatttacgttaagtagctagggccttctggtttggagaggcatgatctatagaaattgacgaatgtcaaggggacaatctcatggaaaagctaggaagctttctagtgacttttaggagagattggaagatactttttgatctatgcagcttccttgttcgagaccctttgggagtacacaaacttaatgcttcacaatgtcacgaattggtttgttgatatcaactatggtgtagtctagattcaaggagtttactatagcaagagaacaaagtaatttacaggtgcagaattattctcttgtccccatactctgctaatagtggacgtttccttcaaagaaaacatggagttggtggttcttgatattggcaacaataatgatgctatttggacttctaaaacttgcaaagtcaattgattccggctcttttttaaaaaaaaaaaaacttgccaggtgagtgccaactctgcactggaagcggaaggtgaggaaatagtgatagcccttgaatgggcaaaggagcaaaactgggattttatctctttgttttctgattgccagatggcaatacagctgctaataatgataaggttaaacttgtaatattgcctttgtggataaactagcttcagtagctaggatcagtgatcttggagtgcatggtgctgttggggagtgtctgacctcaatttgtttcaatttatagaacttttgttccattaataataaaaaaaaaaaaaannnnnnngaagaagaagaaaagaaagaaagaacgaactaacttgtgcaaaagtttaaagtcatactagatcgatcttcaaataaacaaacaaagggaattgacttggtgcagcactgcaaacaagcttacatgagtcggttagtatcattttgacctctcatcaaatacgaagcccaaatctcattcgcaggaggtggcggttgaacccagtgccctggtatgcggctgcacaaattctactgaagttaaaatgtgacattgtcttaggtggtgcagcaattggcaattagttaactattaaagaagtaataataaagaatacaagtggaacaaacaaatagaatttagtatgagtggtatagtttgactgcgaatgagttagaacctagaactgccactttactggttgagcaaaatattgaaacaaaatttggcatccttaccttcctcctggtcttatgtaggcatcccaagttcttctcacctgcataaaatttatatagtactcattaagatacagacctgatcaaagaaatactaaaagcctaccaacaaagaagtttgtatcacctcaataagggtgcctatatcaatattgctcccatgataatagtgatagaattcaattggcaagttagcaacagaatcatagacttgtgtttctagtgattgcttcccgggttctttctccatgttcacactagatttctgatcctttttaaccagaggttcctgatcattatcttcattagggcttatttcttttgattcgggcccaagattatgggttgctttcctagattcttcagcagttgcaatggcaccctttgcagcctctgtatcagctgctgcaattgcctgacgttcctcttcctcgactgcagcttgcaccctctccagaaacttgtcatcctcctcaggaagaaaatgacctgcataataatgttgtatggtaaagacattctcaattcattggaggaatttgttaaggcctggccaaagcaagcttagttccgaccatgcaatatcatcatacattaaaagaacgaaaacacaaaaacagggagaatatagaaagaaaagtgaaccacaaaaccttgttttttcaacttttgaatcctaattgagcgtaactcttgcagtttctccacaatcaataccagctcaagctgaaatatgaaattagctgtcaaatttagttaagtgaacacggagcatgatgtttgaaataagaagctttcatatctagctcaacatctgtagatttagaaaacaagtccataaattctaacctcagattctagcctctttctctcctcttttgctttcagctttgcaatctctttcatcttctccacctgggaatcaacatgccaaagttagtagcaaacaaacttgcagaacatagacaaatgcctaacaagatgaacttgtgattgtatgttaccaattaacaatacatgtgcagaacaatatagtcaaataccttgcgttttgcagtatcattggcaatttccctagccctccactcatcagcttcttgatcagcttggtcaaacctttcatgctcctatgatcgttacagagagtaaatggatatgaaatcaacttaagcaacaaaaagatacctatttccataagaaagatgtcaaataggaaaagaataaagcaagttcactaaaaccaccttcgcatgcatttctgcaatgagcttcctctttctcttcctccaacgtttatttcgtctcgacttcttcattttattagataacctaatagcagcacatttttcttcccatggatacagttcatcattaatcgccctaaatggttcaagttgagctcttagtctacacatcagagaatttgtcgtttccactgaaagtgaaacttgggattccgtaccaacccttctatctttcaatatattgaaaatcccgctaagtgaatcatcattatctacttctacagaccctttaacatctttaaccaccatcaacatttcaagttctttacacctaccaatacaaataccaaacaataaagcaaaaacaactaaatggtaacaaacaacaacataatatataatgtcacaaagtaatgtataatgaatcaaaaacatacatcgatttcgcaagactgacagtgtcatgtaaatctttaaggctatgaagcacgtttctggtttcccaaaaggcaatcgagcttggttgattaggcggtaccatagggatccaaggtggccgcagggtaggttgaaagggagttggatccatgactacagcaaaatagaagggaaatttacctaataagagaaaaattaaaaatgagattcagatttgtcagtaactaaagttgaaattagttgtataattagagaataaatccgcgcttcgcgcagtgttgcataacaattataatatttttatattgctaaatgtttgtatcaaataagtgatataatataaaaagtattgtattatcttacgagcactattatttagaattcatagaaattatgaatttttttgaaaaaagttttgtaatgggggtggaagagagaataacatatgatttagaaggtgatcagctctgaaacaaagaaatggacaaaaatgttgtgatttttgtatagtgctgatctgaaatttaaaataaaacattcagactttgttgaattgttattttgtctatgcttcggtccaatcaaattcagtgcaccctcattgtttttttgtcctgccttcacttctttaatgcaactctattttatattttcttacatatatctataatacaaaaaactaaagataacacttaattttgacactaattcattccaatttaatgtatgatgtcaaatgttagcaagttcactccaacacacaatttaatatctgaaaaacacaataacatatatttacaatcaaatatgtatcctgatttttcaactcatcaaattaactattatgattacaacttttgaccaagttaattagagggacacaaatgaactaattaagtcactggtttttgggttacttttaactatgaaaaatgaaaaatgagagaaagttaaaagacctgagttgctgccgtttgcgagggagaagatgtgtcgtcgttgggtaggcaggagctgtgtcgtcgttggggagggaggagctgtgtcgcttccgtcgttggtgaagatgccgtccgcgacttagggaggagatggccgtcgtcgtcagcgagtaggggagaagatgtcgtcgtctccgtcgtcttctaatcgctgggcagcgaatcaccgtcgtcgtccactctctgagcagtgggcaggcggcttcaaaggggatgaggtgagagagagaatacgagagagaggtcagatttaggttttttttaaaaaagaaatgtttttcttatatatatgtattaaaatataatatatatatttttaatgaagatgattttatttaaaaactttcagcaactacaattgttttaaatgaaaaggagcatcatgctcactaaaaatataatcttacttcaaataagcaatgagcggtcttgttagcagattgtttaacaaaaattataaaaacacattgtttttaagaatgataacaatccttgacaatcacgaacaagcaatctaaatttagacaacattgcaattgaacttttaattgcttgaacaacaattaaggaattcaaaaaatttaatatattttttttttttgaataaaaatttcagtattcattaaactgagaaatcagccaaagcaatggcaac

SEQ ID NO: 36921 - DNA, 4247 bp, Cannabis sativa
ctttgaaaatgtatttgtgattgtctttagagtttctatgttctataaatagggtctagagagcactcataggtttttcacctattctaatttcatttttcatattttcatctggagagagtttcttttgtgaaaagatagagtgttcacctaagttttagtctttatttattgttcttatattgttcttagaataggttgaagaatatgattgaacaagagaaaggtcttcgggagaagacttgtcaaagccttcggagagaaataagcactcacacatcaagcaattaactaatgttcattccatctctacaaaagggaaatatagacgtcaaagatgcatacatttaaccattaatttgaaattaataactaaaacgatgtatgtggaacatgctttctattgatcgatcagataaacaatcatcatcgtcattaataaatatgttttctcttttagaagcaaatgtaatttatttgttatgatgatcagttgttggcaaggcatataacatcttgaatagcagaaatggcgagcaagaagcaagtaaagaaagcgaaagctatggagatggccacatggtcgcagaaaaaacgcaaaggtttacagaaatctggtaaggctgtgtgtttgattcctgtgcggttcaggttactgacccctgatgctgctgaccctgcgcttatcattgcatatgcaaacacctattatacatcacaaacacaattaatataaatgatatattatattcagataactaattaaacagtacttttatgtatccaaagaagtacagagaattttcttattgtaatgaatagagagagagaggatataacagctatatgtgattattaattaatggttaggaaaagaaaattgagagagaaaagcatatggtgtattacctgatcacaagcaaaaatgagccatgcatgatttcttgtgggaacaacggatgactttctgagcaatctcaatgcacttaagattaactgcagcaatgagtgagctgcaactgcagctgatacccctaccaggtacctgctcattcaatccacatttttcggtcatcaaaaatcacacacttctcaattccccaaaaagttaaattttaattgcttgatcaaattaacacaactttgtaattatttggaagctcacacatagtagatgagcactatataagctaataatttaaaatgaaaacttataagtagagtttcattccttcatataacataattaaaattattatttcaaaataatgtctaacaaagagacaaattagaatagacttcaaagactaataaaaaaataataaaaagggagacacactcacgggtctgattcctttttcattgtaaagcaatgaaatgaaattagaaaagtagctacgtgtacgaataccaaatattttttgttgttacgtggaagggcaatttcgtcatcataagtggacactcttagtctaacaatattagaaagaattaaacttaggacaaaggccgtttttcaggtcatgttccgggaaagccagtaaatatactgacaaaatctccatttataaagcataataaacctgatctaactaccgaacaaagagagaacttggcaaaaaaagaatgatacaaacttaacttacttgaccttggaaagaacccaaactacagaagcagcaaaataaagaaagaaacagagaagggtatcatagtaattccacttacacgaatgaatcagagaaagaccacttggaaaaaactgggagaggaaagccatagacaaaaacagtgctggcctctttggctgtaaccatgaacaacaacgctatcaccgacgttgccacgctcaacaccctcagtattgcctgtgccacgtcagctttccggaccaacactgcaactttccggtgagaatgatcagctgcccccaccgcctctacggcccgctgagtgtgagccccattttcctccatcactaccaccaccttcgcatccgccatctctgtctccaacgacgacgttttcctcccagtcaccatttttgttttttcttttttgagttaaaagaactatatgagttgtaagtggtaatatatagtgattgatttgttttaactgaaaaaaaaaattgtgtgtgttttggttttggaagagtatgccaaagtacgtgggattgggagtttaaaaagagtgaattcaatgcctccggttacttattctacggttcttaaattatatatataatacgaaaatattaattacgtcagaaatattaatttcaattgaatacttaaatttatattagagcaatactatacatcttaataaattatcgaattactatcaagatgaatgaaggggaaaatgatctatatcaaaatgtatatatcatgatattttattatgaatgttataattattattttattaaattttgttttaaatttttaggtaaatattttaaatataagtgttgctacatcatttatcacaataatgtatcaagatgtaataattttatattatataggacgtacctatatttttaggaatattaattattttatctatatacattatccaaattaatgtgattcaaaaacaagacttcgattatttttatttttatttttattcaaaaacaagacttcgattatttttatttttatttttatttttattcaaaaacaaaatatattctataaccacttttatttttttaattttaaaaataaaaaataaatttgtgttctataatttatatttttttactttatttaagtcgggttcagatccaaatctaagaacagggtcgtggtctgagtccaggactgcagccagggtcagagtttctgttccaaggtctaagctggggtcgaaatccaaaatataaaaaaaaactattttaaaaaaattaattagtaattttttgtattaatttttttaaaaagttttgattttcaattaaaaaaaataaaaagttaaaacagttttataaaatatgttaattttaaaaaaacaaacttattacttttctaattaaaaaaaccattattaaacgcaccatatatttctcttctaaacaatattatttaggtgttataatgaaagtatattaaataatgtgtaataaaaacaacttaaataacaaatacaaaagattattatttttaatagtattattgatatatatttaatttatgctgttgctataaattaaatataacaagaacattaagatattattaatatttttctaatttttcctgatcataattaaggtttttttgctgtgatcatatttttctaatttgtcctgatcataattaggttatgatttcatattaactttgtactccatagtctaggagcttgtttggctaaataatataaatatattatatatgtgttataagttccaacgtcattgcaagctaccaaaaatgatgtgtggaattgtgtttgagtggggtggggcacacaacagattagtgcccgtgagttcacagtgcatgcagtggaattggtgcttttgttattaattggtcagaaatttacaaaaaatgcatagatatatggagtcttacgacttaaatatatatgtactgtgacaaactctgatctcactacactgggaaaataattaaagaaggcactcgtttcaaaacttatttattagagaggtaatttaattgcagaaaattaaaaatataaagcacattatatataaataagataaaacatataacaaaaagctttcatagctcagttggttagagcacccgtttagtaagcgggaggtcttgagttcaactctcaatgaaagcatttatttttaatttcccacacgcattttataaatgtgattttgatgaccataaaggttcatttttccctcaagaaatcatgcatgactcatttccctgatcgataataacggcattgattgacgggtttcttttcttctcatctgtacccttttaacaataatgtagttgttatctcaagatctctacaatcacattacaataagaagtcccatatgccgacctttttcattttcttattatcagtaaattatttgtactgtctttattatgtgttttatttgttaatttgaatatatgatgctaatgctatcataagataccctgcttattaattacgataaaaatatttagtagagaggcagatttataattgagttgctgtcttaagataaccttagtaatcagcgagctata

SEQ ID NO: 36922 - DNA, 5873 bp, Cannabis sativa
gaactttatatgtgtttaaattctcttgttttagaaattcatgtttaggatgttaaacaagatatatggtagtaaatctagatcctggtaaaataatctccaacaaacccagtggtcttaggggagataggtgagtttggacttagagttgaatggtttattcactattaagtctacttatctggtccaatctttaattagagtatggtcatgcctacattgttgtcccagccctgtggaacaaactttggaactcaaaaattatggagaggcataaggtcctctggtggtgcattttgtatgatgctatgcctgtccgagccctcctggttcaaagaattagaattgaagaggtgtcgtgccccttttttggggaaggtgaggaatcgatggagcaccttttcctctattgcataccatttttggaggtcctccctttggagacttattctgatacttgaatcaagagcccgtgtgtgggattggataacctttctttggaatttgaagtcgaaagaggtggatactgaaaaattgttcctatatgcttcgatcgtagtgaatacaatttggaagactcgaaacaaaaaggttcataataactcctcgagtaacattaaacattatattgattctatctctatttgttacacagtttatgcaacttggttgtttgctgagcattggctgtggtgcatcctacttggtcccttcctccagaagattagatcaaaatcaactgcgatgttaaggttggcggtgattccatgtgcgtgacagcgttggctagggatcacacagggacagttttgtgggtagcagttaacatgcttaacttcacggatccactgattggcgaagctgcagcgtgtctgttagcgttagaatcgactgttttaatgaagcacccttttattttggtgaagaatgattcagaaaaggttaatttatcaaagttttgaaaggaatccactttaattggaatattaataattatattaatttttgtaatcaactctataattattttttatgctgtaatttctcgtttatttttaaatattacaattttgcagttcataatgtggttaggtgagcttttgctcgaaatatttcgggtttggttgagcccttctctatacatgatattattttttgtaataatgaggaggtctaattctttctttattttataaatgttttatttaaaaaaaaaagtacaataattagtaaggaaaaaaaagggtagattggtaaaatgaaatgggattgtgaaaagaggggtggctaagacgtagtggagaaatggtggtcccaaaaggacatttttggtggttcatggtgatgctgaagataaagagctgtcactatgtctcacttgtggtcttttggtcctcatcggtcaaccacttcactccacgtgtcacttcttatcattacaataattatttcactcttaatttattcttaataattatctcacacatatattagtcaatctaaagttaaatactttttttttttgaaaaagaatctaaacttatacttattcatatactattccttaacaaccgtatgaaaataagcatttaaattaacaccacacactaataatgcaaccaacatacatacatagttttttttcttctttataataataataataagttctgaacttgaagtgctaagctttgttctcactcgtcaatatcttacttatgttctttggcgttttcttttttccaatcctcatgaaataataattataaattaatttgaaatatatccaaaattgcaatgtgtttgtcaaataagtagatactacatgattgaataacatactcatgaaatgcatttcaaaaaattttaatgattgattataataaataaataaataaattgagtcgaaactttatatatcttctctctcccactccattctttaaaactgtgtaaaataacagagagagggcggtgccgccctgctgagggaaagccacgtgacaaggacgtgactgtctaagtttggtccagttctatccttattatttaatatttcttttttttttttccatttatatataaatttttaatttgagtataagatagggaaacagtacagaagctagtaaaagtaagtttattataagtttaataatattacatttaattagccgtcattccttcgccacgtgtaggatctggaatcagctatttgacaactcagctataattggatggtcaatgagtcatcaccgcaggtttcgtgacacgtggtattataacgctctgtaatgctcccacgtggctgtttgggatcacgaatctgttacgtctgtattaaatatttttctgcttttttggccccttttgcatgtccaaaatacataaataaaagcttttatttgaagttgttttgtcatattttgtaatagtaatcaaagtagtggagcctatatatatataatacacacaccactacgtacataattatatattgtttccaattgtaatttaattttcatgttcaaattaacgaaaatgtattcatatcattttatgttacatgtaaaaaataatgaaacaaaaattattaacttttttttttaatgtatatcttatttttatgatgtattttacctcgagttttgcttatttttgtagatatatatatgtgacattgtaatttgcgtatatatatatatattaattaatggtatttattataatttaaaataaaaagtatagaaattatagtatggatgatatatattataatgcatatatatttataaaaaaataatgtctttttttcaaagtaatataatgcaaaattagtaagtaaaagagcaaattgccacatgttatcgtttgtatgagtaatatacgtaatcttgtatgtagtagtctagacgtgtaacaatattattattttctattttatctcaaatataaaaatacatatttatatatgtttgggagtatcggaaaagcttatataatgatagacaatgttagtgtatttattttatattatagaaatttatgtagaatacttttttttagataatcgttccggtagaattttaatctatttccatatttagaaaaaatatttattttaattttttttataatgtgtaaatttataattatttgagataatttataaattttataaaatttatattatagaaattagaaatttatgtagaacacctattctcagataatcattcggccggtagaattttaatctatatttcgatatttaaaaaaaagtatttaattaattttttttatataatcatataaattataattatttgagataatttataaaatttctaataatttactatgttaaaaataaactttaatccattaattactacacgcataattagaaaaaacagttttttttagatgtataatcataactaaatactcaaataaaataacaaaattagaacaaaaaccagttcaattggtcccaagagggaccaactcctctgctgcaataaaactagaaaaacaatgtctaaacgcccactttgagagcttatgggctacctgatttcgagaacgaggcagccaaactacctccacttcagggagatcatccaacatgctccaaaagacactcgtgagccgccaatccggggccctccaaaacaattaatatatatttttgatattataaactactaaatttttttttttttgaaaatttaccgctacaaaaaatgttacttagtgacaactactttttagtcacaacataaattttttataattaaatgtgaattttagtcacaacaaaaaattatttgtgactaaaacatagtgacacaagttgtcactaattttattttatcacaacaagtattgtggctaaaaatatatttatagtcataacaaattgtaatttttgtaactaatacttttagctacggacattttaatcactaggaataataatttataattactcacaactttttttaaataaaattttttgtagtatactaataatcttaaataaatatataacatacaccattataaaaataattaaactaaaaatcatttttaaatactaaaatagataggaatctccctaaatactattttagtgggtgtactatattatatagtagaatattttagaaggagagagacaagttattttatagtggatttatattatatattatatattacacattttgtataaatttggcaaatagtagtgcaaaaggttagatcgatcgatgttgactaaatggggtagcaattaattatatatgtaaataattattttagtggcatgagtataaactttttatctcgaaataattaatattgcacactttcacttctcattatattttatttatatatttattaattaatgttacttttaatcaacggggtttaactgcctaccttatatttcttcttcaaataattaaagaaaggtcatattgacaaatgaaacaagagcacatgtttgatttttaattatcaatctatcccttttaatgaattaatggcatatgatcttttgtattttgtagataccaaccaaaccaaacctaatttccacttaaagcaataaaactcatacaaggaatcctaaatttgaaatttgatatcaaaagaatgtattagacaaattaaacgatatatatatatatctatatatcatctacatatacatcagtctcttggtgtgacaaactcaaaaattttaatttgtgaatgtttaattgttataaaaaacagaataattagtatgattactctttaaatttttaatactacttacttaatcttgtcttttaaaatatacggcttttaaaaaaaatttctaaaatcatatttcttttattaagttatgttttttaccgttaaaaattagtattctaacccccataaactttcaattaatttgtaatttttctttcttttattaaaaaaattaattttaaaattataattttttattaatgctaaaaaaattaaattaaattattaaaaacttgataaaagtattaaataataaaaaaatatattaaatttacttaaaaaaattcaaatcattccaaaaaaaaaaatatttttaaatattattatatatataaacatatcttaaaaaatcaaaccaaaatttttaaaattcaataaataatttaaacaaactaagattttatgaagctatcagagttaaggaagtgttgagttggttaaaagaaacagggtggcataatatggtggaatcagacaatttggtcacgattcgagttatccgaaattcgttagacatgacttttgtttttcggttatgcatttcaaagtgcagacgaattatttctagtttaaataatgtttttttgatttttatcaagcgatctgctaatcgtgttactcaccatttgactagagcttcgtggttaaatgttggttgaatctattcagattctacaatttcgagtagtttacgtgatgttcttttgaatgatttgggttgataaaattacaattctattaagaaaaaagtagaaattcaataaaaatataaaattattttttaaaaaaattaaaatttaaattaaaaaatattatgtttacttaaacaaatctaaattctatgggtcaagtgggttcatgttgtgtacctagaataaaaaaggtggagtgaatatgaaacacctacaaagtacatatagctagtattggaaacaagtggtgaaagtaaaagagaaatttaaggtaatatctaggggtgggcatcatccaatccaatccaattgaatcgaaccgatccaatccaatctaattacaaaaagttggatatccaattacaattg

SEQ ID NO: 36923 - DNA, 4507 bp, Cannabis sativa
attacacctaataaagaagtaacagtagttcactataaagataatattactttcatcgctcaactaaaagaaatgtacatcgaaggagagaattaaacccatttcattaaaattcttctttacacatgatcttcaagagagttgtgatatcgactaatgctgaacaaatttgatcaagtgacaatcttacaaatgcattcacaaaattattaccaacatcaatatttgagaagacgacatataagattagaatttttcgattagaagacctttacaaatgcctaaataagggagttaatttagactgtactctttttctctggaccgagtttttatcatactagattttctagcaaggtttctaatgaagcagctattatgtacatccagaaagagtgttataaaatattatatatatatatatataaattgaatatctaaattatccaaatcaattattagcataaataccatctgtgtttccttttattttattgttttaattttctattcttcaagttatatttttgtataaataagagttcaccacattaaaataaactactttgaaaattctctctttcactttctatttatttgttcatatattcttcttcttttcttctctagtttatattattcactatacattttatagcagaaataagtaatttttttttcttttaaattattgaaagatgaattaggtggttacatcaatattatgagtaaattattgtatattcaaaatatgtttttggagaaaaatattaagttttacatcacactaaaataaaggagccaataaaggaaaaatattttcagcttcattaatataactcaataggagatagaatctaattacaccctaatcaaaaataagaatgcacatgtatattttcccatgtgccatttaggagaaaataccccaaaaaaaaaaaaaattacccctttcttgtttgacaataggccaagaagacagaaagagaaacatttaaaactaaacttttacttgtttcaaatcataatgaattatgtggtggcttcttattttcagggtgaaaggggcgtatgaaagcagagttcatctgccatatcttgattgagctcttaacactggcctcagtagcattgttgaatgcgaaaattcgagccgcgccatagattgcctttgtcggataaactctagatgaaatgcatgttcttcctccttgtgcaaagctttcaactatggaatgatcaatctgtaacatcacaccaaccaattattattactactcaaacaagtctactttgtgaaaacaacaattactaaaataaataacagtgtgactcctcaactcaccaaaattctaacagatagcttttcatctttcagtactggaacaaagctaccaaatatttgttttttcacatcatttgctacagaagacctaccaaaaaatagagaccaaaacataacaatatgtgttaatacaatatatgaatggaagggaattaactaaatttactgataataaaatttaagtaccttaaatgatcactgcagaaaaaagtcttgagatttccatcagagcctttaacaataaagaaatatacaggagtctgttctgagagtttgtcatctgcaagaacaagaagaccaaatggccccaaagcaccacgttgagcagcaccaccactgttgctgcagctaaactctgtgtaattggctttagctgttgcttccaaggcctccttgtcaacctcaaactcagctacaacatcaatctattacacattcattataagacaaacttttcttgttagatgggaatttattatcagcaatcaagaaaagaaagaatagtaattatgtaatgttgatcaactgacctgtgtggctgtgcctacatcaattggcactattgtccctggtttaagctcaacattgttgaattctctactgcttaatctcaagctctcaatttcctcaactggccattgaagtagattggaacctgtcttcttgtccagcacaactgtcctaggaataccctgaaatagatttaccacaaaactcaattatacaaaaaccccattgaaaattatagggaaaatgctttaattattaggtttaagtacctgaagtgatgcccatcctttcttgacatcagcaagttcactatcagactcaccaatccaaccccacaacactctccttccctttttggggtcatagaaagatttagaagcatagaaaataccataatcatatctaatcccaatcccaacatcaatctcactgttatcaggaatccatttaccattcttctcatcataagtaccaattgcatagtaatcatgtctgtcatcatcaagactggccttcaccacatgcttaacaccaaccccattaacagaggtatccaaaccatggtccccagaagtagacactggatagaaatcaacacactcccacatcccagttccgggcacaccatgaagaacaccatccaaaagttcatagctcttaaaatccagagtatcataaaccaaagagatccctgttttgttaacctttgacccaactatgatcctccacttaccttcggatgtcaaccaagccgtggtggggtcacgaaagtccttgttgtcgattccgggtggtggaaccagaaccgggtttccagagtacttaacccatttgattaaaagcgggtcagatgggtcagccgggtacgcgaggttctggacctggactgactcattggttgacccagtgtatagcataacaactctgtcgtcagggagaatggtggcagagccagaccagacaccgttggcgtcgtaccattggtccgcctccatggctagtgggaggtggagccagtggatcaagtcggaggagactgcatggccccacactatgtctccccacactgcaccgttggggttgtattggtaaaaaaagtggtaccatcctttgtagtataatggacctgtttgtaaatcacaccaaaatcttaatttaatgttaattgtaaaaaattaaaggttaattagaatttttttttttttttaaaattttaacatgtactaaatcatgtcctgtttgaggtttggcagttaaaaattccctcaattattgattgactacgtactaaatcatgttcccagactttgatatatacctagttacatgtccttgaatttttaaatttactaaattcaggaagcaagatttagtatatgttaaaatataagggtaaaaatcttaattagaaaaaaaaaataaatatagattagtgcatataaaagtttgaatagaaaaaaacgtgcattaatgtgacatatatagctgtggacatgtgatttttttaacgacaatgattggtgtccttgtgtttcctattttctttgtatcatcatgtgattttcgacatgaaaagttaaactatacagcaaataaataaataaataaaattgaaaactttcaaatcagatataagtaaacaaaatcacaattaccatttaaaaaaaaaaacaacaaaatcacaattagggaaacactgaaaacgaaaaatcattacttaaaataataatgacttaccatttggatctgaagtagtagatgccaagtcatcaattccaggtcagcagcaataggtaaccgttggcaagaaaagaaaatgaatcagcaacacaacacaatcactataacggggtccactatacattaattatattaaaaaaattagagaccacatgggaaaataatgataataataacagttaaaactaattccgtgcttcctatttaaccgagcctccaagcctttgcaggcctgccaaccattccaaaattgccacgtggcttgaaagttatggatttcaaaagaaaaacaccttgcctttgactttttgaccaaaaataattcataaacgttactattcattttgaattattacccaaaaagtaggagcctcaaaattataacgattattagtcagaattaaaatataattcgtgttgaatttgatttcagatttacaaaaagatgaaacactttttacagccataaataattaagaccttgttcgccatgtcttttcttttttttttttaaaaaaaaaaaaaaactttttcttcatcatgtctagtatattttttaattagaaattaatttttaaaaattaaaaaataaaaaaaataccgttcatccaattcttctctggctgaaaatgaaaagcagttctttgccacgacaacatgctattattccaaggaaacgccaccgggttttggccggagaataactgactcgtcttctccgatacaccggccgatactccacgagaggaggcgggttgaaatgtctctggctgtggatgggtagattctttagacttaaacaacgatccgatgacgttttgatcttcatcatcttcacggtgaaagaatccacgtggatctttccggccaataatggcagccaagagaacaacccttaacaacccagaaacc

SEQ ID NO: 36924 - DNA, 5648 bp, Cannabis sativa
  modified_base (193)..(194): a, c, t, g, unknown or other
gtttttttttttttttattctgtcatacgcggtgtagatcatcgggtcgtaggcagtggtgagggggtgacggcgcgatggttggggttcgggcgaagtcggagtcgactgggcttgtgtgaggcggctgggatcgggcaaaggaaggagggactgagagagagtttgagtggaagagagagaaagggattgnnattttgacaaggctattttgggggggtttttgaaaattgtcctattttaaaaaatacctacactaagtgttctccaaaccaattatgtattaaaacatgcataataattcaaatttccctttaaattttagacattcactttcagaaatatatagaaaaaaaaatattaaaaaagtatgtcatgagacttaaactcacaccattatataatgtgacatacacccaaccaaccaaactataaatatttattatttataatacacttaattttatttaaataaaagtctaatggaactttttatttttaattttgaactcccaaaaagtatgggtcctaggcacggaccttactcgcatatgcttacgattggcctcgtagcaaccaactacaaaagaacaggcaagtccatctcagtgagatgaggtgcaatagagggaagaccctcattccacctagcagaagccttttcatctaaagccatcttagttaaacaataaacgagaaggttaacatctctacactcaaaccaaaactcaaccaactcgaacgaattacaaaactcaataatctcggtaagaatacaatgccaatcacccacatttattttgtacatggttgtttagcaaccaaaccagcaacattaatttttggatattgtccaatatcactttcaacaatcaaatcaacaatacaagttctgcttagtatcctagactgtatttaacaaacaaactggcaacacagattcctggcaggtgtccagactattttcagcagccaaacctgaaatatgggttacatgtaagtgtcttagaccattttcaacaactaaatttttattgtaagtttataagaatgtgtcctagaagattttcaacaaccaaactagcaacatgagtttctggattgggtccaaaagcatattcggcaaccaaaaccagaaaattgaattccttggtgtcctagacaatattctgcaagccaaataaacaacaagagtttccgtttctggttagtgtccattatcctatattattctcatcactgttggctcaagggatatttctaaattcttctcaagttataacaggacatgccggctgtaaaagctcaaaactaacacaaagttacttcacgagataatagcatgagacaataagcagagacccatggtatactttaagttcaattaaataatgaaaatcagagccttcgctagtcaaatttatgaaaaatgtcgactgatttgtaagcgaggacgaattatagtaatttattcctaagatataaacaaagacgaacaatgccatactaatagcaatgataagcatacctgagtacctgagtagtcttgaacctataccagagctaaagtagaaaacattggagtggtgaagttgtttgacttgccaaaaggttcattcagtcttattaagatatccatacgacttttcaaatgctgtatccaaaaaataagattatactttagttttaataaacaacagcaaattgaaaagcatactgctaacttcatctctacttaaacatctaataattatcactaaaccaacaccgaaaaaccaaattatattagaggcagaaaatagcctgcttatctgttaccatctagcatccaacctttttaaacatactcttgcagattctctaaacccctgaaatgatataccggagcttgtcttcaaatcattgattgacaggtttcgctcaatgttgaaagctccaaaaatccatatcctacaaaaaattatgagttattagttaccccagaagttaaaccaaaacattttatctcttattaatcacaatgagaattcaaaataccattaaggaattctaaataaaagctcacttttttccatttatctcacaggagcacatccagaatccctaacaacaatgtccattgagaatagcttgattgagaagctttttttcttctacagatgaagtaacattttactgacttcatactatgcaagaccatctcttatttctgatgatcctttgtaacttggcaacatctacattggcagagtaccaaaaaaaaaatgacattagattgaaattccatcagcctcgtgatagccggtatctagccattggaaggaatcagaaaaagatatatattatccatgaaaatgaaccacatacctaaaaacaaggatggacttgaatatgatgccacctctgaaccaagataattagtatagatggaacaaaaccttcagctccaaggaattgatcattaaaacttatcatctggtacaaaacctttctgtagcatatcgtcatggtagcggaatgctgctttcaagttgtcctgtgacacatgtccattaatcaaaaacgtatatgttgatttatcaggcttcacacctttttcaatcatcctctgcagtactagctcagcttcttgcattctaccctgccgacagaatccatttaaaataacattgtatgtaataacatctggcaacaacccttgatcttccatcttgctagtcaaaacaaaagctttgtgcagattctcttcgtttatgtatccattaatcaaagtgttgtatgtaatgctgtcaggaataattccccgagaaatcattttcgtcaaaaactcatctgcttttgcaagatcacctgtcctgcagtgcccctttaagacagtattacaagtcacaagagtaggttttataccttctttcaccatttggtcccacaacctcaatgccttaggtacattacccacgctgcagaatccatttataagaatgccgtatgaaatgtgattaggaaatatacttctagaaatcatatcatcccataattcctctgctttctctatttcgccacctttgaaaaaaccatcaatcaatatgttgtatgtgacaatgtcaggcttcaaatttctttcagttattgtatggaacaaatttagcgctttcctcatattcccactcttgcaatacccatgaatcagtgtggtataagtataaaaatcaggaatgacaccccgttccatcatctcaccaaacaaaagttctgcatcagcaagcatcatctccttacacaatccattcataatagtattatatgtgaccacatccataacacagccttgctcaatcattctatctctcattttcagtgcctctgacatttgaccatttttacaatatccatctattaggatagtatatatcacactatctggaaccaaacctacatttttcaaattcctaaaatatcctagtgcctgatcaagatttccatttctagtgaacattccaataagagcactaaaactaattaaatcaggtgaaacacctcgacatgacatttcacgaaaaatcccctcagcctccattacaatattttttctacatctctcaacaagcaatgcattgtatgtagatgtgtcaggattcaatccaactcgcaccatctcatccaaaacttcccttgctcttgcataatttcccaatttacacaagccatttatcatagtgttgtatgtgaaaagtccaggtctcaaccccttacccaacatagagttaaataaataaaaagcctcttctaaaagcccttggcgacaataggcattgaccaaagtattgtatgtcactatatccggaagaatccccttttcttccatgttcgacaataacgacttggtatcatcaatttttccatctttacacaaagcattgaccatgatattaagtgtaaaaacattcaaattaattccactcctaagaacttcttcatatactttccatgctaagtcaacccacccaactttcacaagccctcctagaagactattacaagcatttatagagacatgaaaacctttgcttctcaatatttgaaacacttcccacccttctctcagcttcttagcttgcacataagtcctaaccaataaatcaaacaccaaaggatttgagccaaaactttctgacgctgaaacaaaggactcaacaacttcaatccgcgaaacgccactcctcctcaccattctaagcaccagcgcttgtgcatcggacaacctccgaccacgcaccagaatatgaatcattatactcaaggactctgaagaaaacttcatattgggactatccaacaaaatcaaatcaacaaactttatacccagttgaaaattttcacgacacctactaaggacttcaactacaactaatgggttcaactgaaatagataactgcgcagtgaattatgattaccttgcttcaaagccagtacaattttctccacatagaaagaatctgatgaaactgattcccgatttggagttccagaggcttcttcttgaatttcgaaaggtataacaccaacgttagagaacgattttggaaagcaaaagggaacccataaattttttaaatatggtattcgtaaaggtttcaccaaggttgagaatgatctaaggatgggttcttgaagtagctgttgggcagccatttgaaaaggaacaaaaaaaagaaagaaaaaaagctttgcacttattatggcttcttggtattgaaattctgcaagtaatggaataggctatagacttatgagttatgagtctttacttttcattagattggctttgcacatttgtgttgcaggtcaggcaatgtttcctacatccatacctacatcactggtttttataagtacaatcagatcaaaagttataataaccctagtttcactgggaacctcgaacttgaggcatgaaatgtaaacaatgaattactgaatgctatttcatatactaattagtctacaatattaacagtttaactattttttttttcacaatttagcaaaccataaacgtatttcatatacaaattagtccaaaatattaacaattagatcacttttcttttacaattaagcaaacaataaatcataaacgagttgatttaagcatttgtatgaatagtagagagacagtcttgtcataatacctacaaaagacctacaaattactgaatcaacacaatcaaaacaatggcatgttacagtcataaaaattataataaatcaataattaacaaaattttaattctattctataactgcagtagcagctaaatatacccagggcgtaaaactctgcatcttaaaactgaatactaatcatatactcattacaggaatcaaattaatacactatataataatatatgacacaatcaacatttagtgttgtttaaaattcaaaaacttagggacatatgcaaatatagaatgtaacagagggttaccctcttaatttctctgctgaaatccgaaagggtggcgaacgccgagaagggaaggatggctgccgttttggttgtccgagaaatgtaaggtggccgtggcgggctggtttcggttgtgggtgtgagtctggaaatgagcgagtgagaaagaggag

SEQ ID NO: 36925 - DNA, 2629 bp, Cannabis sativa
  modified_base (32)..(36): a, c, t, g, unknown or other
aataatctggattacattgaaatagagttttnnnnngggcataaaacccaacatgaacaagttgaataaaagtgtggagggtgaggaatgccacatgtaaggaaaaaacttaacatttcattgataagacaaatgcgtaatgcctgggtacattttctatttctaaaggtcaacttaggtgcctatttaatttagtacaacttattaaagatatacttgccatcactaggagtaccttattcgatcgactgttggaaataggagaattttactttggatgcttaatgtttacgggttgtgggatggagacttctctcaaatgtatcagcttattggtgctaggggtatcacctagcagaccctgtaagggtctaatgagcttccagatgagtgttcactcatttatatttttaagcctttattgccctcctccacgcagatgtatttttctgccctttcgtagaagtcctctagaccatccaactctcttttaatcatgttaacccatagtcccctctcctaaggcatacacctgtaacatgacgatcttgagttcatctttagaaaatttccccactttggtaacttcgtgttcaagcgtcggatgtagctttgtaagtttcttgttctccttgcttcacattggggatacatgtgacgggcataatatactcacatgtagcttgatattgtttgaggaattcttttgaatattattttcaagaagtgattatccttagccttagtcccttaaactacttatatgcaaatcctcttaatgtgatcgtaaaacattgacatttggctttgtttgagactcttttcatttttattagctcattataagcactgagatagtattttggatcagttgtaccatcgtatggcgttattcatagtccttttaaattgggtggaagtggttcaagttgaatctcccttgtgaaagaggattcttcatcaaactcatcatcatccaagtctccctttgaggcgtcagctatcttatgacataagtcttgcatctccgctcccagctccttcatcctttctcgggagttagcaagtgaaacttgggtcctttttgtggttttctaagggcatgtgagatgtaatactcctatcccatcatcatgtgacttctgtctaaggctgaaggataaggcctcacacttgctttgctcttgggaaagggccataggcaaggtgccccctaacataagaccattcttgtgaagtctcttcctaaggttataaggtgttccctttagtgtaccttctcatggtgagtaagctcgggtaatctcaactaacccatagagttcttacctcgtgacaggtgtttcaaagctgaccttgcgggatattatcagcggaggacatggggtttcctcaattaacatatgtagatgagacctcgttcccttgtcggtggcttttgtactggaagcgtgaggctcgggctttgcctttgagttaccactcaacatttttttgcatgtcagccactgcagtttctagcctttggttcttccagcggaggttacttatctcctattcatagtagtgagtttgggagcttgagctaactaagtacacccacttctcctttttgggtccacgtcttgaaatatcatggtcttctagcatagatggtggaatatgttttaccggagatagctctctcaatggctcaatacttatattgatggggttaaccatcaatgtcgtcatcgcctcatcttgtgttgggggctatttttgagcattggcctagaggtcatctctggcgaccggcactggaggttcccttatggcggtgacaaactggttgtcattttggtgaactctattgttttggagacatcaggaatgtctaagcatggtggttggttaatacttagggaaggacatagcctatggacttgcacttcccacagaaggtgtctaattattgactgtaggaactcatcaactatattaaggttggaaaatcaaatgtagatgagagcttagatatgatcgactaaataagttctagaaaaagaagcagcaatggtgaaaaatatttcctgtattagttttaagagcatgagactacaaaacttgattaataaaccccatttaaaataaaaaaaaggggtatttatagggagctctaatgactttaaaatacaagtggttctaaaatataagggaaatagtggaggtgtgttggtctgttgtcaacccgtactgatcatgaggcagatgatgcctacaccacttgtacacattgaatcctttagtacatgcacacacctcctctccacgggctttggcagatgcgtgcttgctttaatggacttgtaccttctttgtatatttttctcttgttcactaagccaacttgacattttgagaatttcactaagtgttgagcttatttgttataggtattttagacttaatttttattaatatttgccccttatcattgtactaaggcggtggtgtgcttgcggatgagaagtacgcacggcaagctgatgaacagttagtcgacaaacggtcagttgacgtgctaccaactaatgaatgaccagttgatgggcagccagctgatgcacgaccaactgacacacggcca

SEQ ID NO: 36926 - DNA, 1124 bp, Cannabis sativa
cctcgaggaggttgttcaatatgattcggccatctaaaaagtatatttttaggatttcggtaaatgagtgtttatcaagtctcaaaactctgcatagttcacgagccacaacagtataacgttgaggagtattgcaaaggaaagaaacgtcgccaaatgagctatatgtttggagtcgtgtacataattcttcggtttcatcaccttcttccttccctacctcctcctacatagtgaaaccataaaaatgcagacattaattgtgttatgaattaatgacaagatcaattttctaataataataataattaggctcatagtcataccaatacaccatggcatactatgtaaagttgatctattacatttccttgctctatgatcacttctcctggtaggaaaaactcctcatggacactgattgcctggaaaatccgaaaataatcgattattgtttcaatttttaagatacaaaattgtttaatgatgaacaaaataagaagtgcagggtattgttagagtcctagactaagtatatgctaatcttttggaagttaattctacttaagaagttgttaaataaccttaaacactagagtatcgataataggtctaaaattgtatttaaaaatatcaaatctaaatatttttatcttgttaaagtaaaaaaccatgagatatatgtttagaatatattctatttcgttgaaagtttctatacatctaccctgcatttctttagacaaaaatctcttctttttctatttacgaatagtaaatattgtttagaacatgaagtgtgaattaaatcaagaattctaaacaaatttgagaaaccatttcttaaggcatctctacaaacagaaatcctattttttttcggatggtaaatattgttcacaacatgaagtgtgaatcaaattaagaactctaaacaaaaatgagaatcaatttacctctattaacttatactcaaaaaaaaacaaatgttatacaagtttaattttttttagttcaataaataatgcaccaatctaacactatcatatcttaattagtctatttgaatagaagacctaacatattttatttaaaattaaagcatgtgggactccatactaaat

SEQ ID NO: 36927 - DNA, 3028 bp, Cannabis sativa
gtcttgctgcttttcttcttgacgttgacttcttcagcatcatccagaaccaaattcatgtactcatcaaaaccctataataccacaaatgaaagctctaaagatcatcatgtgaaagttttgcacaagggtactacaaatatttacaagaagtatctaaaaaatacatgagatagacatgagccaaattatacttgagacttactcagttaatcagacatctatagaagtttgattagaatagttatgtatgactaagggggaaaaaacattttaattcttgcttgataatccaccttatcatgattttatttactataggaatattaagcatatgctagtacaaaacaataaagaatgcattatttcaatttcaatattaggaagagtcttacagaatatgaaacatatgatgacttcataatgcaaataacagtcttaattattaatttacaatcaagaattcaaagccaataagaaaccccattgagatttttcctcatactaattcaattaaatttagagtgacatgcataaatgaaattgtgacagtgtaggaactaggaaatatgcaattatttgcttactaaaacagaagttactaattctacttattgcttatcaaactctaatatggatcattttacagaacaaacaaaagggaaaccagaaagcaaaaagaactaaagctgccaattgcaataagttgaaaatataacaaccaagcttgaattaacttcctttaccctatgtttggtaggagggagagatgggtggatggagaaagatggagggagagtgatggaaggagagactaaatctcttgtttggcaagatggagagaaggaatgagaggagagatctccaaacattgaaaatttcatccctccaatttttggaggattaaagaaaaagacaaaatcaaatttgttaaatacaataattacccttttaatagtaataactatttatgttcaaaatgataattttgtaattttactaattaattttctctccatccttccacaccacacctaataccaaacaacacaaaggaaatcaactatcctctccatccctcccactccccgtcttctctaagctctccatccatcctattcttcctccttcctaccaaacatggccttaaggtccatttgcaacagcagacaaaatcaactaaaattagagaaagtggcttggaaaattgacatggtgatcatatagggaacattcaatttatttatcttcagtctacatttggtacggtaataatattttcagcatataaacaagagacattttttttaacaaaaataacagacagtttactgattctaatctacttggtgctaatctaatcgatcatttaaagatatacaccgaggaattccatcagcaaaaaggacaatcttgagaatttgaaaggtcaagctgcctgtcacctagagtaagtagaaaaattaacaaacgaaaataaagcttaatttaacttcctcaaagttgagccacctatagtaatggtaaaacagatctaaattgttttaattgccttttaatgatgagctaatacaagctcatatgtctaaattatcaatgaccattgtgcttctttcccaatggaaaccatagcctataaataaaatgaactcgttgtataaagttctcgtaatctttctaaaattaggcactctgaccactacaaaatccaaaatcacaagttacattgcttgccaattgcaacatgtctctcaggctttcagccatttactaatatataaatcatgcattgacaaccaactagtcaccaataatttatagtctagaatataaaatggcaggagaattgcatgatagattatgctcaagacgagtttttaggttgcccatcataattttcacagtgcaaaaagaaactacctacactataactaacattccaatgtatgtctagccataaaacaatttcctagtaagttatatattaaaaaaaaaaactaggatccccgcctaaccatacaatatttgggaaccagaaaactatagcaatttctaagttgaatattttgtacaagtcacaacgagaagttattaagttcaaggcatatttttctgtccaagagtaataaattgtcatatatttttctaggctctacatgtctacttaaagtctagcaagaatcgaaactcgattcactttacagcctatgacttatagaaatcttggcactaaaattaacagaaataaacttcgttattcaatagcaatgtttatgaaaaacaaaagatactaccaagtgcataaagagagaacttacaatgatacggccttcgatccttaggtccttctgctcaaaaagccaaatttgaatgcgtgctttctgcaagaataacccacaaaattaaattcaaaaacaaaacctagaaatctaaagtaagcaaggaaaaaaaagtgtgaacgaacttacgctttgaagaaacctaaaaatcaagttctgttagaacaaaaaccaaaatcaaactagttagtgaaactacttaaagaagaacgaaacgctaaaaatgaaaaatgaaaagtagctagaaaagtacaataggttgggtcataatcctctggactttagtgctcgccatggctgctgctgcgaattgaagaagttgagcttcagaaatgtaaaaccctaggttttgagagagagtgagagctcttagcctttccaactatcacggtataaaatgatagtgagatagaatcattattctgtattaaatatatataaaaagatagaatttccatttttgattgtaaaagtaagagaattgaatttagattttcaaagaaattacctgcaaaaatgtgagggaagagacgagtgagagtgggaaagaaactccgagaaagagagagagacttggctcggcttagggtttaagactaattgggctgggttttggcttaggcttgggctttcaactcggcctgggccctaaaagtagaggaattatttcacaaatatacaaaaaaaaa

SEQ ID NO: 36928 - DNA, 4522 bp, Cannabis sativa
ttttttttttttttgaatttatacagaaatttgttgagatcttgggatttttgttttttgaagagaaaagatgaagaggtgtggttatgagcaaaacgtcatgacaggttctgtcgtttgcccaaaaccacgtcgtttgggccattcatttcattccataaacgacaacatcagaccccttagatgccctactaacaagtatgttttcatttttttttaaaaaataatttcttttgaatttttcaatttttttttagtagtaatattaatttcaacattcttttatggttcttctactctgaaatttttaatttttttagagtgaaaatattaaaatattcattttttttttctgttatttgagtggtattattttctttttaattttttcaatttttttagtactaatattaatttccatattttatggttcttctactctgattttttttttttagagtgaaaatattaattttttttttctgtaatttgagtggtattattttcttttttattttttcttccctaaatttagaatttaattttctaaaaaatattaattttttttctgtaattttttagtccttttcaatcagaaggtagagattctcaagcaggaacagaacttcttgatatcattttaaccaaggtaattaactctttctctttaatttaatttgttaaaaaaataatttttatttatgattaagagagtaattaatttaattatattttttccttcatttagaaaaatgggaaaaaaaacaaaaaagggcacaactgtatgatttgatttgatttggggattatcattatgttattttcctaagatgttagtgtcgttttcaacattttcatgtcgttttatgatcttagtgtcgtttttaacattttgatgtcgtttttgttaacaacagggaaataatagtgtagaaatgatagcctcatcaccaccatacttttgtggttcaccaccaagtagagcctcaaaccccttaatccaagacgaacaattcgggaacggcggttatggtgttactaagtccatcttagtaacaccaacgccaccgtctccctctgcccgaacagctgggggctgtgcccgaatgaaattcgggcagaagcctgcagctgttcgaattgaagggttcgattgtttgagcagagacagaagaaattgtagcatctcagctgtggcttaattaaaaaaaggggttttttatttttaatttttttgaccaaaactataaacaaaatcaagttttgtgatttagagaagttaaaaagggcaagtcttttgtaatatttgtgtatataaagaatgagtcttttttctttgttttggtttaaagttttaatctttgaaagattgtaatcatttgtatatgtaattatatggttatgtaatttgatgagggaaagttttattttgaggaataaaattaaagctagaaaaggaagaagaagaagatgatgatgaagaaggtattttttttgagtttaaaaactctttttttttttttttgacttttttccttaataggaagaaagtctttgtaatctaattaagtaaaaattgagtctttgtttgtgttcttatgaatctctccattttgtaatttgtgaagaaatatggagattaatgaggacttttttttaatgaaaaatgtatatttttatatggatttggaattatttataggaattgtgtttttttataaaaattatttttgtaaattatataaaatttgataataaattatactactaaatatcattgtggtaacacttttagatatgttgttttgtaattgattaacgagattatttaaaaattattaaattaaattatatgagatttaatttttagttggattaatagtaatattattatataagaaggagggagttaaaaaatactattggtctcttatttatttattgatataattaatgtttgttcagaaaaagcatgtggtattaaattaaattcaatgttattgaatgaagaaagtataataaaatttatgattaataaatgccatgggaataatagaataatgtattattaatttggtaccactagttttattattctttaataatgtgattatgtgacgttaggggtttggaatttggataaatttaaaaagaaagagccaataaatgtgaagaagaaaaataaaaataataaaaaaaaaatcttctttttcttttttctatttgagatgaagaaaaataaaaaaaataataaaaacattgaacctgtaaattggagtaaatgccaaaaaaatacgtaattaatatctaatttaataaatgcataattttcctccctatcataaatagcatatagtattaattgttggttaaaatgataaattaagcatgaaattaaaaaaaaaaaaaacaaaaaacaaaacaaagaaatttgaaattaattttctttcaacaattaaatttcttttattctaactttgttttatttgcatatatttaggttaaacaattacttagatttgatttctaattttaaaagatgatgtctctagttttcttgcaagcaataaatgatttattttattaatattatcaataaataatacattatacacatttttttttaagaaaagttactgatattattaataaaaataatctattacaacaacagtaaagattggaaaaagaatattttttaactatatagtattttcattcaactgaagagagagcataactagcaagaccacgagcagctcgattagtttctctattaccttcaaataatacaatatatacaaacttaatacatatttagtggaaaaatttaactaatcatatttatttaagacgaaatctacttattatagataaataataacaactaatttcaagtcacacataaaacatggtggtaattacacataattatcatttctcaccaataaaaagccaaatattagtgaaagttatttttcaaagtctttgcctatcttttgtagattagttagtctaattttgattagcacattttgtttaggtgttgcctataaatagatttggataatttatttgccaccaaaaaaattgctttatcatttatttaaatttattatcttcatttaaatccatatgccattttgtttatatttgttattattaatcctttgttcatataattctactatttgttaattctttgttagtttaggtgaatcttgtaattatttaatctaacaattatatatagattaatattacttttaatacttgtgttttataaaacttattcatcgatatcttaattttattaaataataatttagattatatatatatattacaaaatggaaaaacatactcttagaaatcataccacaatcgttagtgttagtaaaaaaaagatagttttaagattaaaaaaagtttgatcaaaattgaattcgaggttttatttgatttgattttgtaaaatacaaaatataaattcttgtataacaaatcaaatttttttagccaactagaatttttactctctaaacttttcaggttgttaaaatttttctcttaactattgagaatattaaatttaagaacttctatcaaattatgtttaattttactaacacaataattattcatatactaaattctaccttaaattttaatatatatcaaatcgtaccacttaaacttaatataaataatttgtacctcttaaattttcatccacataagaattctgttagtaaaattagacaaaaattattaaatctaacaatctcaataattcaaataaaatttataacgatttaaaaagttaaaagattaaaaattttaattaactaaaaaataatatatttacaaaaataaagtataaccatactaattttttttccctttagcaatataatattgacactctttaatattttgatcaatcaactaactaaatttatagtgatttttgtcccattgagtgaacatttcatcacgtggtataaatgaatgatcaacttttttgttattaataatatgtattaataaaagccagccatgttatgataagtgaagcactttacttaataatttatattaaaaataaataaataaataagaatttcttggaagcatcatgggtttggaaattgaaagaaggaatggagctaattgtggggactatttgtttggtagtgtgtgaaaattgggtgtgaattggcttagtacatcatgacctggaggattggattgaattggtactaaactaaaaaaaaagtgtgaaaaaaagtgtgtttaagtagggcccattatgacatatacaacaagttgggcccaaaagccccaaaaagggttatattgggatgactatagggtgaaaaattagcggggagtgtttttcgtctttattcttgttaagggttttaattgggaaatttacactctttactaacttttctctatgtattacaaaaatactgtgacacgcccaaatttacgtttatactgttttttttttttt

SEQ ID NO: 36929 - DNA, 4596 bp, Cannabis sativa
ttcttatagttggtatcatctctttcatactgtggcttagcctacgcccccaccgcccaagatttcacattcacgaattttcggttccgggtttgggccaagataccgggttcgaaaatgcccgaataaccttcaacgcatctgcccgtaactccaatcacaacatagggatacgttatgattcgatggacgggtcggtttactaccgagatcagaagatcgggtcgactccacttataatggaaccgttttaccaggagcctaagagcacaaggctcataaacgctgcgtttagtggggccacgttgaccgtcaacagccagcgatggagggaattcatgaacgatcgtgccaaaggaacggttgtgtttcgtctagaattgacgtccacgattagatttagagtgtcgtcgtgggagagtaagcgccatcggatgtatgccaactgtgatgtggatgtgggccccgatggccttatcttgaaaatttccaaggataggagatgccccgtctatttcgcttgatcattttccacctttttcttgctctcttttgtatttataaattgggtttcaattaatttgtttcatttgctctctaatatgcattcactttgtaatttttttaaatagctatatattattatatataatttctaacttcgatcagactttattttacggtggatagtgataaagaattaaagatgtttctgaacatgaggtgaaaaatcacaaatcacttacttattgtttaattaaagtttctcttttatatctaatttaaattttatcatctattcgttaactagtgtagtaaattttgatcaattaactcgaatattgatcacaattgcatcaagaactagaaatatgtaaaaattagttaaattataatctggtttataaaaatgttgaagaaaataaatgaaatttgtcgagatgaacttattcaaattgagtctatctttgtaaagtaatcgtttcatcatttgtaatcgtattaaatgctttcataagtgacattaggtagtagtagtttcatctaccaattattttggttacatatatatcatgataaccggataatttctatttttttccgggttaatttctaatttttatttagagtacaaatgacaattataataaattaccacttcataattagacgtatgttctctctctttttttttttagggataatcatgaatgttgaattttaacttagtattagtttcccttagtttactttttttcttatatttttcaaatacactatcatcgatcatactacatctacttgtgaactgttcagggaagccaatgttggactttaatataatttaatagctagttgaagtaattaagtgtggaaaaatagatataggagattccaattcccaatatattaaaaaaaataacaatgtatttccacaccaaaattggatatgctggtcacctgtattttcttttttagtgatgagctataaggtatagttataaatatgcttccaaagcttttacacaaacattgtaattagagaaattttcttcatgcaaacaaatggaagataaaaactaaaaagttcctaccaaagtttgcttatgggttttttttcttcactgctagacggtgcataataacttgtcttcgccattcatgaataggaacctacacagtcaattttaagcattgtaacgtacataattagaatatatgatgcagtgaattgggtttgagcatattttgcccttttttttatataaattttgtttttgaaatatgaaagaaagaaatactctgaaaggcttctctttgaaaaatgataaagatcactagagtttttaatttaaaaactagtataaaaactactaacctctcgtaaggtaacatctcaaatagcaatactcttctcttttacatttctatttcgctactggattaaaattaatgctgatagaatagcaaaagggactttcaatagaagaaacttaagataatttgtagatggtgcatagtgattagtgctttctggtatgttaaattgacattaaagcctgagatagtgaattgttctcagcggccaattttctattttcaaaacgagagaaaacatatcttaattaaagtggcttgtttacatattgtgaatgaaattggcttactacttctctgtcaccaaagtacttatgttacatataaaatacttaccgcaggaaagccaccatagtccccaggttctgtaatgtccttagtaacacagcttgcacctgccaaacggacctgcaatagtgatgtggccatagcaagcatgataagatgaaacatttgaaagctttacacgttctctgagtaaaaagaatagacttgggagatggtaagaatgacttgaatacctttgaagcaatagagacatgatctcgaactaagactcttccccccatggtcacgtagtctccaactctatagtaaagaaaacgtgaaacagccaatcaaacttgtagatgttttgaaagcttgaccaagttcttgatgtcatgttggtaggatattaacagaatctacagtaaaatcatcattacttacgttacagaacccgcaattccaacttggccacacagcatgcagcattttccaataactacattgtgagctatctgaaaaaagtaatcagattgcagtcaccaatactagaattctcaattcacaatctacaagaaagcaaatcccaacctgaactaaattatctatctttgagtgatctcctacaaccgtatctctccagctgcacaacagcaggtggtatagttagtaaaaaaaggatgaagaagagaaacggttcagatatggtatgaaaaaaaatacaggtcttacctgcctctgtcaatgcatgagttagcaccaatctccacgttgctacctatcctagcatttagcatctatcggattttttgtaagcagaagaagagagaaaggaaaatcataggacatttcaatttatgatctaagcattgaaccatataatttgaccattaaaacttaataaatgctgttgagaataaggaaacaaataaaacttataattatattttgcaatttgatttagtatcacagcctgaccagccagtctgttgtctgcaatcacatgacctcatcatatgtgcggtcatggagagaagtactttaagcataatgaagaagtgcccaaaattaaagaaataggataatcgactataaacatggaaaatgcagcactgacttgaggtttctttaacatatttccatgctcatctacaagaaacccaaagcctgcaggtgaaatatggtgtacaatatcacaagcaaggaagcagcagctatggtaaacatcttataaatggcttcaagtacattagtttcagcaattaatagttagctcctacaacgtaaaaagataataatgactgttatattaccacataaggttcaagataatttagaaagagtttagtttcctgatttcccagacttgggtacaatttctagactcaagaacttcaacactggtaaagctgataagatagtcctacaacgaaattctctggctcaagcataacaaatcaattttttgctgaaaaagtagtcctttggtggtagcagcagatctcacttcctaaattatgaacacccattagcaataaaaacattaagaacattgatgcacttcaacactggcccgtatacatggagatatgatagtaaacagggaaacaccaaaatagggaaagcataggctaaagataggaattttattgctgaaattagggtggatacaaagaaaatatccaggtggttcttagagagaccgggaaacgtgcctagagctcaaagctcactacattcacacttctctcacccccactctacatttatataacagtttaccaaccaaaaatcactactaacaacccagtcaatcccacacatgatagctgtcctactatagctcttaactctcgtttgaaacactaaaccataaacaaatatcaatgaaggatgctatataaaccaatatgcatgacactggagtttgtaccaattggtggaattgttgaattactaaaattaaaaaaaattccactaaccgcatgatagtgggtgaagcttgtagttaactagttatgtcttaccatcttgcccaatgcacactccattgtggatcacgcacaaatcacctacagtgcaattagaaagtgcaacattgtacctaagaaaaggagcaactttatcatgaacaaagaagcatatatggaaatattgaacttgattgaaagaaaaagttcaaatgatattgttcatttcttgtagtcgaaaagaacactaagaagaaattgtgtgtaccctatctttgttgactgaccaatggtaactgaaggtccaataatagcccctgatccaatatgaacgtgtgcaccaacaacagctttcgaatgaacgacggcgccaatgtctacacttgctgacggatcaatttgggcagacttgtgaaaagtacctccaccattatgccatctttgaaactcgctataattttctcctgcaccatcctctatt

SEQ ID NO: 36930 - DNA, 3243 bp, Cannabis sativa
ttaaaaaaatatgagaaaatgaagtaagcgtaatcaagaacgttatggtaaccacaagaatagtaaccagtaattataaggaaataatcaagtaccttatgatgtttttttcatttattttaacttttttataaaaaattccaataaaatgatttttttgagaaaaagccatatttttgaatacttaatacttttatgaaaatccatcattataataatttacaaatttataaacattttgcaaataatgcttaatacaagatatttttaaattcacagtattattactagtgaacattcaaaattagtaatcttcaaatacaatatatatatataaatatatatatatatacaaaatcaccaatatttgagactgcatatttaattctttttattccttctaatactagctgcacaattttgaaaaaactattgtcaagtggtaaaatataacctattcgagcacacttatcatccatacatgcataaaaaaaacaaaagagatatttgttagaaaagaaaataaatataaaaagtagcaaaattttgttagatgggaagcattaattttgcaacctctccaaattggaaatcagaaaatttatataataataataataataataaaacgtaaaatttactaaattatttctcccctttataaaaaaaataatgatgatgatgatgaaaaagttgtttacgttacaaaacatgtatggtattggtaaatggtgaaaagttaaaagactctccatcaaggaaaagaaacggagaatcgcatgctttgtaaggaagacacgtggcaaagacccagataaccagaaaagcaaaaggtgacacttggcttagagtgttgtcattgatacccatgaactcatatattggcaattaatgtaaaagagaatggttttttggtttggtgagctgtgactgtgtaagaaagtagaggaaacccatgtatgaatatgaaccagtcaaagtagccgttccaaaatcttttgtttgtattgtatatatagatatagatacatatatatacatacacatatatatctagatacatatctcttttctccttccactctttctattccattttttgttataatcacaattagactatcttctcttctcttctgttcagcccaaccactttcaccaacattaattacccacttttcttaatatgtgttcttaatttccaataacaattaatgaaaaaaaaattaccatctttgataataaatttcactctttttttcttccttttaataatctcatcacctttattggattcatattgcataatatccatccttttctttttttttttttttttattttcaaataaaaaaatcacatgtatatgatactatactaataacattaagaccctttctcttctcttatagtcatagaaaccaaaaaggcctcaatataagccgaaataacagtagtaaatatttaagtaaaacctctcttcatcttcactattcactactacatataataataaccttattatatatataatcatatatcactcaaaacaaacaccaacaacaacaacactctcttcttcatcttctttttcttctatggaaaacaacaacaatactactaatcatgatgatgatgctaagagaagtagtaatagtacaagaagtgaagtggtggtggtgatgaacaaggcaacatacatacccttattggtaacaaattttgtgtttttatttgttggttcactctcatcaagcttactatcaaaatactacttcattcacaatgggaaatccatatgggtttccacctgggttcagtgtgccggtttcccactacttttaatacccatttttcttccttactatcttttcaacaccacaacaagaaagcctttcactcgcttcaccccaaatctcctcttcctctccctcctcatcggtctcctcctcggcctcaacaaccttctcttctcttacggaaactcgttcctccccgtctccacctcggccttactcctctcatcccaactcgctttcaccctcgtcctctccgtcctcattgtcaaacaaaaaatcacattctccaatctcaactgcgtagttttgttagtcacgagctcagtgctgttagcactgagctcgagtcacgacaagcctgaaagcacgacacgttcgcagtactttgcaggattcttctgcacggtcggggcagggctcctcttcgccctgtacctccccgtcatggagagagtgtaccgaaaagtgtattgttacgcgatggttatggaaatgcagctcgttatggagctggcggcaaccgccttggccaccgctgggatggccgggaaaggtggtttcgaggatatggtaacggagagccggggcggacccgttgaggggtttgataagggaacgacggcgtattggttaacggttgggtttaatgtggtgacgtggcaactctgttttatgggaacggctgggatggtttttctgacgtcatcattgacaggtggcatttgtatgacggctttgatgactatgaatgtgatcggaggtgtggtggtttacggcgatgagtttggtgggagtaaggctgtctccgccgtacttagtgtttggggattttgttcttatgtttatggaatgtatgtgaagatgaaacaacaacaacaacaaaccttgatttcatcgaatcataattataaccaagaaagtcaacaaaatgaaaatcaatctatggaaatggttgcaaggttgaatgtggatcaaagtgtttaattaataaataataatatataaatggagaaaaagaagaagaggaatagtactagttttattttatatattaattaattttatttagaatgttgatataaattattagattaattattgtgtggtggtgtttggttattgttttgtattgtttgaattaagttagtttctttctttctttatgtaataatgataaagatgattaattatgttattagtgtagtgtatatataattggtaaaaatgaaaagatggagaagacaaaaatggtatttttctttaaatatatattcttaccaaacactaatcattattattagtagagtgttgttattgggtatattagtaatttttagtactttttatatgtagtttttaaattatatgagatttgatacttaattacaccaatagcgatatgacaccgagaagagtactaaattctcttattattattgcaatt

SEQ ID NO: 36931 - DNA, 6006 bp, Cannabis sativa
  modified_base (1393)..(1394): a, c, t, g, unknown or other
gggtctggtccggtccggtccccaccctcgacagtcgatctccaccatgacatcacctcaccctttcttattcttcagctgcccttctcatctacttaatttgatatttaaataaaataaaataattataaattgattttggcttgtacatgtttggtggtactaaaaaaaatacttcctacttactccaacaactttgatatgtctcaatcttaagggacttgttaccaatatattaatgaatgtttcaacaaacttctctataataacatgttataataattaattaaattattgttaaaattatatttatacattttattttattattatgtcccacaacatattaatatacctttattcaatctctttctttctttctaaaacctataattatgtacttagtttcacactaaacacactctaaatagtaaataaaatttaatgctcttcaattttgattatatatgtataaaagtacaatgctatgaatacactaaatttgtagtcaaaattaatacaccataatattgtttttttttttttttaaaaaaaaaaccaattataattttgtgtggcttgaatcttaatcatgggttataattatcaacttatattaatttctagctaaaaatgaaaaaaaaagactctcatttttgcttatgagagaagatgaacatttattattcaataaatcaagtcaaaaaggaagttatagggtctaaaaagaagtaagcctaaaaagaatttcatttaattgtttatgtttaggcctataaacctaattttaataaatgaaatttttctaaatattcatttatttttttttcttaaaaaaacattttattgaaggattccatttttttctttttagagaaaggattccaaacattgatttagataatatccatatcaatattttttctttttccaaaattaaatcttatataacaatccaacaatagttttccaattaaatattaaaaaaaaaactaaaaacaaaagtttgtttcaacaattattgatgattttgtttcaaccattattattaattccctcaaagtttgtttgtttctttatttttttagttaattattacccaaatgaaaacaaaagcccaactacaaccccacataaaaataaaaaagaaaagttttatttacatcatacaaaatgataagtatactttaatattttaaaataattaatttaaaataatttttaaaattagtcttaatattttttcaaaaaaaaatttctcacattattttgtgttaatttcaataattattttcataattttatttttttttctaataaaattttgcataatttttaaattttttattttttgttataatatttaatttataatttatttttatttgatagnnatattttttaagaatatgaattgtgttaaaaaaatttaaaaaaaaactaatataattaaagatatatattttatgtaaaataattttttttaaaatgaagtgcacttataaatttttgggtgcaaataataacataaaggtttataataaagaaaaaaattaggttttttagttcctaaatttatagctatcaaaggctgtcttttttctctggtcaggcccgtcggctttacttgggttgcagcttggtcgggattgtattttgctatagcaattcgatttttgctactgcaattagtcttgtctgtgacatacttgacttttgagtgttttagtcttgtctctctgacatgattttgagtattttagttttatctgtatgacatagttttattttgttttgtttcgttgttggttcttctttgttctttaatggttcgccatcaaattatttttagtggtaataacaagtttttcacgattgaagaggttgttagtagtgtagttacataatagttgagtgctcaagctacgaggttgaatgaacctgttgcaacagtttctactgttgtgtctcctaaacggtggataaaatagaatatatgtatccttaaggttaattgtaatgtcaaaatctgttttatctgattttattttaattcttttgtcaaacaatctagaaattagacgaatgattattttgttcgtttttctaattctattctagttgtgtctcaaacgtgggaaatttttcgatgggacttcaaactattattttagtgagtattgttattagacaatattgctgcccaacaccttttatagattacactataggattggttatcaataaatagtattttttaagttatatgagactccatatttaattacaccaataatgctatgacactaagaaatttgctattttaattgattttcattaaataaaatttcatgatttattttaaaaatatatatatttttatgtaaaataaaaattattaaaatgaaaatttaataattaataaattgtaaaaataaaaataaaaaaaaaaaagaaagagagaaagaaagatagtaacaacaaccataatcaaccgctacagaaagagaaacttagagagagaaacaaagctagagagagaaagactttagagagagaaatctagagagagaaactgagagagagagagtgagaaggacgtaccttccgacatttttctttattctttaagcaaaagcttgaattgaacaacctcaatcttcttcttcttcttctactactactacttcatctcgatcttcattctcctgctagggtttcatttgtttttactttctgctatttatgttctcaatgttctgttgatttgacctctctactaatcaatcaatccttctccaggtacttactatattctcattctgttgtttttttttttttttggatctacgatttgagatatggataatgagaatggttgtggtggagtttgtagttgtagtagtaatagcagtgagtttaattctattgtattgatctcgaatcgttgttttcttttggcagctttgaattagttttcgaaggaaggatcgacaatggtggattctgaaccaattacgcctgggcaggtgtgtgtttgaaaataataataataataataataataaaaaaacagatttagaaattgaaaattttgaatgtggtgaggtttgatttgcaattttggttgaagatctcgtttacttgattgattgagatatttcttaatgatttgaaacttattggtgttgtcaccattgttttttattggcttggtttgaaatttgaatttagtttccgtaaaattggacttgtatgcatctatggaatgtagtgtgtagatttaaagcttgtttgtttagtagatttgttttatgtagatgaacatgatcttagaatggctttccatcaccactccatcattctctttcagtttattttttgtatttttttaagctaagtagcatgaattgtgaaatgagaacactcaattttggttggggaggacaaaagcaaaacaatttctatacctgtagtttgatcatgcatgttttattgccattcaaactatttcgattgctcacaagctagaatcttaactgtgaaccatattacaagcattatgtttgacatgcaaatatgattggtatatataaacttagagctgcatgatctctcatttatggtacaaacttctttttttacaattcatggtgaattggtggaggtttaagctggagtgggtaataaaaacgattcatattttaccatctaatttggttctgaatcagagtgttacagaggctttaacattagaaaaaaacagagtccaacttgtataaaagtttctttatttgcttgagtattgaaactttgaatctgccactccttttgactggttattcaaaaccagtttttgatttgggtttcttgaatttcagttccttattctgatattaatttttatagagcaagtattaattggagatctcattaaatctttttatagtcagaattgattagagtggcgcgactcataattaaccttaaattctacaagcaatataaatacacatgcttagtcactattaaaaattcaatgtcacttagacagttctaaacattcttctctgcctttgaccactgcttattcttcttgactcttttatcttctgcataaacattttaccgtttataatggagattctgttaatgttcccaggtgtcatttttgctgggaatcatcccgatatttgttggatggatatatgcagagtacttggaatataagaaatcttcatctccttacaaagtgtaagtctcttctccttactttatacggcgggcgttggactctatagcttggtgattgtttaagtctatcttatctcttttatccattttgggattattaaaccatagatttttttttgttcacttattttgcttttcccattagatgagactacttagggtgatggaagtgtaaaaatgagagaaatggtaaatgcatctttagcttttatcattatcttgactgatggaggaacaagttatacttggattatttcggtcgttggtatattttgtctgtatttggtatatatattgaattggtttcccattcatcaaattgttttctgtttttaccatgcactccaggcttcatttagagtttgttttatgagttctattggttctctgttatgcattttggttattatgatattgagatctcaacataaaacaagcaaattattggtgtttattctactagaaattcaaaattttcactattaaaaccaaaatgtcgtgattcctgcgtagtaaaaaatgctgatgcttctcctgtattacagtcattcagatactaatctagttgaactaggaggggaggccatcaaagaagatgatcgtgccgttttgttagaaggaggtcttgcaagatcagcatcttcaaagttttatagttcatccatcaaagcaaatttaattaggttatattacacattaaatgttacctctttattgaattcttcaagatagtgttattaaaggtcgttctaagttttttcccctttgcatgaacttctaggtttttgactttggaggactctttcttactagagaatagagcaacacttagagcaatgtaagctgttttgtctctcttctttcttaaagttttagtattgtacttgaagaataataatacaaattttgagaacgtgtgatttttcctaatcaagattgcgatttcatcaggtctgagtttggagcaattctactctatttctacatatctgaccgcacaagtttattgggcgagtctacaaaggtaatttttcctactttttggttttcatgtgtctgaatttctttgtatgtgttattatttaaatgcatgtgcagcatatttgatggataccttctcttctctataaaattcttctgtcaagtatatataaagttaattttctgaaattggcttcttgattggataccatctcgataaagttagttatttatatgactgtcaaaactttattttatgactacttcaaattctcagtatgaattatgatagtatatattaccgataacacctagtctagaagtggcaagccttctatatttctatagtaattccttcattaaatgcggataatgattattcataagatgatgagctcagaagcattttgttgatatattgatattgatcactttttttctctggtttctctctctttgacagaattacaaccgcgacctttttatcttcctctaccttcttctcatcatagtttcagcaatgacttctttgaagaaacacgttgatagatcagcattctctggtaaatccatactgtaccttaaccgtcatcaaactgaggaatggaaggggtggatgcaggtaagaaatcttattaaattcactaactataaatttttagtgaagaaatcagatcctataattttatttgaactataaaaatattcagttctgctgagaactgagcccgcaaacctaggttgctcggatttattgaattcctatcttga

SEQ ID NO: 36932 - DNA, 5564 bp, Cannabis sativa
  modified_base (38)..(38): a, c, t, g, unknown or other
tatgtaccttgtcgttgcgggccctccaaatcgtatcnaccacaatcgaggcatagaggaacaactcatcagtatcaactcctctggatttaagattccataaataaaatactcttaatattttatattttttcacgttattttgtattacttctaataataatttggaaaattctacaatgcacctaaaaatgtacattttttagtccaatatttttttatgtacattatagttatttaagacatcttgcaaaattttaaaaaattcaaaaaaatttaacacgccgataagattgttaattttgggcttctgaaggaacagataaggaagcatattcagagttgaggggttgtttcttatctggagcgggaaataaggtttcgcttaaaattgttatgcaagcattacctaattatgctatgttttttttttttttccattgagtatgtgtgatgagctagagcgtatgatgggtcgttttgggtcaaaatcttcattttttcaaggcaatcgtatatcttggataagctgtgagaggatgtgtttgcctaaggaacaatgtgtgttgggttttaggtgcttgcatgatttaacttagcattacttggtaaacatgtgtgacgtttttttgattcatccaagcactcttgttgggagactttatcaggctcgttacttccctaatagtatattttgactgttgagcttgggcgaaatcctagttttatttggagaactatttttgaagctatgacatgttagaacttgttttaccaggatcttgatttactaacaagtatgtttgattatataaattataatctaacatcttaaaatatgaaattcataaaacgataaataaacacataaaaggaatagaatcctcacattgattgtagcaaaaattagtgactccttccgtttaatcacacaaacccttgattctcgttctgtagcagggtattgcaaagtgatgaacctagattgctttttaaacctgatgagtgacaattctacacaatcttctacaaaaatatgagtactaccttaaatagcgtgagctagtactcaactcactaatggaacaaaattttatagagaatttgagacatgtagtaccaaattttactataaggaaaaagattttcttgaatcacttagaaaattagggttttctattttcgtgttcaggttaatggagttcttatgcaaagatttatcacttttttttatgtaggctctcagtagggttaggtttagattagatgggctaggaaaaatagaatgaaccttaaaatcaaagccttggccaaattacacataaggcccataaattttgatttttaccgttttgtttcttttaatgaaacaattgttctttttttccaatttcgccactaatctaatctaattatttgaataataatttttataattataaataattatcaagcaaaaatataatttaaatatatttatttattagactcacaaaatatcttagttaacaaataaactcttatttctcttttcttttcaaatttgcccaaatttagtgaaaattctcaataagacataatttatttttgaattttaattgaattattaaatcaattaattgagtctacgaggcagtattatcccagacaatgtgggggccatgagcctataagatcaacctcccaatactaagtaaatttcctaaatcattaattcttcctgactcaactatagatttggaatcacactctcgattacatagaacactttatgtaacaaatatacatatgttatgaattctatattgtttcaatataaataataaatgactctctacaaatgatttacatcaaatagggacaaaattactattttacccttctatgtattttatccttaaaacgcttaggtccttataaatgatatttctgtaaactaatataagtacttaaataagatctcttctatttatattgtttttttctcgattacggagattttattaatttctaggtgtattaaatataatatatatgaattattacgtttttcataatttatgctcggtaatagtgaaatatgatgatttggctattagtgtcacaatgatatgatagagtatcttataattagctaagcaagtgttatagacatttagaattttggaattacgtgggataatatttttagactattttacccctaggcattaagataacttaagtgtaaagtaaaagggtatattggttattttaccctaagatttataatagtgaattagtggaatttttagaattctttctaatcagttatatgttgattatttactttagaataaaataaatatgaagggataaattaagaatcaagagatcaaccttctctcactctttatctctttctctcaaatccaaccccaaggcccaaccaagttttaatcttcacagcaattttaagaagaattcatctaggattctaaggaattggttaggaagacaaccatagcttctttttttctttgatttttgaataaaataaacttgtttgaacttgctattttgagatatagcttctgtccgagcttaggatgtttagggattgttttctggattaattttgaactatttgggttttttttggttggttttaagtgaatttcttgtgtgttgagcatgcttgagttttgaaactcaaatcttgctcaacaatagtgaaattcactataggactttgatgttataatttctggatgaattgtgtttacattgatgttattatgtgttctagaggttttgacctgaattggggttaagttgaacttgaagtagaggtttttataatttctgtagaccaaatggtccacaatttcccaagaaacggtgaaccgtttctggcaggaccctaggaaacgatccattgtttggggatccagttcaccggttgtggtattttttgggtgccttgatttttgcattttatcaatatttagggtattgatacattatttattgatagggaaatttctaattttgagtttaagtccacgaaagtgatttagcgagtcacttacaaattttacgtaaattgtgacttagggcctctaattgttgagcagcagtttactctcaggttgactgacacatttgaattcagaatcaaggtaagattagtataatgtatatacatgaatgcaagtttagtgtacatgtttagcgtaaatgttttatgattacctattagataacatattagtaagagcggtattggtgtacatagagttgcattagatactgacagatatatgttgggaaatttatcaagtatgaattgatgttatcacatctgtacgactagagtactgagtataggatgatattatagtcaaacatattgtcgttaagaatgttcaagactaatacgcgttggatgcgggttatagagtgtgattaggtgtatgagcgcctagttacagttcaattttatgtttatgttttatacattttttactgagtttgtcgactcacatattatttacatgtgtaggtaaaggcaaaacaaaggccgagcaatagtaagtttggagcttgttgaggattatacatatctggatggtaaagcctagagtgttccgtcttcaagacagtacgggctcatattatgttattcttcgagcgattcttttgtatatgcaatattttggttatggttgtaaaataaaatgggatcccgaaattatgtaatttttatgtatttagttttagttttcaaaagtttatacttatttgaaaattttaattaattatgtttttcaataaactctttgattagcaaatgagcgcacaataatgagaaaacagtgacttgcctaatctagtatggcgttacaatttggtattagagtcaccaggttatcttctaatgatcgttgagatatttacaatcatcatcagaggcaggctcgactcatggttctatatgcctttatgaattttaatagttttaattagttatgcatgattagaaaagcataaaaggaagcatgatagcagattaagagcatgttaagttctagcttgatcactgcctgactgacctgacttgtgatttcgcagacacgtcctatagaatggacacttataaaaacacaagaggttagggcaatatggtcgaggtcaatggcagtcagggagatcagaatccccttcatcctcgtggccacaacaaaggccgtggaaggacttatagaggtggtcataaaaatccatcacatgctccacaagattgagagtaaaggtttgtagaaatataagccaaaattcagcaacaagatgaggaaatttagaggttgaggcaataaggacctcctattgtacctccaccttaggtgccgattgctttagctctagtgttactagtagaatagtttgttattggtaaccgattggagccacttaatgagagattcacatagtagggacctgtagttatactaggaggccctagtgcgatgaaggtcgaacagtggctaaccaccataaacaaagttttgaattttatgggagtaactgacaatgctaaagtgacttgtgaaacttttcaattccaagaggatgccctggtatggtgggacatggtatcccttacccggaatgtttcaatgattacttggaaagggttttaggattcgttcaatgcaaagtactataatgaggtggtgtgtagcaccaagataagagaatttactcagttgcttgcgaagtgtaagtggcgacaaaaactggtggggtttgtatgggagtgactctaaatgcttgaatataggcatcttccagattgatgataccttgcaccatagacatgaagttgaacaaggtctcagatctctttctttgcatttcgttctatagaaaggagcctatagttaatctagactggagggccacgagcttcatgtcatcactgactttagttttggatgtagcttccatcatttgttggatgaagttcttcagactcttgcctggttatttcttaagattggttaggaaacagacctccatgttgtaatctctagcaaaaataaactatttttggaaggtaaactgtaactattttagtcacgaattgatttggcagacagtctcttccaccaatcctcaatgaatttggttaacatcaatgaagagcaacgacatttgtcatcatcactaactcttgccacttgcatcatatggttgtctttggacagatgagccctacgatctgtccttcccttgtataattccatctgaaacatcttaaaaatttgtggcagcagagtatcgataatctacttgacacacagttttggatcttcatctttcgagtcaaaaatagctccactatgtttgtggaccaagttttttaaagcatcaatttgttcttccaatctcttagtatcaccatccaaaagttcatgtccgcaaattctatcgttattgtggttccaaagatcatttcgtgaggtctcactttttctcctttgaccttttaacgcttggcatcaagtcgtctccgaaggtct

SEQ ID NO: 36933 - DNA, 10110 bp, Cannabis sativa
gataacttaacttccacttgaattgggttttaagtgttgggtgatcatggggtaccagttccagtttggcaagcttggtcgaaaaagagctcatagatggatttttgtggtggtgttagtggctgtaacacatttgttgtttcagtctttcctgttcccatatgggaatgcccttcgctctttgtttcctgagacagaatttcccattaatgtgaaatataatgtgcttagtactgctgttcgttcttcctcttcctccaaatctgtgatggttcggaaccctcttacagtttatgctggaggagaactggggtttgatacaaaagaaaaggaaaatgacatagataataaggagattagctttggcattgatggaacttcttataatgttctggatagatttgtagataacagtcttccattcaaggattctagagattcaaatgtggtgtccacagcacttgtaagcataaaaaatgaggagagtgatcctgtaatggatgatgatgctagcagagatcagctagaattctctgtagagcagattaaggaacaagatactgaaatttctaaggacaatgttgtagtggatggtataagtttggtgcagaaaacaattgatggtggctcaaacactcctttcaaacattctacgcttgtatcctctgcttcggcttcaaacaatatgacatatttaactacctcaacattcagtgaaaacccttctttagcttctgcttccaatcaaagtgatcatcaaattttgaagaacaattctgcaattgttagtgtcccaagaagaaagaagatgaggtgtgacatgcccccaaagtcaataaccacgtttcaggagatgaacctcataatagtaaagcatcgtgccaaatcgcgttcaatggtatgaagatatagactttattgatcaagacatttactttttgtttcttattaacttcgaactaacatgattatggttattgtagagaccaaggtggtcctctgtgcgcgatcgtgacattatggctttgaagccacaaattgagcatgctcctacaacaaatgatcaggacctttatgctcctctatttcgaaatgtttccatgttcaaaaagtaagcaaagtaaccattttcaaccattgctcttagtttcaaacttagttaaattcaatgtgttaaaattagaggatgaataaaagcagtctctttctgaaagttgtttgatgtcaaaaatttgcttaatttttctctaggagttatgagctcatggaacgaaccctcagagtctatgtctacaaggatggcgaaaaacctattttccatcaaccaattttaaaaggattatatgcttcagagggatggtttatgaaactgatggagggaaataggcgttttgtggtaaaggaccctcggagggctcatctgttttatatgccatttagttcacgaatgctagaacacaccctgtacgtaaggaactctcacaatcgaacaaacctgcgccaatatttgaaggagtacacagaaaaaatatctgcaaagtatccttacttcaacagaactggtggagctgatcattttcttgtcgcctgccatgactgggtaagctctttgtttgtgcaactgttgtctatagacaactaatttcatttaactttgaccaattctaacaagatgtaaattggattcttacattacaggctccatatgaaacaaggcaccacatggagcgatgtatgaaggccctttgcaatgctgatgtaactgcaggcttcaagattggaagagatgtatcacttcctgaaacatatgtccggtcagcgaggaaccctctaagagatcttggtggaaagcctccatctcaaaggcacattcttgccttctatgcagggagcttgcatggctacttacgcccgaacttgttgaagtactggaaagataaagaccctgatatgaaaatctttggtcgaatgcctcttggtgttgcaagcaaaatggactacatccagctcatgaaaagcagcaaatactgcctctgccccaaaggttatgaagtgaatagcccaagggtcgtcgaagccatcttttatgaatgtgttccagtgatcatatctgacaattttgtgcctccattttttgatgtcttgaattgggaagcattctctgtagttcttgctgagaaagacattccaaggttgaaagacattttactcgcaataccgaaagacaagtatctggagatgcaatttgcagtcaggaaggctcagaagcattttctatggcatgctaaacccatgaagtatgacctcttccatatgacccttcattcaatttggtacaatagagtttttcagataaaacccagataaaataatgctagtctatgaaagaaaaaatggtttttttttgggtaacatatctgcctgtacatattttgctgtacgatcttgtgaaacacataatatgtttatgaatgtaactgtttaagtctgttacctattgtaatgtcaggaattttatgactctttctctggattactcgaccaatttggctcatatttccattaatcttttttcaggccctttaatcgtcttaggtggtgaagttattcaaaagaagtaaacatggataggattggattagagccaaaagaattttctttattattgtttgttattttttcttactaagcgacaaattctatccaaaatataacattttgaacaaccacgcatgcaactaaaggggggcatcaatcaagtcaccatttttatggaacttatccaatgatgttcttccacgccacccccaaacacagagtaccaacacgacacgtgtccctttcttcaaatttcagcaatccagttccagatcttttggtgggtccataatccattttctgttctttctcaagtttctccctaaagaaagttatagttatagacttaaatgttaacattaaacttggtggttttttcgattaaacaccaataataaatcatgtgattactacttctaggtcggtttttatcttttctgaccatttttaaagagaggaatttgaatctacataccgatgtacgtagatggaataatcttttatttattattaattatttgtgggtgggccatatcagatgtggaaattaaagcaactggataacgatcatcaattgcttcaccatccccttttttctcatgactaaatctataatttgttggttcggttggtacactttcaaaacatttatctttcatgattcaactttaatttattgctttaaagtttaaatttcaatactttcttttcttggaaatgggtttctgattttatttcttgtccccttttcccgctttaagttcgattccgatttggttattggcttctggagactaaaccgtttctgggttttgcagatttgagtgtctctttcattgttgggcttccaagttcagagttggggagctgtatttagtgtaattcattctcttatacctttgtctacaagcacttttctttttgcaaattaatgattagtagcatacctgaatgtgagttagtttgatagtttaaattggttgtttttgtaatgttatatctatgcattttataatctcttgcttcttttggtttttttacttgttactaattgatgggtcttcaaatccaatgagtttgaatataaatatttgtttttgttctgtttgaatgttccaatagtgtttttgcccgtagtgtcatagaaattgttcatattgtatgatcttatggaagctattcatattgtcatagttcttcatattgtataaactgagttcatctttgatatcaactcttgtactcttttagctttaagtttctatttttgtttgcagaagatttgatgggagatgtacacgtgagcaatgaaatatatgaaataccctcagctgtaagtgcaaatagctcatatcatcctttttatcttagggtaaacgtgtttgtttctctctgtgttgatgaatctctcttgacaaatatattagtacctctttgcctaatgagtgatgcacgattgcttttttagttctaatattgatccttgtatcaggctcatgacaatgctgtgaataatacagatgttactgaattcaacttgtcaatagacgacattttcaccagtctgtggacattgactagctgtataggtgaacaattgatgcaatttattggtgagttattggcctgtgatggctgttcatgtatttgtcacaataagatcaattccttcgatatgcaagatgtattgttttcggcaagtcacgaattcacttaaaagtttacccattatctatgttatacttatgcccatgaaacctaattttgctcttattgtgttgggtttgatgatgttattgcagaggatcttgtgctcagagatcttaatagatgcctagagaatttagtgtattattctcctgaacaagattcattagatttgagaaatatatgtgaaacattttctaaaggttcttcctcatcatccaaaccttgttatgactgtacattgcccagacttcgtggaagaagagcccaagaacccagggaagagtttactgtaaatacaagttctgacattgtagaaattattgattattatgcgggttcgcttatcatttttcaagggtaattaaaaatatttacttcttatctataaagctcttgaatggttgaaagtttttgtaattttttagcataagctttaatgcatttgctgatgatcttatttgcatttctttctttggctgaaggttgttgattttccctatattcggattgcagtttgtctggaggttggcattggactcttgtagatgctctttatcttacattagatgtgctgaacttcgtattcgtaggtaaataaaataattcagtctttactcaaattagtgggtttcttatacctattgaagagcgtttgatggctttctttcagctttttattttaggacacgttcttttaactttctaagaattgtgacttatttacttctacaattatttgttgcttaatttagcatctcacgggtcattaaatcctttatctgcagtatcctatctcgaatacggaagacattgcgtggctcttctgatgatataggatggttacagcaaactccaggaatgccttctgtgacagatggtacagcaagatttctggaattgcttgctgaaataaggtgccatttccataataatttgatacttattaactcttcatttaaattcattatatgtatttgagtaatgactttaggagcttaaccattataggtgctttgatagaattcatatggagtttggtttcttcatagttcatcttattattagctgtttgctaacttttagtttaataattattacttgtactcactttaggaatggagagcactccctccctaattcatatgtttatctactaatacctggtacgggaagatccctttgtcacgacatttaacatgactttatctcggctcattgaacatgtaaatttaataacatcttctacaaattttgatttgccaggcctctttagtaaccatggtcctttgtacttcgtgggaactaaaaggttcttttcaaaaatgggtctagcttgccatattgcaaagattcacagtgaggtatcgaatgatttactcttgaataagtgcagattaaacattcccgatttgtcaaatgttttcttgaaccatttgtaattcatcttcactcacattgctttattttttgcatgaaggcgtctgtagagcacaatgcctgggaacttaagcaatacattgaggagctttactggggatctggcaaacccgtgatgcttctaggccacagtaagggtggagttgatgctgcagctgctctatcaatctattggagtgatttgaaggacaaagtggctggtttagcactggtacaaagcccatatggtggcaccccaatagcttctgatactcttcgagaaggccagattgctgacaaggaaaccaggagaattatggagcttttaatatgcaaattgatcaaggtaacaatttcttttctcaaattatttgtctaaaaactcattaattatttatttgtgggggaattggaagggaataaaactggaatttatatgagtagcttttccttagaagaaggaaatgatgtaaatgaaataaacttaattataatttgggtttgtttgatgctaattttggatgtttatgcttttagaccatttttagcctcaggggttatttggtgttcatattattacactataaaatgctatgatttgggttccttgtacccagaaagttcatgggtcaaagctttaatattgcatgagctgcatgctcatgaagagaatgaaacaagcccatctataattcttctaccaaaggatttagtagccactactagggagctatatttgatataatttgatgcattagtgataaacttttctctcttctcttatgtgtatgcatgggatcactcactctgaagctcttggaaaatgacatgaaacttatttggatgttttggaaaattactttcaaactgatctctgtataatttatagggtgacatacgagcactagaggatctgacatatgagaaaaggaaggaatttatcatgaaatacaagctaccagaacaagtccctctaatctctttccacaccgaggctagtacggcccctggtgtccttgctaccatgactcagatagctcatgcagagcttccttggcttcctctcctcaagtttgacaacgaggagtctgatagttttcttcgagcaggacgccaggtgcctgtggtgatgcctatatctgctgccatggctttgtgtgcactccacctgcagctgcgctacggagagaagagtgatggtttggtaacacgtcgagatgctgaagtcccgggttcagttgttgtcaaaccagataggaagcttgaccatgcttggatggtttactcttcttcgaagaagaatcccatggagccagatgcctgtgaaatgtgtgaggctcttttgactctccttgtggagattggcaagaagaagcaagaagaaattggacaaagttgagaaccaagcaattacttcaacataagcaattcttttttctttttttcttttttttacaatattatattgtttggcaaaagatttgttgttttgaaatcagaatcacaaatattttgatatgcaattcatggacttgctttattcttgttgaagttcttggaacaaacaacctgtagatgtgaacctgatttttccttttgacaaacctgttgttttgatttaatactcagatgaaagagagaaaaaaaaagtgtttataatacattgtacgttataattggggtagtagatcaagaagaattactttttcttgtcttgttatagtagatgacccaaaaacatattataatgtaggtaattgtctgttgttacataaaatttactacttaaatatggtcttttgttacataaattctttatagtttttatattttttaggtttgatttatatttctttttcatatattttttttccaagatttacaagcatattatttaaatatcatggtatatttatattaattttattaaaattatttttattttaaagttatgttttttttacggaccattgtggattgttagtatacatattttgttgtacattattattttttgtatgatatattattattattcttacatacatatttattatttttttcttttgtataatagtggtattaattttgttagcataatatatacatttgaatgtatgtatataattttattggcatactacatgttgacagtgaaaacccatcaacgaacttaagaccgaaaaatcaaactttaaactagagacttaaaatgaagataaaagtatagaaattcaaaaacttaaggaaatgcttagagcaacaatagtgggagaggaatgtttgtatttcttagagtcaaaagttacaatgattttccaatctcctctcacatttgggaaagaggtatttataggctttaatggcttgggatacaattgtggtcccaagggacaagatgacatcaatgagctggaggtgtaggtggaggcctcacgccttgtacctttgcttggtattaggtggtcccgagttgcaggggtaatgactgttgtgcatccttggtcgggatgtcaggccttgcaagtgtggtgccttcactactcttacctttttgccttcagaacttgcaggaggtgtgattgtactctccttgcatgcacaccttgtccttgtgatcgtaccccgtttccttcttcttcaatacttacacaaatttcactaagtatagctatgttgttgagaagggcatgtcaagtaacttatggcgcgagtgacatttccccatgcatggctaagttcatgttgagtggctatggaatttttctctaaattttctcatggttacaatggcctttgttgtgaaggggagattttaattaaatcttattcaaccatgagaaaagaggaggggtccctaaaagctcaaagctgatggataattttcgtaatacgttctctggcataggattatttgatatggggtttgatggttctccgttaggctaagaaatgtgggcaaagtggttagattcaggaccgtcttgattatatagtgtgtaataatgttgagtctaatttcttataattctttggtcaagcatcttggtctttggaggtccgatcattgtctgttgcttacttctatcggtaagggtggagatgtggttccagttttctccaaaagcaagaggtttttctttgaaatagcttgggctaatgaagatgactgtagggagttggtgtttgctgtctggaagagtggtgggtgatgttggttcaggtctagagggtattcctcatcgtttcaaatatgcttccaagaatttggctaagtggattatgaatactttcaaacgtaccaagaaagaaatcaaaaagaaaaacgttgagttttccaaatttgaagattttaatactgaagagtcttggaagatgcatcaaaaggtagagaaagagctcaatgtcatagtggagaaggatgataagtattggacgtccaggtttaagccctcttagttgaaggttggtggtcgtaatactttctatttctataattctgcttttgctcgtaagaaaaaaaaattaatcaaggggattttaaatggtatgggtgtttgggtggtgttagactgtggcattgaaaaagagtttattgactattttaatcatctgctcacgtctgattcccctcttatagaagatatgtaaagagtttttgatttggttcatgctaaggtttttcctgagatgtttgatttacttcttgtgcttgttgcggagtcatacgtcaaatatgctctttttcatatgagtccgtataagagtcatggtattgatggtatgggggccgacttctatcagaaattttgggatcttattggtaataacgtgtgtttggatgctttaggggttccaaatggttatgattctttagattgtgtcattgatactactatctgtctgatttcaaagattaaagagcttgactttagacctattttcttatgtaatgtgatttataagatcattaccaagatgatgacgaaccgactatggggggtttcaagtgacgtgattttagaggagagaagtatttttatccctggaagacttatcctgacaatgcaatgattgtttttaaatttctaaaccttatcaaaaggcacacgaaaagaaaaaagggtttcttggctctcaaggctaacatgactaaggcttatgataggatggaatagaacttcatttgtggtatgatgaggagattgggctttcctaaattacgggttttcctggttttcaagtatatctcttctattcggaatctggtcaacattaattgtaatgaccgctctagtaatgtggattagtaaagacaattaacactaatttttattattgtattattatttgtgaattaattttatatgtggaccccaatattta

SEQ ID NO: 36934 - DNA, 7814 bp, Cannabis sativa
  modified_base (7209)..(7229): a, c, t, g, unknown or other
  modified_base (7777)..(7779): a, c, t, g, unknown or other
ctagaaactttccatattaaacattagctactaaaaaatattattttctcatgtaattactaactattttgccaaacaagatattaggaattcatatgtaatactaattaccacctcatatccaaacatacattgcattttaaaatatagtgtaattactacattgtgtaattaccaccttagtaattacacagttacttccaaacgaaccctttagagagagaacgagtgtgtatactcacataataaaaactcgagcattcttattaaacactagtattgtccaacaatttttatacgtgacgtctgctaattagtttgcgataattgatatttaattatatcaataaagatacgacaactagtaaggtgctagatactaatttatttatagttaattaacatttttgcattttaaattttaacatatatcaaatcataagattgttagatttaagaatttttgtctaattttatttaattttactaatttgataattgttcgtgtactaaatcatactctttagattttgatgccggtcaaatcatacttcttaaattttaattttttattcattttaaattttttttactaaaattaaataaaattattaaatttaacaatttccaaattttttgaatggtacatgttaaagttaaagaaatgctaagtagccctcatttatttattttgtatttattataaagtactcaatttattttcttttattaaaagaaaaagaaataaaaataaaaaccaggtagcttagctataataccatttcaccgctaactatggcgttgaatcagtttctctcaaaattgcaatttttctttttctttctaaatatagcgtaataactgtacgcgttatttatgttaatttttttttggttttggtcttcggaagtgagagtttttgagactgcgaagtggtttggtttggggttgggtagggcttttggcttcttctaattcaatggaattggagatttagggttcatttctctatgaattttggaaaatgagttgcttttcttgctttactcgccaccgaaacgattctagcagggttgagattgataattttactcgatcttcaggtttgttcttttttaattttcaaatctctcacccttttggatattttatagtataatttgctgaatgtagctgctttctgtgtttaaatgatgcgatgagtttcaattagtggaagaagaaaatcaaattctgttgatttcggtacaatttttaagcataatcttacaaaattttgaaaattgaaaaaataaaattatggattgattttgtttgcaggtcgaaaggataccggtagcccgaataaatgtgcggcgcgtagcttcacgttcaaggaacttgctgcggccactaggaattttagagaggtgaatttgatcggtgaaggaggatttggtagagttttcaaaggccgattggaaacaaaccaggtatatgtatatataggaataataactggggttttcccaacatttgtaattggattgtttctatcttttatttaatctttggtttctgtagtgtagataagagtaatttttaaagattcgattctcttcagtaaagtacattgtagtttgtgaagtgtgattataatttatattaactaaactgtgtgcgcgtgtgtatgtactaataagattttctaatgtttactattccaaaaaagggttgtgtcaataaaaataactcaatccattattgtcatttggtaaataaaatttgggaagtgaatatgatttgatcagaaatataacataaaaagcatgaaagcatagatgtgttgatcatttgcgaccaagaaattatgagaagataaattttatataaaagttataattattttgtttttccttaccatcgatatacataagggatttgatagtttaacatgatccatgtttttcaattgaactaagttatccatttttggattatcaaatattatttttaatatcctctctaattacatgataatattagacaattctataagttgaattccaatatgtgcgatgtcttattatttatttatttatgttttatgataagcaggtcgttgccattaagcaacttaatcatgacggcctccaggggtttcaggaatttattgttgaggttctaatgttaagcctgctacaccattctaatctcgttaccttaattggctactgcactgatggagatcaaaggctattggtgtacgagtacatgccgatgggtagtttggaagaccatctttttggtaaatctcaccaacttcatgtatggtaaatttctttgaaaagtaagctggtgtaaactaatcacattgagggaagatttgcatgagttttaagatcttaatggttttctttgggcggagtaaaggtactcacatgttatatcaaacaagtttgaatttattttgcttgcatcgttctgttttccaaggcgcataattccctggttttctgtatgcttacctgaggaggtagtaacatattcagtcataataacttagatgacgtgggatgtattggtttgtttcaattattctgcatgtgttaagggtcagacacgccgcccgtctttttatttttctttcccatttcggcattgacccgaattttttgttaagagtagaatgataggtgacattgtttatgaagttactgtaatggtaggttagctcttttctgtgaaagctttatttaactttttttacttggtcagatctcgacgctgaaaagaagccactgagttgggaaactcgaattaaaattgctgttggtgcagcacgtggtattgaatatctccattgcaaagcgaacccaccggttatctatcgtgacttgaaatcagcaaatatcttgctagacaatgactttaacccaaagctctctgactttggtcttgccaaactcggccctgttggtgacaatactcatgtttccaccagagtgatgggcacttatggatactgtgcaccagagtatgccatgagcggcaaattgactctgaaatctgatatttatagctttggtgtagtcttgttggagctcattactggacgaaaggcgatagacatcacaaagagacatggagaacaaaaccttgtttcttgggttggttaactattctcttcgagtcagtaatcatcatttttctcagtagatactttagattccagtactaatttattgtttattttatttttttatggcggaaaatacagtctcgccctttttttaaagaccggacaaagtttgctctacttgtcgatccattgctgcaagggcgattccgtgttcgttgtttgcatcatgcaattgctattacagcaatgtgtctccaagagcagccaacttatcgtcctcacattagtgacattgttgtagctctcgagtacttggcttcgcaaaatgacacatcagagcgacaaagggaggaggtgcataattctgcttcagcatcatcaccttcaaaccagagcagaaaaggcttttcgcggagagcagattacgtaaccagttcagcctcagtttagactttcttttggtgcagttgctgactttgatcaagtaaggcttcaaaatacttttgattggacttaactttactctaatttgaagcaactttaacttcattttggtttatctttcacatcaacttactatttcatgtccaacctattacaccaaattttacactaaaaacacatattttaacaaaaatatttgagattctatttaaagtgaaaatctcaattccgtagctgcaattacacaagaaaaaactagttagggcagcgatcatctttccttcctgttttggtttttggtgattccccatccccgccatgatgtctctcccattaggggcaggacctgtcttcgctgatttttttcagtcatccctaactaattttagtgttcttcaaaagcaaaaaactattttagttattgttttcttctgaaacttttagaatttgattacatgctaactcatgcatcttctttatcgtgttgttgcaggtttatagccactctcaagagaatatatgcatctaagaataattatggtttatataaaaataattttttacttgttagttgtaaatatgttattggggttctgatagtgtggcgttttgatggagcataacttaagcatatttctcaggtaaacataaagagaagtagaagaagaaaacatacaatccatgctcttatatgaaagattgtttaacataagtacttaggaaggaggactacaaagacttattatatacaaaattgagataataccaaatattattttcattttcatttactgtttttgcttgttgacatcttttttttgtttcatttaagaaaattaatttgaattatgttgtgattttttttggggagaaagtgaactgtgaaatgttagctttcacgatggatcatcctagaggcaaaagttaacatttatattagaataacatcaaaataaatataataattgttggaactttgtgaaatattacaaaattgaagtgtgggagtaggagtcccatatgggataaacacttcatttgaagtgtataattagtgcaagtttgagatatgggtttgggcctcaaggggtatccagttttgtgtgtatgggtgaggactcacacatcggaccaccacatgcgtgcactgccgccgtccgatcgtctcgagccggcgtgtgtggtgtcaccatttatttattaaattattatttaattaattaaaacaatttttttaagtttgattaatcagtaaatagaggcttcttaagtttttgtatcgatcccatgttctaacgttcccttcaccacacgctcgtgctgccgtcgtccgaccgtttcgagttggcgggtgtggtgttaccatttatttattaaattattctttaattaattaaaacaattttttttttatgtttgattaatcagtaaacataggctttttgattttttgtatcgattccatgttccaacgttcccttccagtaacgtctttcttcctgttactactttcagcgcattgcctatataatgcgactgaacaatgggagaaaaatatctctttttcactctgaaaaattatacgatatgtacattctattatgttacatatttatattttcgagcagtagttggttttaggtgtagtatttcgacggtactctatcgtgcagtaaagttccgatacaacgacaacctacgctgacacaattggaaacttcaacaaggaaggcacaaaatcaaggatagatcatacaacgatagcttacgccgacacaaggtgaaacctcaacaagaaaggcacaaaatcaacaccacaaaggatagattatagcgtgataatcaccattattacaaacaaaataataataatagaagaaaaaaaaaaaaagcacggcctgtataaaaggggaaagccacaaacaaccaaaaataaaagaacttgacaatgaacaccactaaagaggaaccaccacgtataggagattaaacaacatgagggtgcaatgtcctcggggacaaagctacattgttcctattctgattgcaatcttcatagagtgtctaagtttggaaatcccagaatggaacccaatagggccaataccaaatcattgattaagatcgaggaaggtggaaaactccaaaaagcaagccacaaccaaacatttccactaaacccaatgcaaagggtgaaaaaattgaattctggggtgaagaaaagagaatttaagttcttcaactaaggcataagcacttgtaataggtactttgaagtttttctatttcaataatattgatctgtggattagagtttattaacactcgaatcacgtaaaaatcttaatctcttcttctttattttacttctttcttaagtttatttattttataatcgaatttcaaaattcctcataaaatgttctagtttttatatgtttatatatctttatatgttataatgaatatataacataatttaatattcaaatgaaagcaatctctaataattaaattaattaactaattaaataattatttttataattttaaaataataaatctttagactaattaattaattaattttctagcaacattcttttagtttctttttcggattcgattgatatggttggatatcatcacaacaactttcgtcattacagcatgctcaaccaatcttctcatatccatagatgatggtgccaccgacatcacatccgttacaaccattgtatacatcacaactactacagccatcgtagacatcacagtgccagccaccacttcttccagagttcaatgaaagcaagagatcagatgactttatttctcagttatagaaccaagaactaaaatttaatttgtcttagtaactaatattatatttgtaagaactatttacttttattatgctattgtgttactttgttaacatgaaaaagtttatattttatattaatatttattttatttattattataatcattttttataaattaaatattaatacttttaatattgcaaaaaaaaaaatatatatttttttaattacaaacctctaggggcgactatgttacctttaaaagtcaaaaactgaattctaacacatctttttaggggcgacattttccaggcgaatttttgtcatccttaatacaacttttaagcgcaaattataagagctggcttttatgggacactttattgactctaatactgatttggggcaaatttctatcgttttaggggcaacttgttcactctaatactcataaatgttgtagtgaggtagagagatagattaatatatacttatgaaattactttattatccatataaatatttttttaatcattttttgataatggtgcatatgtaattttgaaatgaattagaatagagagtaaaaatccttcttccatttgtggagggattcaaaatggtaggcctatataaatttttaagggataatatcacaaatacacaaaaataataaaaaaaaaaaattcaaaaatacggtttcacggaatttttaatatttttacgaattttttgattttatttatagaaaataaagtctttttatgttgtattcatgttaatttaatgttgattttttattatctgtatgttatnnnnnnnnnnnnnnnnnnnnntattttcatgttacttttatataaatttcttgttgttatcgtgttgtttttataaaaaatcgtaaaaatgtataaaaacaaatacatttttacatttaatgaattttcaatgctttcacttattctctccttcctaccatcatctttgctaaacaaatagatttttccacccccactacctctctccttccttctctctccatccacccatgtctcccttcttccaaacatactttttttttttttttttaaagattccaaacatacttttattcttatgtttttattatttctaaccaatttccaccaaattcttttagtgtggcaaatcatcatggcatttaaataattaaattctcgtacaatgcatatttatattcttgtatttgtattgcatagcaattttattgtatatatatttatatgaaactcaatttagtacgtaatattagtagtcaaagtgtaaatcaaatcaattattaattaataatttatgggcttttttcataaatgtacaacaaaaataaaataattacaaaaaatgtgcnnnaaaaaattattttaaaaatttatacattttgaaaa

SEQ ID NO: 36935 - DNA, 2065 bp, Cannabis sativa
ataatattaccaaaatgatagaaagttctagatacttgtagagtaggtgttgatctttaacagattagagaagaagaagaataaaaaaaatgtgtggtactttgttaaatgctatcagaaaagcactgccctgcaaatctaagccgtcggatgtatccgacccagagagatcatcttctgtgggatgtctttcaaatctcaaaggcaccaccactaggcacaaggaaagggaatcaaacagcagttcaaaggtacaaagaaaaattagtaccaggtatcccaaaacaaacattgttggcaatgaaatggtcctttataaccctggaccttcaagggaagggaaagctagtaacggtcgcatggttaagagtaagagtaagagggttggtaatggtggtagagctgaaggccctcatatggtgtcacgttttaagatggaaatcccattatttgagcattcaagggaatactgtggtggtaattctagtgtggtttgtcatatatgtggtcagcaacatcagaagtcttctattagtgcgattgactcaaatcctgtgtccaagagatatacaggtatctatatattctctcatcaaccttaggaaattctaaaaagtactatgctattatcacgttttcatgacttttggttttggctaacaattcttcaattgaagttgaaatactatagtatgcgcagttattttattttgttgttttcattaaatgaaaatgttaaattagtagagaacttctggccgtgaatgattgatttgggcaaaataatttattttcatttcatgacaaaaaataaaaaatactgatatcagtcattataattaaccaaatacatttacaaatcttcgtggtagtttctcaaattttccacttttatataactatgttgttaagtactttattttatgttcaccagtaaatgaaggtatattattgtcgtttttgtctcttagtgagcaaactacaggaaggagactcatcgagaaagatagtcgaaataatttgtagaacagggcaagatgagaagcaacatatcaagatggagaccatattgaaagttcacaacatgcaaaacattctgacttggtttgaggactacagagaaatggtcaaaatcaaagcccggaaacatcccaagaaagttgacccgcgttgcctggctgacgggaacgaactactgaggttctacgccaccaacgtcgcttgttcattgggctcctcttcttctggcctatgcctatgcaatcttgacaagtgtggagcttgtcgcattctgagaaatgggttttcggccaacaaagatttcgtgggcagcgttggtatctttgccacttcaactagtgaaagagccttggcttacgtggaagcccattttaataggaggaaagctctgtttgtttgccgagtcattgctgggaaaatccataagtttgatcaagcattttctcattctaggttcgattctttgtcttggaaagttggtcgaaatagggaagctgaagaactgtttgtgctaagtcctaaagctgtgctcccttgctttcttgtcatttgcaaaatctgaaagataaagataaaatagttgaataacaaaaaccgtgcatatcacatatgcattaataattattgagagagaatgtaaaagacaatgtcctttgaactcttttactacaatggtatttaaaaaaaataaaaaaattaagctctttgttgatattactatcttcaaaatggtgagctcttattagttttgcgctcacctaacatcaatcacgtgatatatgcaccaatgggtcaaccacctaacataaattctatggattttgaagaagacactcaatagtttaatagaataataacacccaaaatggattcctttataatgatagaatgtttacttttggaacaaatgcattcgtattgaatttggataaacataatattaaattatcaatattactattatccaatatttatattttgctgtttctcttagtttagttgtataccgattcaaaatattcaaaataatttttgtaatatcatt

SEQ ID NO: 36936 - DNA, 5364 bp, Cannabis sativa
  modified_base (27)..(30): a, c, t, g, unknown or other
gttaaaccaagaaatgccgttagatannnncttttaatatataaagatattggagatgctctaagaattatgaatatcatgagagtcaaagggccattggaagaacgacactgaatttcttggtggctaatagaaattgaaatcgactgattgtgatttcaaccttttggatggcccaccaggtctaattcagcttcttccacgtatttgattcaggtactctagttttgggaaaacatggctcctcgtcaagatccaccaccacacaatatagtacttgaaaatgcaccaattttctaaataaagatgaaactccatcattttacgtgaagaaaaattataatctaaagaattatttatttgtcattattataatctagtaattataataatgacaaataagtttatttcagagtactaccacatgtaaatgctctttaactgttactaagaatatttttagtttagttccttatggagcaggagaaagaatacaaaacatacatatatgctgtccataaagaaataatgaaaatcataagcaaactggtaataactgaaacaaaaagaatcaattatctgtacaagtatctctataaattcatataaatttttattgtttcgtgtcaaactatactagctttcgatctttaggtaagtttacttatattgtacacaatacacacctgaattatcacaacactgtcttacttcagtagtaagatctttttgagatcgtttgagctcaaacttgatccatttcacaaaaaatggctccatgaatccataaccattggtcccaataagcatccagaaagaaccctttcaaactagagccacacattaagagcagacaagtctctttgagctctctagaaaaattccatcaatagcaagatgaacaaatccatttcctagtgaagtttattgtaatcgtcctgcactttggttggaggcgtggggtacatgtcgcttctattcaaaaagaagcattgttctgaaattttttggtggtttgaaatttatagtctggaatctttcccttaagcttttctgaaagcttttgacgggtaatcggtgaaagttccttcaaaagatgtgatactgctgattcatgcttcttcttgagttcatctagctccttttgttgtttcaccaatagtttctcgagtttctcgacaatgattttcatgtatacggaatctgtatcctgtataatttcactaaagatttcagatggagggtctccgttattaggacatatttcttcagcaccggaatttctatcactatgctgatcaaaggatacagcaccgttttgattatctgcatctgtttggctgctgggagacattacactgtcttcgctcatgctactcccagctctaaccaaatctactggagaagacaagtttgaaggaccgggtgtgattggagaatttccaccaagtcctttgggtgaatcagaccaatactttcggcctgaaggtaatctttccaaagcaagacttttgtaagggttacactcacttgctaagggggaaacatcatccttagtttcaggggcacaactatccgaagtaggacattcttcatcagaataatctacagaaagatcctcaggtgtccaatctggaaaattatttcgaatttcagactcaatcatgtcagcaattcctgaaacatcctgatccgtcaggtccaactcctcaaccatttcactagcaactgaaattggggtatcagcttctgtatcaaatggaaagtgaatatttcgaacatgacctggataagaagaaatactattaaagcactcgcacgtaactacatacatgttggctgaaacgaaatgaacttgagaaaagctattaacctgaagagtctgctattctaagtttcaggaatattgtgtttacatctttccggtgaccttccactgtgaagtctatacttgtctcaggaggaaccttgtgcgtctcaaaatcagcccgatgatgactgctttctgcatttgatatgtcagaataatctgactgatgacttctatgcctacgagaacgtgaaacactttcatcttcatctggttggagaaatggatccaacaaaagttccttggcagtcaatcgatcagaggcttctgcaatacacttttctataaataatttaactccaggatctttcacttttgccaatgatgctggctttattccctatagataaaaaagaaagaaaaaacagtaattaacagatgactctggtaattggtacttgataggaataatgatgaatatgcaaaatgaaggccaataaatgacagtgtgggaaaaatttagccctttcttttatttatttttcaaatttataaatcaaatagttttaatactgtctctggaatttagatagaaatattttgttttactgatagagaaaatgatacagcttcaataatcatcaatttagtagaaaattaaacaaaacaatactaaagaacgccatatatgatttctccagtaactaactactttctaaaaccatgcaacactctggttataagcatgcaaattgcatataacactcttgattaacgaataatgaaaattgcaatggtaaaataaatgagcaagagcagaaaataaatcccttactgatgtcactttcttgaaaatttgagcggcattagcgcattcaacatatggatactcaaacgtgaccaactctagcaggcacatgccaaaagcatatatgtctacaagttcattgtattcctcttcataaagctctggtgccataaactccggagttcctagatcacagcaagaaccatgccatcaacagcaaggtcttatgtccaaatataaaaacaatgattcaagtaaccataaagtaatagctagagtaacaaaagaaatcttaccaataacactgtgagcagagcgagcctggcgaagaatggcagccagtcctaagtcacctatctttacctcaccttggtttccattaacaaagatgttgtcacacttgagatctctatgaataacaggtgggtcgtgactatgaagatataagaggccctctaaaatctgcctggaccatttcttcaacgccctcaaatcgacattcttatgtttcttccggtatctgaagtaaaacaaccaattctttcaagatgggcaataacaaaaactcacaaactcttaataaaaaacaagttaaaagggaaacaattaaagtaagactcactgccgtagtgttcctgaagtgaaaatctcagtaataaagttgatatgctcattcttggtatcaacccaagaaaagtaaaactttatgatgttcttgtgtttcaaagtcttaagtaaatgaacttcagaataaagtctttctaaatcttcagagtggcgtaatagatctaccaccttgacctgattccatgctacttcaatgccttccaattcatcaaatgctcgatatcttagttcccacattcccattaaggaaacttaacatatcttcccaagaacaaatcaaaagagtccaaaaaaggactaaattcagcataagattcattatataaactatatattaataaaaaaagagcataataaggatacactttcttgaaagcccctcttcctaaaatctctttatactgcaaaataaccaaattaagagcacccccattaaaataagtaatttaacataaagacagaagcaactaagcaatcaattaattcaaattccactacaatgaaaataagtagtttaacataaagacagaagcatctactacaatacagaatttattaaatcaattttaaaattttggatgaaacgaataaaaacaaaatcaatgggatatatttatatagagaaagtaggtgaagttaaatactgacccgaccgtaccgacccgtgggatcaacctcaacgaactcggcgtcagaatcgtccgggtcttgctctgatgacgattcatgcggcattttaactcttctgaaaacacagagaaaaacccctaatcgaaatgcgaaagcgggagcaatcacacaatcacgtcttgtgtttttttgggaaacggatccagacccgaacccgagaaagtggaaccgaattcgatgatccggattggcaaaaacgacaaagaaaaagaagaataagactaagacgaagacgaagacgaagaagaagaaaaggaagtaaggaaggagcaaaaatggcacgccaaagaaggagtcgactcattcaactgaggagtatgtctctcaaaaggtcaacactggatcatggtagccacgtgggcgctcgagaagggtcccacgttttccggagtcaatgaatgacgtggttagatctggctattcacaattttctttcttcaatattaaaaaaccttattattacacttttgttttggctaaatccaagtgacgaagaggatctagagaataaaatgattgggtttggtcaacgtcgtttttggctcagtcgtcgtgtcgtttttcgatgcttattttagtaagttattgtcgttttttccttcaaaaaaagttattgtcgtttttagttttatgtcggtgtgtggtggttactatagaattagcagctctaagtttaagcatatgtactatctccaagcatggcggtcctcaattttagtggattatataaatgtagtacttttaaaattaataaaatatactcactttttatgggtgaattgtctaatatatcctcactttctacttaagtctagtatataatttacaacgacctaaggagtctaatggtaacatcatctataaaagtatgtatatgttaaagaatatgaaaatgaaagtaaaaattaaaacaagtaaaataaagtgggtatacaatgtaattttctcaaaagattgagttgagtgtttagtaaatataaattttaaagtgatgtaagtttttaagattctactataataatgagaatgttataatctaatttatataatcataaatctatataaaaaattatgttatataaattttttatttttatatatttttaattattttttttcctataatataaatttatacacatttgatctcggccctatgtcacaacaatgacaaaccaataagtgtttatcccaaaacactgcttaatattcacataagacaatctaaggttttctaccaaatctcgcggtataaatacactaaaataaaacttatattttgactctaaaacatataacatattgtaaagctcatcgcaagctttaaacagtatatagaacgtccaaaacggacactcgagtcaaaagttatgacaaaaatacgatttctgatctcctaggaatttctaaaaactatgaaactcgaaaa

SEQ ID NO: 36937 - DNA, 5255 bp, Cannabis sativa
ttttgttatgagttagcccattattattgggcacaagttaactgggcttgatttaaaatgggcccaaatctagttaaatgggccttgaaattaatctctctttttgtagctgtgctatatgttatgttcgtcttcctcagtcagatccgaagactgaaactcattaatggaaaaagcttcttctgcaaaaccgaaccaaatctactcttaactcgatggaaaagcttctgtgaactcaaatcaattgatcttacatctttatcaaatgaggcttttgcagttggctttcttactttctttggcttctggttttgcagtcctcttcatctacatcactggagtctctaatcttcgtatgttgtataaatatatatatatatatcaagtgttttatggataggtaatgtttttgagttgtaattgaattgattgtaaatagatgagagactctcgctttcggatgatgatttggaggctttggaatctttacaaagcggtttccagaagtgtgtggtgagcgtaatttgaatttgaggactaaatattttgtgtgatttgttttgaaacttaattttgttatgagaaatttcaaggttaaatcttttactgcatgaagttgaagtgatcttttagtaatgtgtttctgtggatatatcgtataatgcgtcttgagtttaaaattttattcttgatcattagttttggttctgagttgatttatctatatgttaatctgcttttgaattcagttttgttgagtaatgttttgttcatgtaatttcttgtttggataattgatacagagtgcaaatggattgggattacgggctgtgagtggcaaagactattgtcaagttaaaatgacatttcccagtgataccattccaaaatgggtaaatttctcttgaatttacttaactcatttatgtattgattaacattggtttggttcatgaagtattttaggattttttacatctaatattacttatatacatgcttggttatgttatggttctgtactgagacttatttgattgcttttcgactgacataatttttgttggaaacagaaagatcctaaaactggtgaacttgaaggtgtatcatatgacttcaatatctgtgaagctgtggctacatgggaacaggtgagtttctgcttttattttttgtcatatatatataggatacactgagtccttttgcatgatttctcacttgaattttcttcaatgacatatatgtgaaggattaacaaattgtaaatgcttgtttgagattttcttttatgctttacaattgatttgttattcagtgagttgatccattaggttcggaacagcaccacaatactgaccaaagagttcattgatgctttaccaaatggttgggaggactatgcatggcgtaggataaacaaaggaataaatctgtaagcactctagaacagcggttgagagtttaatgtatggaaggctatgtatgacactactacatttttatttgatgcttatgttttgattcagcaatcgctgtgagaataaaaagttatgcatggagaaactttcattggtactccctgaaacacctccatatattccacgacagtttgcccaatgtgctgttattggaaactctggagatcttttaaaaacaaaatttggaaaggaaatagatacttatgacgctgtatttcgagaaaatggtgcaccaatccaggtgaagctaatgtttaattcatggtggcaaggtttggtgttatgtttactttaagcagctcctttatttacaatttttttattgttctatttgtatatgcagaactatactgatcatgtgggtagaaaaagtacatttcgtcttcttaacagaggatctgccaaagcccttgataaagttatagagttagacggtatagtaatttgtcagttttcatacctaaagtctaatggtttactttccaagaaactgattaacggaattctgcagaatcaaggaaggaggcattgatcgtcaaaacaactattcatgacattatgaacaagatgattcgggtatgtaatgagttttcctattttctgcataagaaatcagagttatatttttcattggagtatacagaatatgtttcatgtattcataatttttttgctggttgaaatgatattagtagaagagaacatttcttgtttggaaagatcacattataaattaaagatatatttccatttacctatagaggatttctgcttcctaagttaaaatatttgaattttttatggttaaaatataaagggttgtaacaagataccaaatcataaggcattattttacacataaatctagttagttatttttcctgattttatgtaatgtggaatctttcactctttttactactttttggtttcatattatgcaggaaattccaataaaaaatcctgtgtatcttatgctgggtgcttcttttggctctgcggcaaaaggaaccgggctcaaggcacttgagtttgctctctctatatgtgactctgtagatatgtatggtttcacagtggacccaggctataaagaatggtgaaaatttcctcccttataccaactagtaaagttcaatgtttgatttacaactttgagaaatactttcctctaaaggagcccattgctattgtttcaggactagatatttctcagaatctcgacaaggtcacactcctttgcacggcagggcatactaccaaatgatggaatgtttgggtgtaagtctttagtagctgctgcttggtattttctaatgattaataaaacatgtatatagagatacctttgtagaagtccctatacataaatattttagatcttatattagttaagattgatatttcctaatcattactatattttttacttgtctatacagttatagtaatattattatttttctttatatcagcttatcaaaattcattctccaatgcgagccaatccaaaccgtgttgtaagatgggtaccagacaaggatacaattagagctgctagaattgcagcggagaaaatattaaggtaactgaacattttattttagttttctcgtgtttgaaaagttaaaattactctcttcattgtgatagggagcaaagattacagaaatttaataatgcatcatttgttagatcatccacatctactacttttagttccacacaacaatgagcgacatggctctatttatagaggcaatcatatcaggaggaatttatgctgttcttgttgctctagatttaatttatggcacaataatgaacgtattctctgctggaaaagcttctaattctttgatcatttagattgcatttggttagaaggaaagaaaacataaaaaataggaatgagaatgggaacaagaataggaataggatggaatgaaatttaaaatatataaaaaaaaaattgataataaaataattttttttttcatcttgcattagaatagtatctccttctatttcaaagaatagtcattccaccaaaattgtgaaaaagtcattacattggaatactttaaaatgcaactaaacaaaagaatagaataaaaaatgattccttttcattccatttcatttcctccaaccaaactcaactttaatgtttaccctttctgattttcagttttgacattttggctatttcagttttggtcgacggccataacattgttgcttgaaacatgaatttgtgttctttgttttcctttgtgtctataggagggccggagcagggtctggagacccgctgggggcatgttcaatcataacgaaacaagttaaaagaaatcacatagaaaaagtgagaaaggctgccgttgatcatcagaaatatgtaggaggcgcaactatgtatcctttggagcataaccctgaacacggtatgctctgcaccgtgccgaaatcataatttgaaagcactggatcaaccttgcaggattagtgaatttttcgatgaagaactggtacaatctaacaaatggatgaaacagaaggtattcattcattttcgaatagcttcaacaactcccccattttttaatacaaattatgagtttttccataccatcaagtcattctagtttagttttcttgtagtcaaggggaaaatataggatgagattattagtttgacttaaatctgcattaaaaaaatatatggaaaaacaattctttttcttttattctagatgtggtttgaagataacagtgtctttttcattcatgtaacattattttccataacagtcataatctcgatatcttttgctgtgttacatgtggtgttgatttaagtccaaaacatttgtatcacatgtcctttaatttctattctagcttttatttcttgtatttcatgccaagtggcttgaggaccaccaattgccttatccagaaacttaacatttggtaatactttgatcctttttatattgctgaaaatttcataacatcaattcaaatgaagataatgacaattcactaatgggacttgaaagactcactatcttatcttctatgtgtccaaattcattctagtttcttttttggcaaaaatttagttgggtttgtgcttaaatctatagttgcttatatttttacttatttggtaatacaaacaatttacagtctctgcataatgaaataaaatagcagtctcatttaactttgagtgctttttagtttagtgccttgtattttattttttatttataattattttttctaaaaaaaaatctattgatatgttgaataggcatgttgaatagtgcctttattatggttccaaattataatcaatgtgtggaaagaattaaaaaataataattgaggatttgaaattgaagtatgagaataataagtttgagcaatgacaacgagtgtttccacatttatgggagggtgtttcttattgggaaacagctgttcataatgagctttatcagtcaaagtgggtgtctaactaaaatagtgaaatatttcttaatctatgtttggtagatgagaaaatgagaggaaattaattttgtaagagaaaagtgaagggagagcaagatttgaagttgttcatagtctctaactctattctccacacactcaaatgcaccttcatttggtttttgaattatgcactagacttataattaaaaactcaataaatatacatattatccttaatgcaacaaataaataaagatatgaagactt

SEQ ID NO: 36938 - DNA, 3471 bp, Cannabis sativa
  modified_base (144)..(144): a, c, t, g, unknown or other
tacatgtattataatttaaaataaaaaaattaatttgacataaataaatttacaaaatatatgtatatattttattaagatgtgtaattattcttatctagaggtataccgtgttaatacgggacttagaaaatgtataactanttacaatttagaggttattcttatatataattggtccaaattgggacttgatttttttataacaaattagagtttattcttgaatagagtattcttaaatagagattctactatatatatattgtttactttcttgcaaaatctttctttggattttacaatatttcattcttttaattacaattttacaaaacattataaaaaacaatatgaaaataacaaaaaaaacttacagcacaacatcataaaaacattacaaaacacatttctaccatatatctctgaaatctttttaaaaaaaagaagttttcatatagtgaaatattagaaatggcttgaataatttagtttgagaggaataagaaaagtcgtaatcaacaagttagggataccataaaaagatacattcaactgataagcaattttttttttttgattaacctgttaacttcaatagattgagaaaagagtacaaagcaacatgcattacaaggaaggtaaagaactattttaaataaactcatcatctaatccaaggcctgatttagcacaattatgagcaatattattctgtattctagggacataagaaactaaaagacctgaactgaaagataatgagtgttgaatactatttaaaacatctccaagaacagacttaagcttactacttattttactaaagtttctctacaaccacttgaaaaccaattacaacaaagcaacatgcatccgaacaagtcgaaccgaatttaaagccaacagaatggctttaaccttagtactgacattattttgagaattagtgaccaccacacttaactaaacttcctttttttgtatcaatagttgcatcagtgttgatttttcaacaatcctaggataactgctgaggacaaagatgagaagatacaaccagccttttcttatccagaagaccttgttgagcatctgcatatgattgtatgcaagtaagagattgtccggtcaaacaggacaaaacaatgtattgtaggcttattataaaaaatataactcctctgattccatatagcctaaaaaaagcaaaaaaatcgagattaagtatccttattaaaattaacagaagcaatatgaataaaatctgaaattttataatgtttattactattataataatcataaaaattagagtacttccaagctttcttagctctagagcattccaaaagagcatgagatatagattcaaatgaaagattacaacaaggacacaaagggagaatagataatatgtctgtggaaaagagagtttgcaaagggatagggtgagacacaactctccaaataaagtgtttactttaggaggggcaaaagaactccaaatattaacccaaaactttttagtatcaataaagaaagagctagaaggattatacctagaagaaagaacaagatggtaggctgatttaacagaaaaattcctagagttatttttgccccaaattaaagcatcattacaattatcactaccaataagaactttcaaaatttcacagtggcttcatcaaagtatctacaaagcatatttaaatcccaagctccagcagaagaaatgaaaaaggaaacataattggaggcagggagtaggtggaagtaaaagatttgtatatactaccagggatctaatgatcatcaagggtctttatcatattaccatcaccaactttccaaattagacccttaaccaataaatctcttccccataaaatacttctccaagagaaagacgaattatgaccaaggacagcttcaagaatggaagagttggaaaaatataaagcttttaagatcatactaagctaagagtaagggtttttaactttacaagtttgtttagctaacatggcttgattgaagtgaaccaaagatctaaacccaagacccccaacaaatttggattgataaagaaatctcctatttttccattgcactttcctagaattcccaaaagaacccactagaatttggacatcacaacttcaatatacctacaaattttaataggcaacataggaaggaatagcttgaatgacgactttcaaaagaacctccttaccaacacgagaaaaccacttattataccacgaatgaataatagaagaaaccttatctttaagaaaagcaaaacattgatatttggatatagtaagacactgaggatgaccaagatatttacaaataaaaggcctgttttcaagattaaaagtgttgaagaaaagagaccgaatatcatcaatcgtattgagggagaacaaaatcgaagatttaacaaagttaacaacctgtcctgaagctctagaataaatggagagggcattcctaagagctagacaagactctctctcagctgaacaaaaaatgaggctatcatcaacaaaaataagatgagtaatagaaatagaaatgcctttaaggtgacccgcctcttgatggactctaagaatagaagaaagaccttcggaacataagataaacatatacgccgataaaagatcaccttgccttaagcccctagtaggtttaatataacccttaacattcccattaacatataaatatatagtagtagtatgatacttcgcatttcaaggagcatttactgccagtcggtaagtggattagcattaccaatccccgtattatccctcagattctgcggaggcacaggcggtgtcggtggattggcttggtcattaccaggctctacatgctcgccggtaagttaggcactaataccacacttacacgcttattgtcttaaccctaactcaaacatattattttttttattaaatgaatatttatcaattaatacactaatcatacttttcatatcacattcattctagatgctcatatatagcctaaaatagaaagcagtaaataagtaatcacataagcagttaagcatttactttcaacacttactgcaccatgagtcgagcttgtatctgacgattattgtacatgttcagctggtctacaagaagttttaaaaccttagtgctctaatcccaaactgtaacgccctagcagttaggcacattacgatttttgataacataacctaatcctgctaaactgagattactagaaataagagcaaaatttaaactttaaattatttacggaataaaaataacacttgtaattatttaaagtttacaaaccatctaaaaagatttcttatgtttcgggatcccataaaaattttcacaaaatattacaagtcaatttttacatgtcgacctaagcaataaaaccgagaatacaaaaatgcaacag

SEQ ID NO: 36939 - DNA, 3293 bp, Cannabis sativa
agttcctggtaaaataacttccaacatatagtatcttccaagaagcccctggacttcataattaaaaatatagtgtgcaaatatggacttccacacaaaatagtgtctgataatggaaagcaattcaatagtgatcaattcaatgatttttgtgccaaacatggagtcatcgaaagcttttttgctgtggctagacctcaagtaaatggacaagtggaaaccgtcaataaaattctgaagaccactttaaaaaagaagcttcaggcttataaagcacactagccataagaacttccaaaagttctttgggcctatagaaacactgaaagagcctatacaggccacactccgtactccgtgacctatggatgtgaggtcataatctagttaaaaccacagtgcctacacatcggagggatccctaaacccaactcaaaaccatgctctacttcaagaatcccttgctttaattgaggagctttgagaacagtcacagttccaactctataagtatcaaacaaaattgccaagaatttcaactctaaagtaaagagtagggaataagtataagagtagggaatattgcccgaaactagaaccttagggaactggaagtaacctactattatacttggaatcaattattacatattaaatagttaatctaggttaacataaaatagaattttaggcttcatggttaacttaggctaacacaactagaatattcagactacttaaataaattaattaattgaggttaattaaatagttaagttcaaaaagctctaagaataagtagtatttatcaagaaaggtttaattctaaagtaattaattagctcaagttaattagttatttgatgttctagagaaacctttctgtgaaaaaactttcaaatatttttctccaaaactaagaaaaatatttaagtctaagtatttaatcaaaaccacaaagattcaggcctttggaactagaacctcatgaggctggaagaaataaccttagcaaattctataggttaaagtgtaaatatctaaggaattaattaaacagtactacgtacttgaaaaccccatagcaagggtatcaaatatcgtctcgacacacaaaaaggtggacccttgtcccccaaaaaagaaaaaatagtaaatataaatttgtttaaggtaggcgatgatggttaaggctgggctagatccttcagcaattgtgcatcatcagttgggacaatagacgagacctctaggattacagagttggtcaaaacaggaacataagaggctggaagagctgagtcatccgtgttctcacctataggaatggtagttccaagatcgaccgcttctgtcttctatgtttcttccttatatcagtccactccttgagtgccaatatcttaggtatcatatctttcctctctttagcatcaaagagatctattacagatttatcatgatgctagatggtgtatactgagtagagaaatgcctgttctagagccttggtctgctcagcttcttgctcttgcttctctaagattgctgctaaagttgtccctttaaatctgagttttcaccctctaactcgatgaccttttttcgagactcttcataggttttcatagatgaattcaatttagtcttaacctcctcagccctttgaatagcctttgcctcacttttttcgccttctgttacaactccagatgatgcttcacctttctctctagagtggtttcattaatgaatttgtcctgaataatattagcctttttattatactctaaagatagggtggtaagttgttggtttttctcttaggcatctatcttggcttgcatcaagttggcttccaagtctttaattttagtaagagctgtggaatgcaagtccttgtacttgtctccacagtccctctctatcctagtcgctttcctttcgcgaatcaaggccttgtccaaagagtcagccaccctttgctttacgatagcttccatcctggcattggcttcagctaaagcattgatagcttgctccctcttcagttttggcattggcatgctccgccctcaacacctcaagcttgtaggccagctgaatgaccatggagcaatttttgcccgccatcaagcccacctacaaaaaagaaaatgcaaatgaatcaaacaattgaaaggtgcaaagtgttcattcaagtcaaaggaaagttaaacttagagcattagtctaggtcctcatagcatcatccacgtatattggatccctgctcgccatcatggaaaacttgtcagctccgagcctacagtgtgtagtagcactcttttccaataggtcagctagaaacggtgacacattagttccaacccaaggatggagcttctctattgtctcaactctgttaatgagaggagggcagcgttcatcccatttgtcatagtcaacaaactcatcattatgtctagaggagatgattttggtcagtttcttcatctcttcgtactcactgctacgcctcttctaatagaattgctcaacgacttctaggcgtatgttatctccttccatcatcgacaaaggtttgataggaagattgaaaggtactagaggcaacaaaggtaatttggtcctctccatggactgttgagtagaagtggctgggataatcttagatgctgagagtggtggagaaggatcctgattgtcccttgatgttttggtgcttcgcctaggcggccttctgccatcaaatacattagcccccttctaggactgagtttctgaagtcggccttcttaaggctaccaattataaaaccttctccttggtctccacccttgccttcttgctagcgccaccttcagaagaggcagaccattttttattgatcgtgatcgacccattgtaattagagttgtcccttccaaagttctcaatagggacctaccttaaaggtgccatgactagaacaggttccgtcagattcatgatggaagtaaacaaggtttctgtgcccgtagtattagaaacaacctccagattcaaagtcagaggtgctggctgctaagatatgctctcggaagcctggctcttcttgcctttgtcactgctttccttggcgatttctcgaaccatgtcagacctggattggatgttacccaagaacctattcagcagccccatttgtaaggtagctggttgatctacacaaaataaacaaaatgtccatcaaacaaggccatagtaaaagatatgatctttacaataaattatcatgcaagacatcaaga

SEQ ID NO: 36940 - DNA, 5206 bp, Cannabis sativa
aaattaaataaataattttgtacacaaatggctcagtaaccagcaaaaatgaatgaactcttcatttgtttgcactttaacttgtattcatgtgaaaacaattatgtacactataaggtattatcattgttcagatataagaaattgtcgtgattcattcttgatgaatattgtggatagctgcaacaacacttttacaatcaaattccatggttttcatccaattctcaaagtctccgatttcctgcaatacaaatcaaactcccaacatattaactataagcacatctatactatttctaacaaagaaaaacaatctgccatgatgcattattatttctgtttcctcctcaccttcaaatgcattatagcttacctatgaaagcatgccaaacggggcactggaaaatctataagcaatcgacactgttgtgaaaattcaaaacacaattacaagtcgcaacaatcttttcacctagcttcaacgttttcagaaagaaagggtgattatcaccagagtgaagtttctactgatattaaactaatacatctttgtcaacagtgtattttgggaagagatggaaatatgatatggaaacttgccatatcgactaattgtcatagaaagattatcaatttgctgagaccctaacttaggtcatctcaaaagtgtcaaaacaataacttttcatgccaacaattttcacaaagttaaacaggtggatttcattcctcaataagaagaaggtacaaaattatagacaagccttaatcctaagtttttgacctcttctcaataaagcactgggaagcattgattcctagttgacccgaaaattgagaattttcactatcaacatgcaaataacaaaacataagctcccaacatataagaaaactgagactaaaaataaagccattgcaatataaaacattaccacaaaaacataatcaccatcataagttttaagctcggattctttatttcaagtttcaacaatagatagacaaagttaacccacaacctatatgagagtatgagactacgagattgacaatacccatacgcttaaagaacttgtatagttcataataataaagaaaaaaaaaactagtacagatgaacaaaatcatgcaatgttagccatacaatgaatatgaaatcaggaaaataatagataataaactcaaaagcgttaccttaacggcgctattaaaagcgtgggtggcagtgagccattgatcggtctgcttcatgaatcgagtaatggtggcagtcaaagccctgatttcaagctcaattcgcttctcgttaacaaagcattcttgaaccccgccatttactgcgtccaccaatagattcgaaaccctagcggcgttcttgatcgcgtccttcttcgccttctctatcatatattttttgagatcacatatttaattaaggggaaaataaacttgaattctgtgacgaaggaattttctgattagggaacacaccattaatttgacgaagtctgagagaggattgatggtgatcgtgaactaattgcagaagagaagattccagtccaccggggtcgacgtcagatgaagatcccacgcgcgtacgcgccgccgcaagaggactaggcgaatacatccccgataatatggtctatctgggagttcgagagagctcaacggagtcaaatgcaaattccttaacggttgcccaacttcttaactaaattccacttttttttttaataaaatctcatcaagcataaaatttatccaattaccaaaattctattacaccaaaaaaaaaaaaaaaaaattaagtgagtgacaatacattaactttttagaataattataaagctattaactatcaactactgcatcatgttctttgatttattttttttcttaaaaattctccaaactattcacaatttggtagagttgattatggtatcggtctcgtctgttaaatattggatccaatctagtggtttctctttgagaccgattattccaactcaggatatccgttacgggaattccttgtctccttacttgtttatcttatgtgcaaatggattgtctgctcttattaatgactatgtacgaaggaggtaggcttaaggttgtaaggttgcttggagtgtgcttgctatctctcatatgttctttacggatgacagttacttgtattgtgagacactagagaatgaggccaatagggtgatgttgttgcttcatagttttgaagtagtttcaggtcagaaggtaaatctagacaagtctttcgttttctttaacaagaatactgatgtttgtatgaaggtccgtgtgtgctctatcttaggtgggatggtaagtttttatctagagctggtaaatggatttcgttgaagacggtggtgcaatctctccccaactatgctatgagcgtttatcttttgcctaaaaaggtgtgtgacaagatggaataattaatgtgttgtctttggtggaagaatttgggtaaaacagtagtggcattcactggatgagttgggaccgaatgtgtgtcctaaaggttcatgggggactttagtttaagaagcttcatgattttaacattgcgttgcttgggaaatagggttggcatcttcattcttgtcaagattctttagttagttgtgtgctccaagcttgttattattctcatgggtcctacctggggctggagtcgggaagcaatccgaattttaaagagaacttatttgtggtttcggatcactctactttggcaaacaaaaggtctctagtcttatgaagattggagagtcgtcttgggatgaagaggttcttaaagatatttttgtagagagggatgtaaacttattttgaccctttgttcccctcaatgtctgatgatatttggcaatggaatggttagagttctggtgtatatttggtcaagagtacgtaattcagcttctttaagagctcaaaggtgagttagttggaattggaaactcggtcttttggaaagagttgtgggatatgagaatgtctcctaatgttaaggatttgatttggagggctgcttccaattgtcttcctgcccgtgtccaattagccgtaaaacatgttcctcttccctcattattctgtccaaggtgcttgcgagttggagagtctatttctcattgtcttgtggggtgcttgtttgtttttgcttgctgacggatggcgggtattttggtgttagagattggtgacaactcttttgggggatggcttcatgatagatttcagtattggggttctaggatgaaacatagagtttttatgcttttctgggcgttgtggtatgtgcgcaatgccaatgtgtggaagggtaagaataagactgttaaagaggtggcttcgttggctaaggataactttgatcaatggagttatgctcaagataaaatttttggtttctctttgttttctttaccaaacggcgaagggcatgagcattggatttcactagttggcaatacgatcaaaatcaatgttgatccaactatcttagcaatcagaataagtatgtgtatggatgggtggcgcagaactcttctggtcagattattatggctcggacagtaaattggatggggatggttgattctgttattgcttaagctatcaaggttaagaaggtgttgagttggttaaaagaaataggacggcatgatgtggtggtggaatcggacagtttagttacgatccaagataaagagtaacacgacctctcttgtaaatgaccatatattcacctctctcaaaccaagtacacactcgatcaatttcatcgcaacaacatgcttaattgcaaaccttaaccaatgtgtcaactgtcaaggacaaaaaatatgcttagaagaaaacaaccctttgaagatctcaccttattcagaagcacaattagagacttcagtatttgacaataagccaccctcataattttttttgtcgtgaacaaactgagcaaatccatgcatgctcctactcaaaatcaccggtttgactgtaaatgcattctaagatatgtgaaaggaaccattggtctaggattaatgttcacactagcaaagacattgagagttgaagcctattgtgactctagttgggcaggttccttaattgatctaatatccataactgggtatgtagtctacattaggggtaacttgatatcttggagcttaaagaagcaaaaatctatatctagatccagtactaaatttgaatgctgagcagttgaaatgtgctactgaacttgtttgcctgcattccttatgtttttagataagagtataaatttagaacacaataatgatatagtgtaacaaaacgggagccaaacaatcagccatcaatcttgtatttcatgcaagatcagaacacatagattttggatgtgcattttattagagaacaaaattaaaaacaaactgctggaaataggagcaaacatcatatatatactcacaaaagcactctcaatagctcaacataggttcttaagacacaagatttggaggatgacacagctgcaaatgattagttggctaatgttcaaatggtttatgatttgtcaaatggttggaagtgtcaatcgcaaggataggttgttaggattatatacgatccagaatattcatcctgcttgtataaattgtattctttagctcattattccttggaacaaaaaaattaatatagcagagaatatacagcaaatttattaccaataaattatgtaagcgtactactaactatatattatgcaagttttaagttgatcatctagagtttttttatgtttctcatcaagtggagattaaatacaaaattaaattattgcagggacttaataaaagtgtctgcttcacacttttgtttataatttgaccaatcattgttcaactatatttatatttaaaaattactcaataaaataaaaacgcaaatggtgcaactcttcccctatcctgtattttatttctatttaattattagagtcattttcataatctagcaggtttcattttctcattcatcaaacttttctaacttgtgtacatatagattagagtgaagcctcactttgtgagaaaacaatctctgctagccactaaccaatctttcctttcaagggggagagaaaaatccaatcatgctt

SEQ ID NO: 36941 - DNA, 5978 bp, Cannabis sativa
ataaatcacttcaaatttcttatattgataactaatcagattgtaaatggttttatttagggcacaaaatccaacaaaatgagtgttgagtttggtaaccagatcagtgatagcagcctcttcacttccagttatcaaaatatcatcaacatacacaagaacaagtgttgttgactgagatgaatgatgaataaacaaggagtgattagactttcaggaaataaaaccaactgaaatcaagttgtgttgtaacttatcaaaccaagctcaggtgcttgtttgaggccatataagaccttattcagtttgcacatcagatgttcttgactgggaatttcaaagcctggtggttgtgtcatgtagacttcttacaaatcaccattaaaaaatgcattgttaacatcaagttgtctcacagcccaacctttggacaaagctagagttaacacaactcttatggtgattggtttaacaatagggctaaaagtttcagtaaaatcaaagcctgcttgttggtgaaatccttttgcgaccaatcgatctttgtgcttgagaacactaccatcgaggttttcttttctcttataaacccatttgcagcctatggcttgtcttactttaggcagtctaactaaacccaagttctatttctagccaaggctagaatctcatcactcatatcattattccaacgctcttgttgaagtgcttcctagagtgatattggttcccttaaggccaagaatgctttcggtttaaacactcccaatttagacctggttgtcatcttgtgtgaattgtttttgccaggagcatatagacagccaatcatgagaggtaatacagtaggagaagaacaagcaggtagaggcctggtatctagtgtgacagacactctctacgatggagaagtgtgtgtagtacgtgtatcagtttgaccagattcaacatattgaggttgtggtgcatcttgtagaataacaggcaaatcagcaataacattgacagttaaatcagcaataacataacaggatcacctacatcaaaggttgagggctggtctggaaaccagctgttagcagtattatcataaggatcaaaattaggtgtaggattatcaagtaaagcattttggtcaattggaactgttaagactgcagcatcaggaatttcagtgtttgagttcatgactggttgaactaaatcagtcattgtgtaaggctatttcaagtgagaacacacaagtgtcaatactaaaataaaggatggaatctctgtggtgttcctagtaacattatgactaggcatttgctcatatgggaaagaaaattcatcaaacaccacatctctagagatgtataatctacctttggaatctaaacacttgtaacctttgtgattaagactgtagcctatgaaagtacatggggcagacctaaactcaagcttgtgtttgttgtaaggtctgatatttggataacatttacaaccaaatgttctaaaggttgtgtaatttggttttgtgttaaataagatttccaaaggtgatttattttgcagcaagggagtaggaagtttgttatgaatatagacagcagccctgaatgcctcgtcttaaaatttgagaggtaaggatgctcgagaaaggagagcaaggccattttcaactatgtgcctatgttttgttttaactaagccattttgttggtgagttgtgggacaagggtgtctatgatggatcccactatcagcaagaaagtttgtaaattatgtgaattcacccccagtctatttgcaaggttttaatagattttcctagttgcaattcaactttagctttaaagtgttgaaaagttttaagtgcatcagatttgtgctttaagagatacaaccaagtaaatcttgagtaagcatccacaaaatagatgtaatatttgtatccattaaatgatggtgtgtgagatggcccccacaaatcagacacaaccaattgtaaaggtttagaaatgacagtagtggaagctttagggaaggggaatttatgaattttcccaaggcaacatgcagaacacactgaaaattgagattctttattagcagtaggcacattacaagatttgagaacagtttggagaaccttcttagagggatgaccaagtctattatgccacaaagtgaaactattttgaacacttgtattacatttaaaatagtttgacacagtggcaggtgtgttatttagattagcaatgaaagtacacttaggcctggattgaatgttggcactgctgctggtttgaagttggtttagctgagagtaattgctggtcataacatggccaggggttaagtagacagggccaatttgggatggatcaaaagtatataggctattcccatcaacaaagtgatatgactcccttcctccttaacataacacaaatcagcatgaaattcaaaatagacattattatctttggaaaatttagcaacactagagtttttgtaattttaggcacatggagtaagttatttatgacaagagagtgagaagcatgctgaggaacaaagaatgattgaccaatatgctttattgacgaacctgtaccatgtcctacatacatttgattctggccaccatagtgtcatagaaatttgcaaggttctaaacttgaggagtacaatgattagtagctctggagttaggataccaatttgcatcatctgaactactgtttgtggcaatattagcttgtggttgttgtatttgctgagatccattactactggtttttgtccctgcttaaggacctgagaaagacttatcaaatcgatagaagcatgtgtgctatgtcaccaaatcgcaaacacaattgacattgcactttatgattcatattcatacttatcccagaccttcccctcgatttgggtaagagttacctctaccacttgaattttgtccagatgagaagccatattcatttccacgactgaagtttctattgccaaactgattcctaaactgactagctccaatgttggattgaaagtttccatgtccaagctattgttgcttgaatcttctccatgcaagattggctcaggtcatagaatcttgatcatcagtgaccaaattagcacttagatccacttctttacccgatttctctattctggatttagatgccaaaagtagagccttgatctctcttacagagtattgttcaacatgagtattggatgagatcacaaatgtgtcatgctcactcgggagcaccttgaaaattgcagcaacatgatcacgatcactcaaggtttctcccacagatgcaagaagattgacattttgctttactttcagtaagtaatcattgaggctcaatatccctttcttgagattctaaagctttgtacgaaattctagaatctcaaagaagacttacagagtgaaatgcttctccagagtagtgcagatatgttgtgtaaaagaagactttctgtcataaatgataacaaccacgaaatcataagttggtcttgaacttcccagtcgatgaaggcttggctgactctattttgggctcaatactcaccagtcaaaaactcagctggtggtggttctttgatgaatttcaggagtcgattccctctaatagcaacaagaacttgttgtttccacagcaagaagttatgatcattaagttaaatcgagatgctgtgattgaaatgcacgggttcttaagggtgagaagctctggtctgagtagcttgagtgttattgaccgttgagccattgttggagatccctacatctccaacagttagcattgagcggaggaaagtgctctgataccatgttaaacctccgagccattgaaccatgaaaccagaaataagaattcaaaggtagaagaacaaagaaagagaaagaaagaaagaacagagaaataatggagaagaaagaatgatctcattgattaaaatatgatacacgatatatatacaacaagtaattgaaccaactaatagaaaacagaaatgaactaactaactaacaattataaccaataactaactgttagttgccttaacaggtggtttatgagcttgaggatgatcttggaaagggtatgtattgatttgtactttttatcttaacatattcaacacctaattcgaacgttagtcgtggcccgcgtagctatttacatagtaacttcattgatgttttggcaataaaacatgtttacatagtaacttaactcatgttttggcccgcgtagccgtggtgattataaaattttaataaaagatgtaactcaccaagttcctttctttattgtaaagatctttttttttttggatgatctccgagagatgtctttatgaacttttgactcttttctaactcatccgggcctccacttgtagatggacatgagcttagcttgtccataagcaatgcaggtggaagattggcatgtgggaagtaaaaataaattgatttttcatctcaatactcaaataaagatttctcaaataataagataatgatgtctgttaaggaacaaaaagtcattaaaattgtatcatctttatgtgcacaggtgtagttggtctaacaccagtgtgagggcaggtaatgtattgatttttgggccttcaatatttgctttggagacaatccggctcgtgttcacttaaatgagaggcaatgtagaactctctactaataaagttttcaaagctgctaaattattctatacctgctctattaaagtttaataagtatttgaagatgacaatagatagagtgtttagatttatgcaactatgaattcttaaaagaaactattgaattagatttgtaatcaaatttgagattatttagttttctctctcactattttagtccttgaattgattgtttgaatttagcatttattgtcgcctttaacaaatattgtcgtttcaaaattagtgtcggattctgaaactattgtcattttaaaattgatgttgttcactaaatatttggtcgtttttatcaacttgtctctttttataaacttatcttattgtttttgcaaatttttttatttcatttgtttttttttgtttttattaatgtcattttcttaaattatcttcctctattgtttttttcaattatttaatatattaatattcagacatagagatcaacattttcatcctaaaatcaacaactaattttgctttaatcgtttattttattgtgttttagttttagcaacaactttttattccactcaaagtagaaagtcaccactaaaccctaacctactatactaatactacaattattagttcattttaggctagttaagaattttgcctatcgaactttaacatttaattatactttttaaatttttcaaatcattaaaatattttccgaattattgagattgttaaatttaacgaatttgattcaattttattgatgggagtatgatgtgtatgaaagtttaagggcacgatttaatacatgtcaaagtttcgcgggggatggaggcatgatatgatagatatcaaaatttaggagacacgatttggtagatgaaaaattgcaacatgtcagtaagtccttgaattcaaaaaactactgaaaaattatcagccaaaaaatagagaatccgcttgtatgcagttccaaaatgaacgatgagtccaaagtacaaacaattcaccattcaaattgctgagtcgatagaagattaagataaagttccactatgctttgctttatttttcatagggtattctatattaatatactttatttaataactagggaatagatccgcgctttgcgtggttttaataattttttaaaatttacattaaatagaaatctcaaatctaatattttttatattttttatgaataatataaaattatataatatatttatgtaaaatttcttttattt

SEQ ID NO: 36942 - DNA, 4584 bp, Cannabis sativa
  modified_base (4297)..(4299): a, c, t, g, unknown or other
tatatatgtatatatacattggtatatgaatatgtacctatactctttatatttggtttgtgtctatttgttttttttttttttttgaaatattttaagatttaaaaattaaattttaaaaaaaaaaaaacttaaaaattcacatattttattcattcattttgaagcaaaactcatgtaaaaaaattagttagaaaataataatgtagaacaactattttggtggacaatcataattaattttttcgccataagtgtgtaataaataattgacatgaaacttttattgcttgtgtaggtttttgaacgctggcatatttgggcacggaacagagtcttgccacactcttcctcactcgtcaaccagagccggcttgcttgttagaattaacacccttctccaaggttactctggcattagatttgagattttggaagccatggcaaagctccttaacaacaatgtcaccccttgtttgccattgcgtggaacaatcactgcatccggtgaccttgttcccttatcttacattgccggtttacttactggtaggccaaactcaaaggcagtgggtcctaacggagaatcccttaccgcaaaggaagccttcaaagttgctgacattaactctagtttctttgagttgcaacctaaggaaggccttgctcttgttaatggcaccgctgttggttccggtgtggcctctactgtcctttttgaggcaaatattctagcagtgttagctgaagtcttgtcagcaatttttgcagaagtgatgcaaggtaagcctgagttcaccgatcacttgactcacaagttgaagcaccatcctggtcaaattgaggctgcagccataatggaacatattttggatggcagttcttacgttaaagaggcaaaaaagcttcacgagatggacccccttcaaaagccaaagcaagatcgctatgctcttaggacatcaccacagtggcttggaccccagatagaagttattagattctcaaccaagtctattgagagagagattaactcagtgaacgacaatcctttgattgatgtttcaagaaacaaagctcttcacggtggcaacttccaagggaccccaatcggagtttccatggacaacacccgtttggctattgcagcaattggtaaactgatgtttgcccaattttctgagcttgtaaatgatttttacaacaatggtttgccttcaaatctctctggtggtcgcaacccaagtttggattatggtttcaagggagctgaaattgccatggcctcttattgttctgagcttcaatatcttgcgaatccagtgactagccatgtccaaagtgctgagcaacacaaccaagatgtgaactctctaggattgatatcatcaaggaagagtgctgagtctattgagattctcaagctcatgtctaccacatttttggtggctctttgccaagccattgacttgagacatttggaggagaatttgaggcacacagttaaaaagacagtgagtctagttgctaagaaagttctgacttccgcagtcagtggtgaactccatccttcaaggttttgcgaagctgatctacttaaagtggtagacagggaatatgtctttgcctacattgatgatccatgtagtgcaacctatccattgatgcaaaagctacgacaagtactagtcgaacaagctttggttaatggtgaaactgaaaagaatccaaacacttctatctttcaaaagattggagcttttgaagaggaattgaagatcatattgcctaaagaggttgagagttcaagggttgctcttgaaagcgggaatccaaccttaacaaacaagattaaggattgcaggtcttatcctttatacaagtttgtgagagataatttggaaacagatttgctatcaggagagaatgttagatcaccaggagaagagtttgacaaagtgttcactgccatgtgccaaggaaagattattgatcccttgttggaatgtcttagcaactggaatggtaccccacttccgttgtgttaattatttcttatacttcgattgtccttttcccttttttattatatatatatgtccataaatgttgcttgagttgcaacaaggtgactgagctaagagttgtaaaacaatatttgaacttgcttttattatttgatatattttataatattaactacaatcagtttcaaactcatgatgcatatgatgtatcatttgatactgaagttcattgttctacatttgaccacattttatggtagccattatattatataatagagttatattgaaccatttaataaaacaagggattataatggaaaatctctctatataattttctttggcagtcaactaccttgtacaaaatttggcaacaaatatacttagtgaattttattgtagttaactatatatgtggaataatttttaatgggtattacttaatgggtaataaataaatttaactataaatattaattttaaaaatattaaatcattagattttggtcaatagcgaataataaaagagaaatttgatttctatggttaatttagctacttaattaaagaaaatatcaaaaaataccaatttttacactatatcaaaaatatgtttatatgaaaaaatgttcaagtcaaattcaactttttttatcacttttttgccgaaaaacttttttttaattattttttttcagctgatagaccaatcacagcccatataatgtaaaaataaaaaacaattctaattaaaaagaaaataatcataaaaactcaaaattttctaatattacccattcataggtaatacccattaaaagtgcaccatatatataattgacagcaaaaagtacccacatacatttatttttttgcaattaaatatttatgtaaaaataatttaaattaaaaacctaatttacaaaatacccattttagaacactttttaagatatgcatgttcttaattttgctcgtggagctttaagaacatacaatgattgttcttaggtggcatttgcttggaggtaatgaaaagaatagaatggaaagtaaataatttttattccattcatttgtttggttgcattttaaagtattagaatggcattctaatggaattttctttccaccatttgggtcgaatgactattccattttaaaagggaaggaaagaccattttaatgtaacaagagaaaaaatataatgatttttttatcaattttttttatgcatttaattttttttttttttttatcaagaaggaaaaaacttcattaatcaactcaacacaatacaaccaaatgaacttctccaaagagaagcaacaaaaacaacaaacaattaattacatatcaatctttggattaagttttcctccactcttgtcccttttctatcttttatcaagtataacctatatgtcacgtcacttttaattttgttcactatactattaacaaaattagagtaaagagaaaataagcaattgtttcgattcctctaaagatgataaatcatggctgccaacacaatcagtcttattatgtccaaaagcttcggtctcgtactacacagccatgtgttctaactttgaatttttttggaccacccttcaaaacccagccattgaaagattgcattagccacctggtttgacagattacagtagaaaaaaaggtggttgtggctctcgggttctgcctcacacaccacacaattcaagtttgcaacctgaatattgaacctgcttaacttgtcccttgttagcagccttgagtgagcagtttgccatagctgaaatgcatgtttcagaacattcaaactgctattctattccattttaaatttttattctatttcatttctattcttattctcactcctatttctattcttatattttcattcctcccaaccaaacgccacctaaggaattcattaagaacacatgtgcgtgtctttattaatacagtgagttcttcaaaagaattaagaatggcgtgcttaaaacaagtgtgtgcgcctaattccaacattataatttgaatcttttgaaaaaagttttaaggagttattttgctagttcattactacagaaaatagttaccttcagggaaaattttttagtcacaacataaatttttgtgattaattaaatgtgactttagtcacaacaaaagttacttgtaactaaaacatagtatttagatacaagttatcactaatttagttttagtgacaataagtattgtgactaaaaatnnntttagtcacaacaaattgtagtttttgtgactaatactttaagtcacggactttttagtcacaacataataatgataatttataattagccaaaaaaaaaatgtctttagttacaaattttagtgtgactaaaagtaaaaaaatttgtcgtgcatatgtattaaaattaaaacatattttttttaaaaattcgaataaagaaataaagaagtaataaaaaatctaaacttgatacataatttttgacaagggtatcctccacgctctcttttttttttttttttt

SEQ ID NO: 36943 - DNA, 5319 bp, Cannabis sativa
  modified_base (5076)..(5079): a, c, t, g, unknown or other
atcataaattaaatggtaaagtcatttacaataacagagtttataagcgaacatttcgaccaaaaacaagcctcatccaccccaaagaaaacttagccaagtcgccagcagccatattagctgaacgtttgacgtgagaaatatttacattagggaaaaagaataaaagactagaaatattaacaattaaatattgaaaagaaaaaattgtgatgaagatttgcataaagcattaaaaacccgaagagcattcgtttcaatttgtgttacaggcaattgaagttgaagagcccagtttaggctgtgaaacattgcaattgcctccatttcatgggattcaaaacatccaacaactgctttgatagcgttgctgcaaccgtgccattagagtggcgaattaaagctccaatactatttatttttctgttcaggtgttgtcgactgctgcatcgacattcattttgagcattccaggtggtggaggggtccacagtatcggattagcagcagtagaagacgacagtgaggatattgtaggagtagtaggctgattggaggctgttgaagttggacaatattttagttgagcatttttgtaattctgccagtaattcatagtaaagaaagcaagatctttgtctgattttgctttatgaccatgaactacacggtttctctcattccaaatcatccatagaatacaacaaatttgttctatctccaactttgtgaaaattgcagccaaatgtaccaagtaatctcctttgtgcattgtcatagtattattccaatcgagggtaatgtttgaatgtcgccaaacggattgagcatacttgcaaccgaagagggcatgtcctatggtttcccaggcttgatgacaaatggaacaagttgaatctgtgattatcttcctcttaacaagagttgttgcaacagggagatcatcgttatagacacgccaaataaagatcttaatcttttgggctaacttcagcaaccataaaaaattccaccagtctgccatagatgaagagcatgagctgctgtcaatttcttcaagcgatgcagctaaatggtagcgcgtttgaactgagtatataccggaggagctgggatgccaaataagggtgtcttcattgcaaaaaaactcaggggaatcgttaagatgcaatccacatcaggtggtgaaaaccattgatcaagcatagccaaatcccattatctttcatcattgataaggttcgaaacgaccatattagaaggtccagaaaagtggtatggacgaaagctagaatgtcttgggatccatgggtcatcagcacaattaattctgcatccttctcctattttccatcttagaccagcagtgagtaggcttctaccccaatggatgccttgccatgttaatgagggagagtgattgagattagcttgaaggaaggagttgtttgtctaacaactttgcaagtaaggagtcaagttgctttagtagcctccaagcctgcttagctagcattgcttggttaaaatgcataaaagaacgaaaccccataccaccactatctttccttttacataatagtttccaagagcgccaatgaaccttgttgccattctcatttaaaccccaccaaaaattggccatcatagactcaagttggttgcaaaagtaagcgggtagacggaagcaacgcataacataagttggaatggattggactaccgctttgagaagcacttcacgaccgctagcagagaagattttctcactccaagtgtccataagtcgccatattttctccttaacgtcactaaacattcgctttttatctcccccagagtaagatggcaaacccaaatatctttcatgacattcacagattggcattgatagctgtcggtggaagaaaacctgggcaaaaagcgttgtgttgggtgagaaagacataacaaacttatccgggttgagaacttggcctgaggctctgtgataaacatccaaatatctcttaattgcaaggcaagaagactcatttgcttgatagaaaaggaggctgtcatttgcaaaaaacaagtgagaaattgatggagcatggcgtgttaacttgaacccatttagatgaccacttgtttcttcatgttgtaccagtcttgataagccctcagaacaaattaggaacaagtatggcgagagtggacaaccttgccgtagccctcttgatggaataagtgatcccgtaacctcaccattcaaaagaaaggagaagttattagtacgcaagcagctcataataagtgcagtccattcactagaaaaacccatcttcctcatgacttcctcaatgaatctccattcaacgcggtcaaaagctttactcatgtccaatttcaaggatgcaacaccttttcgccctgaagttttgttcttgaaagcattgactaactcaaaagctacaggaatattgtcagtgattaatagatttggcaagaaggcactttgtgtttttgagatgacataaggaaggacatgtttgaagcggttgacaagcactttggctataagcttggagataacattacaaagactgattgggcgaaaatcttgcagacgctgaggtttttcgatcttgggaataagagtaataagtgttttgtttaaacttgtagaatcgactccttcatttaaaacacttaagacgactgctgttattaaattaccaaccacaacccaattttgttggtagaacattggagacataccatcaataccgggactcttgtttgatgccattgagtgcaacgctaattcaacttcagcagcttcaaacggtttgagaagttcagtattcatctcttgagtgatcgttgttggaatgacatttaaagtggtaacaagagcatcctcatctatagttgaagcaataaaaatcgaggcaaaataatcatgaatagcagctgccatttcagttttataagtgaaccgaatgtcagcctcattatgccgaaactttatagtgttatttattttccttgccgaggccttagcatgaaagaacttcgtattgcgatcccctgaatttaaccaatcaacctgagagcgttgctgccaatagatttatcgatatgctatctttgtaaattggaagcacactcctctaaattagcaagtacaacattaatgggatcagtaaccgatgtagtgttccagctagcagaaataatgtctttactttgtacatcataaagccataatttttcaaagcggaaccgacttcgtcgtttttcttactgatgccgtgtgtttacaggtgtaaatgtagcagaaatggctttgtggtccgagcaaaagtaatcgagatgatggactagaggtgcattaaataagttctcctaaagatggttcacaaaacaccaatctagtcgctcctaactgtgcttacacctgaacgatttttgatccatgtataggggtcaccttcaaaagaggtttgatgtaacttgcaatgatctaatggcttacgaaaagcttccatttgtcttccatttctgaggcagccgcctgatttattcattggagaggatctcattaaaatcaccaattgcaaactatggtagagaagggaaaacatcagcaagcctttgtaaaagaagccaagaatcagccttgttctaagcatccagagcaccataaaaagctgttaggtggaaactagcttcattttcagccttgacatgacaatcaaaaaaagttttaccaaaattcagaagagtaacatcaatactttgatgccaaagaaacatcaaaccgccattaagaccagaccgtcgtgatttcaggccattattgaagtttaaggattgtcgaaaacgtgaaatagaatttggtggaagttttgttttcataagaaacaaactatggggcgattgttgtttgacaagcaatcgaagatgcctgaatgcacacgggttccccaatccctgcgcattccaactcaagattttcataatgtattgcgagattacaaaacaatctccgcaaaattgtcaatgaagccatctgaatccataccatcataggaaacattttggcttgagctttctcccaaagacaatgaagtaggtgcataattgttttggttacgacatcgtttgaggaactgtctcattgtgagtgtgtcacagtgtctcttaatgacgggcataggcgggacattttctttgttactaacagcagtgacaattgaaggagaagtaacagtagcagtggcagtaacatgttcaacaaaggtgtaagtaggtttaagtgaagatggtgttaaagttggtggatatgtcgccacagggtaaaaaggtcgagttgcagtcccaatatcttgcgtaaagatcccagatagatttgtgactggttgggtaatgtcggcttgcacatcagagggtggttgtgatgttggctgggtaaaggatggagaaaaaagagcagtggagaggcctaaagtgtatcgagtttgaggcaggtgtggaagtgaataggagatgtttgaatgtacacttaagggtattctactgcctagcgttgtatggtttgttaagcggtaaataactatttggtatcttgtatttttcaaaatacaaatttagtacttgatatttttaatagtgatattttggtaccttctatttataaattctacatatttcgtactatttttttgaatttagtagacacaaatttttatgactagattatctctcatttaaatattttatatgattttaaatatttttaactattatatgatttaataaataaaaactaattcgattcaacttttacttttatccatctaaaataaatttatttttatctttgttgttcttttctttattcctcccagtttagatatacaatagacagaccaaggctaatatattttagggaattttacatcacatattgaaatttctaacttttttacttttttaatgtagggtggaatttttttcaaaaatactgtgtaagttttatactgtatactgtattaagttttcatggttgttccacagttattttttagnnnntccactgttgttttaattattttgttttgttgttttataaaaagacagtatttttgtaaaaatttctatgacagtaaaattgtcaatttttactcaaaatccagtatttttgtaaaaactccaatattatttgagttagcccaaagataaagatgagaatcccaatcatttatccttccaaaggcataggggctatttacaaaaatatggaaaaaaaaagataagttttgatatatatgg

SEQ ID NO: 36944 - DNA, 4217 bp, Cannabis sativa
  modified_base (45)..(66): a, c, t, g, unknown or other
ttgttagagatatgtgggtaagatattttttttaatttaaaaaannnnnnnnnnnnnnnnnnnnnntaattattgggtttatttatttgttaacgtttaacgttaaagtgtgttaagttaatcggtaaggctaaataaaaaaagaatcgtaaataggcaattttaatatataaagatatatatatataaaattagaatttttaattgagtggaccctagacacatgcttgatttgttttagcccatgattgttatttagatttaatgtatttttacgagtacacatgtgttttaatttgaattaagtacgtagaaatataataattttgagaaataataaaacaaaatatatctatatgaattcgcaaaaaacgggtttctgaattaattgggtagacttaaagtacaagtctaatctactttagcccaagattggtaagatttaatgtgagtgcatatactttaatttaaattaaatatgtaatacttaattacactaataataatatatattatatatgtcagatgacaaaagatattaaattcttttaaatttacgaaaacaaataaaatatctattataactacaatatacaaagtcacataaatttttttagttataatttcattaagcatgctaaatatatagacatttccgacaaaattactataaaaattttcaatatagaattttcttatatatatacataggcggatctacatagagtccaaagaagatttaagtccaccctcaaatttcttcaaaacataatataaaattagatatataaacaatgcataattattaaacaacataattggtataagtatttgttggttagttggtagatttatctgatttccttcagctctatcttcaatttttatttatgtataaatttactcttttttaaaagtatattaatataaagcatttaaactacaaataacttttcattttaaaaaaaaaaaactattatgttaataaattattttgaattgtgtttaatctataattaacacaagtttccacataaaaaaaaaacaaaaacaagaattataaaatctcatataattatttagatgctaaaatttattccaacctatataataatttaattcaaaatttaagtaaaaaaaatatatattattttaaattttagtacaaattttagttagcccaccttaaaattatattttgagtccaccactatacatgtgtgatgtatatatttatgataatgtgtagggaataggtttgctatcactatcttcatggctattcttaattaaaccaagaggttgtggtgatagagatacaaaatgtgaacccacatcaacatttggcatagtcatattctatgcagccatatatttagtggcctttggctatggtggacaccaacccactttagcaacctttggagctgaccaatttgacacttcaaaagaaaaagaaaatgttaagaacaacaaagcttcatacttttgttgtttttacttctcattaaatcttggttcacttttctcaaacactattttggtctattttgaagatattggtaaatggagtttgggatttactctctcttttctctcagctcttatagctttggtttcttacttgtgtggttctagtggttatgtgtatgttaaaccgtgtggaaaccctattccacgtgtcgcgcaagtatttgttgcagctgctaagaagtgggatcttgagaaagttcgtgaagaggagttgtatgaggttcaaggtcctcaatctgccattaaaggaagtagaaagatttttcacagcaatgagatttcgtaagtttgttcattttcttcttagtcacgcaaaattaattttgctaaatattgtcattttcttacaatttattatattataatgtgatttcgtaaaataatatttttattattaaacatgataaatatataaaaaaaaaatgttataattttgcaaaaaattatcaaaagagattattatgatgaaaacaaatttttttgttaagaatacataattaacattttttttttatgaaattagtcacaaaattcatataatttaaatataataataaaatttgtagtattgtagttagctataggtcacaatatattaagttaacaaaatttccttacattaattgagaaaaatcatctttgtttgaataatatcccaagtcaattttttctttattaataaatataaattatatattactaaattattgttaaaaattattcagatttttagacaaagcagcaactttaactgaggaagatctaagaggccccaagaattcatggagaatttgcacagtaacacaagtagaggaagcaaaatgtgttttgaaaatgttacccatatggctttgcaccataatatactcagttgtgtttacacaaatggcttccctctttgtagaacaaggtgatgtaatgagaacacaagttggaagctttcacatcccggctgctagtatgtcagcttttgacatcttcagtgtcctcatatgcactggaatctatcgtcgagtccttatccccatagctggaaggctaagtggaaaccctaaaggcttaactgagcttcaaagaatgggagtagggttagtgatagggatgtttgcgatgttagtggcaggtataacagaaatagagaggcttagacatgtcacacccagtgagaagaagagctctaaaagcatattatggcaaataccacaatatgttttggttggtgcttccgaagtttttatgtatgttgggcaacttgaattttttaatgaacaatccccagatgggattaagagctttggtagctcactttgtatggcctctatctctcttgggaattatgtgagtagcttgcttgttaacatggttatgggaatcacaactaaaggtgaaaagaatggttggatacctaacaacttgaatgatggtcacatggataggttttatttcttgattgctatcttgactgcctttgatcttgtcatttatgtgttttgtgctaagtggtataaaggtatcaatttggataatggtaatagtgataatcatcatcttgttgaagaatcagaagatcaaaatcgagttttcgaaagagtttaaagtatttactattacgataaattatatatttttaagatgttgaagggattattacgtcaataaaatttaaagtattttactgtagaatgagtattattatttcgatccatatatattttccttaagagtctggaataattttgggacaatgaactagtaaccatggcctctataggtgtgattgatttatttatgatattaaggtatgaaatatttgagaaatgtaagaatttttatgtatgggaaaatgatgaggaaattttgttatgtgctcaatatgggacaaactacatttggttttataattttataacataataaacaaaaatcgaaaacaaaattaaacaaaagattagtgtttgttggctttctacacatttaaactttgagaaaattacactatatacttttttttaacttaatacttttaatttaaatctcttttttaaaatctattatgtttaactttttttaatcattctactaattttacccctattacttcacgatagtttttatttttctctaattaaaattgtgtcccaattttctcacaaacctacacatctatctacagagaatacaaatctattatatttgaaatgctatcttagttatgtgagtgtgtgagaataaccatgtatgaactttggattattttagaaatacacaaaaataataaaagattacaaaagtacaattatactgaattttaaatatttttataatttttattattttacttacagaaaatacggtcttttaatgtatttttatgttctactcttataaatttattattaatttttgttatttatatattattttttgttgttattttgatgttgtatggaagctcttattatttttatgtaattttttttgttgttttcgtgttagttttataaaacaccgtacaaatgtaaaaaaaaaaaaaaatctttgaacgtaaaaatataagtacctctttggtattaagtaagttaccacgtggcaatccctgattagtctaaatcataaaatttttattttttttacaaaaatagtttaaatataccaataagaaaatgatatgtggataatgactt

SEQ ID NO: 36945 - DNA, 1979 bp, Cannabis sativa
attccatcttttcttcccttctttacattttcattagtgtactcaacatccatctaccttttactactgccaccagaacgcagacttagtttattcatagcattagccacaataacatgggataattttgggctaataggaaaagaaccaggcttaggcataccttttgaaccacgaccagtagatgaattgactcgcttccaagtcttagacttctgcgctttgataaagggttcaaatgtttgttggagtgcatggcgaaaagataattcttcttgagatgaatgatgcaaaattccttttcccttattaatttgctgcagccgctccttactgggacccccactctgaatctcatcatgaatttccacattcaaccctgacgaggatgcttctacttcagcagactcacatcgaagcacttccttatttttcatagactcgggtatactatttaactcagcaacaacacactcctcaggtggcacacactccatcatccccttatcaccttgaataccttcagaaaaatttggttcagggcctccaacagaagaccagatatttaactccggttcaccaccatttctatgttcagcaacaacaccaatcggctcttcttcgtcatgctcctgaccttccaaaacagaggttggggccaaatgttctggagtaggacctgagtaacgtggccgagacctctcaacagcagaaataattttcgaagcttcacccatagtcatgatcggtctgttattcggagactcagcacgcttcctgttgaaccggagactatcgcggggaggtgaagccggagcacacaaccacgaaccaaatctcccactatcaaaccgtggattatctccagcaaagtccctaagaggacaatctaatgccttgtggccaatgatgctacaaccatagcaaaaatcaggtaagtgttcatattgaaaaatgagagaaacctcagtaccttgatcatcaatagccactctcaatccccatttaagaggctcggtaatatttattctcaccctcactttcatggtaccattaacaatcttgatatcctccatcttgccagtccgctccccccattctctagcaaagagttccgtcatacaagctaatggcacattattgattgaaatccagaaagatgtaaaatcaaaattcatcttagaaatttcacccagacccatcggcttgacaaagcagatcaattgtttatcaattgtccaaggaccaccaccaaaaaccctctgcctatcctcacgacagccaaagaagaagcaaaaaatattcttcgagctcaactcttctacttggaacctatggttaattttccaaacccctttcattgctctctcaatcccatccttattggctggtctaggaccaatgactttcccaatcaaacacaaatccaatttctttttaccttcttcaaccccggctttattaagaggaagaacagggccatctccatcgtcaagaatccacacttcagctagccgattaaccaattccaaatccattaaattaacgctgagaatcaaatcaaaaaccagaaaaaacaagattaaaatcacaaactccacccttcccatgaagggactttttcttcccaggaagtttcagaggaccgaaaccaacaggagactaatgtttgtctaagtttttactgttgcttatagctaaaagtataaaataagtataaatttttacttttatttatagcttatagtttggataactatggaaaaatactttttaaaatatttggatatcatataaaaaattataagtaaatgaagaattatataaattattttaatttcaaaaataactctcaaaaatccttttccgaaaaactacaaattctaattttttcttaaagaaattttaaattaaaaaataatttttattttttatttaaatagattttttttttaattctaaaaattaaaaaaaaaaaa

SEQ ID NO: 36946 - DNA, 6631 bp, Cannabis sativa
taatcaagaagagttttcatgggcagttcttggaatttgtatactgtcgatttttataatagctgttgaagaagtcactcccggcttggttcattaattccaaagtaacccaaaaagagttggaaggcatttttcctgaagtttgagtttgatttgggttttccccttctatcaaaacttatgatatcttattctggttatgtactagtatgttgaagatgatgtgaatttgcaataaaattagtgtaattttctgtgtattgatgatgtgaattgtctggtggtatggtgctaaaattgttttgtgggtgtacaggacaaatggcggaatatgagttgtagtgccaatggccaaggtcccagggaaaagtcgagaaccgtgaaagctaaagctaactcagatgcccctgctagtcaggtgtctactccacagaccgccgtccctgctccagctgcccgtgattccgcagcagttccaagcacggatgattcttccaaagctttgccagatggaaaaaactcttcaatgtatgattgttgttctttcccctgatccatatgttgctatttaatacattttgtagcagagattatgcaggttacttcagtggaaattttgttgaatatgagatggtgtggtatgatgagtgagaagatttatgtatatgatttggatggagcaagataatttagcagcatgccaccactgtgatgattgcatagctgcctagactgtgaggaagagagagactgtagtgaatgtgtgtcaagccaaaggcagtttaggccacttatttagcaaaactaagatatgcttcttagataaaggttcttacttgacctgaatccttaggctttagaccctctaacatcaagtgtttgggctcaccactttctgtaatttcatggtgggatgtaataaggtagtagatttgtaaaaagtacatttttgttctgatccttgatccaacatgctggctttgctgccgtttgcttgccttagagtacatgatgtcatttttctaagagaactcggcgaaaagctcaattaacagaaaactaagtgtccagattttgaagttttcttggtttagtagtgggaaacatagatgtgagtatgtgatagtgtctaaatcaacgtcttagttacctctgcgagaggatagttattttccttttgtattcggagggaattttatatcatgatcatgcttttgtctcccgtcggatctctctctttctctgtgctattctttactgctgttttctcattgattcaagcacctctacagaagttatgtagaagctttaacacctgaacttttgaaacaagtaccagctattgattttattggacatgtgcaataaataaacattgattcattgaacaaaggcagtgctttctatttgacttcaatggttatccactattttctgctttcacatcatacaaatagccagtctctctactctaatgatgatactccttattttttctggttattgacactttctgattctataatgctattttaatacaggtacaatacaatgatttttgaagccctttctaccttgaaagaacccaatggatcagacactagtgcaattgtaagctatattgaggtatgtttgaataataccaacaaattttattgaaattaatcttgattgatttgctatgagaaaaatgaagacttgctatataattttttatgataaatagatacgaagacagtgtaagatcagtagacaaaaaagacacgttatttcaattgctctagaaataacattatataaactttcaattgagtatccagtatgtgatgttataaaccataatagtcaatgagaaagctcttgttttattgactgttttgctccaggttttctgaaaggctccttaactagtctataaatagaagagaacttgcattggaaattcaatttccagtactgggcaattttttggcattatttcaagttatgaagaaaatttatttttttagcgcaccagatgtcaaaactcaaacccctaatgctatgttatacttgaacataatggttcttctggaaaagttgctgttgggttactaatgaaccttttctgcattttaaattaagctttatgagctagcttgtgtttgtgtgattttcttaaatagaagtgctttcacttagtacgggtggtggtgacaatagaaaagttatgatttgatattgtcagacttatctcactctctgtagcttgtagtattttctcaccattgtatcatgtttcgtcattgttattccattgccatatttttagtttgattatgataatttatgcagcaaagacacgaggttccccaaaactttaggaggctattaagtacaaggctgagaaggctggtctcacaagacaaactcgaaaaggttattggtttcaaatttcaatattatgttttattttttcttttgggttctctttctctctatttttttgttttattttttctggatccatttggtattataatttgaaatttacattcttgtcgtcatataattaaactaaagttgttttactttcacattcctaatagaaacaatataagatatattgtatattatatatatttctggatccattcggtatgtcatctaatagaaattgtatgctgcaagattaagatgttgatttcatttactaattgctttacaatcaggattttaggaattatatcttaattacagtttacctgccaatttctgatccctcattccttaaaaattggagaactataagatgtatatcatcgagttctatccaaagaccaatggaactaggaagttgcatgtggggtttttgtaacaattttttttatcatagttaaacttgaaaaatgcaggttcaaaattgctacaaggtgaaaagcaatgtggatgcctcatttggaacaaagacgcctgcactaaaagcagaaaatcaaccccgcccattgcagactactgtttacaggaccactactgatgtagtagacgaagcaggtaatgctgcctacaagatagctgaagctgaaaataaatcatttgtggcagctgaagcagtgaaggaggcagataggatttccgagatggccgaagacacagaatcacttctgcagttagcaaaagagatatttgagaaatgtaataccagaatttttgactcttaatttttttttgccccaaagttttccactctaactaacttatttttaactagatagtgtttctaactttacaggttcgcagggtgaatgcgtgtacacagcatagcataagagctgaaagccatgctctactcatttttgaaaatgaacccttgtattaagaacttgtaaattttgcttgtttttcacttttccttgaggtgcaactaaattgaatttttttcttcttttagtagtctagttataacctatactaggagtattttgtgcattatcgtcagcttgggccactggttggagattattcaaccaatggaaaatcatgtacagcaattatcaaaggcccgaatgctgtaatatggacactttcgctaattacaaatgtagcatacttttattaatcaaacgattgaatggattttcttttcgtctgcttttaaatttttttattttttattttatatatatttatttatatcaaagaaaaggggaggaggaggtcaaagaaaggccaaacactatagagcggatagagtggctctcaaatggctaccttgacctctagcacccaaagttttagagtaccaatttcttgaatgttgctcactatatcatggcattacttgggtaattagaaaagatagatcttattcttcaagtgtggtagaagtccccaaaattggaaaaatggaccctattccctcttgtgtcttggaaatgtgaatggaatcaaaatgcataaaaacaatttatactaggcaaatatctctgcattaaaaaaaaagttaatattcaaataatcatctggtatgtacattactgtagcaaagatgtacaatacaaactgtttccttttctattttctcaatatcttagtattatttaaaaaaaaaaaatctaatttatgaataaagcgctttaaaagtgcacttcttacggccattggcatttctttctcatcactggattggcatagaactttttcctgctgctcgttaccagtgagtgtagcattcatcaccctataaaccctatctcaaagatggtttcaaagaagaaaaatagtagataatgtggatatatatataaatatgatataaagaaatgaattaataacgagcaccctgcaagtgaaatgtgaaatggaaaattatgcataattccaactattatcttggttcgatcagttttctgctccaaaaaaaaaaaacatcaaggttccatgcgtagtaaacaacaaacaaggtcttattgtctctagtaaaaaccacctcaacatattcgctctctaaccatgcaaataaaaatgataaattaagaggaaaatctcatcctttgttgttgcaaagaaaacaagacaagaataccaacgccactaaaacagataacagtttgtttttagttcaaatgcaatagctgaaaccaccaaaaaaaaataatgccaaactacaagagaacaagaccaagctctgatggtttcaactcttgcctcaccctataattataaagataatagtgaagttgcccatcacctggtccgaattttagctccttcaagaacgagtcattctccatgacgtctaaagcgttgaaaacatcaaaatccttctgttttgctacaataagagcatcattcatcaactgaagcaatggagtcttagtggccacattataatacgagtaagcagctttcaaagttgagtaagtttgattgccaaggatggatgaaggaagagtgtagaagctgcagaagtcagtgatatcatgtgtctctgggctctcgaccaggaaactatccactacaccctcagttggaagaagccaatgctcaacatcatcttcatcaaaatctggtgcaacaacaaactgtcccaagtagtttctaagcaaccgggttactgcaggaacatcgcgaagttccatctttctaaatccaggagtagctggtgaatctggtaacttgtatagctttacagttcgactcattgtcatccttgcaccaagccttgaaaacccaacatcaataagtttctttggattgagagacctatgccagtactggcaagttgttatgggagttggaaggaccactccagcagtgtatgcagcctgccatatattctccaagtgaaccctccgtgttacctccttgatcatgacaggggctagtctcttcgacctgagcttcttatgaacacacaagaaattaatctcagccatttttacaacaacatcccgaacccggatcctagcagggactccagtaataaaagcaactagcttctttgaagcctttgcacgtacaccaatgtgccagctcctgtagaaacccggagggcgcaaagcccacctaaggaactccttcgaatagttgaatctaaacatgttctcatcatcctcaacgtaattattcttcaaaagtgcatacacctcattgcaagtctcttcagagtccatatcacatgtagtccattcatattgactaggcagattgtaaggctcttgtttgacctcagataatggcgttggaggctcaataggaccctcaggcaaactagtatcctccttatccttaaattgcccaacaggttgggtttcccaaaacttgtgtctcttgctaacagacatcgtgtcttggaactttctaacaatattttccaattcaccatcgtctttagcaatttggtttgaatcagagacatgatctgggttttctttaggagactcaggaggagaattgctatcacccatttcagcaaaaattcctaagcagcgaatttattttaatttcctatcagtgaaaccaaaagcatattaattaaaaacccagtaactagatcaggcactcaaatcaagcaattgaaatctaacactcagtaacatcatctatcaaagctcgcacatatatacatacatatcggactaagcatcgtcataattgaaacaaaatcaacaaaacccataaatcgtataataacccacaccagtaaaccaccaataaataatcaaaatctaatacgtacgatgtaagaagaagttgatagatctatagaagtcaagaccacttgtagaaatatttagtaagaaaaactcacagttggagttgacggggcttgcaagggcgtgacgatttggtggtgctacttcgacccgattactttcaaataggagcttagcggatctcgaatttcaacggattgattggggagagaagggtttgatggatgagaatttttagggtttgtttggaagaataggctccgatactacgaaatgagaataggaggagaagagccagtgactgtgtgggttttgcttcggagaataacaaagaaagagtggctttggatatatttcgtgattccctatgagactttgctttgtttttggcttgttggtaaggtatcactaaacaatccctagctcttttcaaa

SEQ ID NO: 36947 - DNA, 3768 bp, Cannabis sativa
tatacagctaatattctaacagtcatgaaattatgggcaccacattcacataaacaaaattaccacaagcaatataattaactataatgataaatacatttttttttggtatagtggaacaaaataataaaaggaaagaaagaaattaaaacaaaattgaaaggaaataactgtttggtttaagttttcataaaagtcattggaataagaatattttgattacttattatctttcagggtttgtgtgtagttttcaatagttatcaagagtctaaaagaaactatgtagttcatttgtaattgaaaggaaatcaaagttagggtcctccccaaggattgagattcccttattcattccttcagagattagggtgtcatgaaaactgatgcctaattttacaagcaatagtaaacaaatgaacgtgcggcaagggaaccacctcttccattctcagtaacatggcatagtgcccagctggattatagagtaaatcatatctgagtaaaaaacttgaattatttttgtaatcaaagctcacattttctttattggcaacgaatcaagcaatcctttcacagatgataaggacacaacagtttgctgtgcaggtttgttcataccacttgctagcttggccaagatctgcaacaaaacatatgtttgcttataataaaatagttcaattcatcaagaaaactatttttgtgcaagctgaactcagtaaagaataaaacaaaactgagaagaagcacttcgcttccaccttattatgagcaatgccagccgaacaagtaaattctgtctccttcaaaactttcattctaagctcggcaacaatgatagccccacaagctaatagtttatcacgacgatcagcatctttcctgcacagccactctcttacgttttccttgtcatcaatttctctctgtagtcaaaacagttttaacataacagagactgctcagagaaaatgagtaagttcacaaccaaacagagtcaagtcttcattttttttttttttgaaaaggggcaagcacacatctcaaggacacatgtcaaggacatgccaccacccaaaattttattaaaacctcgaagaacactatgaatacaaagccttgattgcccaaaggcaatcagaaaggcaaaagaaacacaaaaaaaaatccagaacttaagacaaaactacatcagagttttccattctctacataaatctaagaaagagaaatcctgaaaatatttagtcttaaagacccatgtagctgaccagaatttgattttctcccacaagtctaaataaaaaaaagttgaagcccattttatagtgtcattggaatttcaaacttaaaactttatagttcacatacctcattacaacatacccttttagagtagatctatttttaattggctgaattttttgggctttttacaggaacattggctaaatttagaatgaacaacagtttttttcactctaagggactacagattgacgatcaatgctaaactagactttaagttatccaagcattactagtttataataatttaaaagacaattattttcactaaacctcattagtaagccccagaatatgcgacttaagagtttcttcatcaacaagttcaaaatgttctggaggagcttctgctaacattttttctgctgcatcagtcagatcaagatacacttcatcaattgaagccctctcacatcgacctgtcctagcaagaatagaaaccacctgaaaatactcatgttaaaattctctacaataattatcggtagtacattattgaagccattaatttcaaattccatagacctctgaaccagcattgcggtacgtattcaagtcagctttaccacgtgctactgggacttgaaccagctcaatttctgggcatacttgttttgcttcatgacctcgcattgaactaaaacgtatagcttaatcataatttagagagacctggttattatgcaaaagcccttgaatgtagatgggaaaaaaaatcaccataccgtttcacaccatatgtacgggcctcatagctaacagcaatcaaagccccaccttgccattcattatattgtaccacagctgtaggcaaaccccgtaagtgtggctgttttcgctgctccactgcaatataatcacattatatgaggagtttctgaaagaagggaaatcactgacaatttggcaccacattcatggatattcccaccgtaccagcaaaaataaaatggatgcatgtatgatggtatgataaagcaacttcatttatatatttatgtatatatgttaagtatggtattagtttagactaggaaatcaagtatccttaaaaacaggtttcgttatcaaaaaatcaaacggaagatgaaaagtgtcaataataggtttttattcaaaatacctgagaaaacaaccagttgacaaaaataaattgcatattctaacaattttcactaccattttctgacaaagaagaaagcctatagcatgctgcaatagagaactaggttctaacatttaattgacaattttggagaattaatagaagataacaactaaagctcccaatttcattaattctgtcaaattatagaaaaacaaacccgagtaaaataatatacatttggattgacattccccatgtgtcaactgtcaagtttttgaaacaaacgttcaaccaatagaactttttttttaaaaaaaaaaaaaaagagaaagaaactacttgtcttagattgacccctgccccgtcaaccaatagaattattttcatgccaagagcactatgctaagttaagaaatatgcatgaaatataccttttttacataaaaataatagccaaattctaagattgttcataatgagtaattgagtaagatccaacattaaacatcttcttgttttttcatttcttttttttttgaaaaagaggaggtcacttgtcttagactgggcctcaacccgatatgtatagaaaactctcacttgtggcagaggaaaaccgtaattacacgtgttttagcacaaactacacgaaaaccaacagcaaacaaaacaaagcaaacaaaaatcaagcctacaatagagttttccaatctctacatatatctaagaaagagaaatccttcgagacccatgatgctgtccaaaacttgatttttccccaaatgtcctctgtagagttctcctttccttcaaaaatactgttatttttttccatccaaactgcccacacagtagccatcaccagtgtcctccataatcttactaggtgtttgttcccaactggcttactgacaatcatttgagggaaggcataaagtaagacccgtgataaatcaaattccttgaatattcaaccacaaactcaaagagagactaaattccataaacaaatgttcaatactctctccattagcattacaacaaacacaccagccaggagaaatagctagataaggaccccttgcttgcattttatgatggacattcactttccctagcaccaccaaccactcaaagactttgacctttgtagaaatgcaacatttccacaacatcttagtccaaaacaagccactgtggttatggtttgacataaaccaactaaaagctgatttacaagagaatatacctttcgaatatggcctccaaagtctacagtcgtccaccatactgatcaagcttacatattccagttgttttaacaactcaatgagactaggaacctccct

SEQ ID NO: 36948 - DNA, 2377 bp, Cannabis sativa
  modified_base (2271)..(2278): a, c, t, g, unknown or other
ccattcaaaatataagctgctcagccaatttcattttccttaagcataagaattcacaatgtggtgtggtggatgagataagagaaccagaggacacggccaatgaaaaccactcgggtagaactcactcccaaaagctaacttaaaaaaagaggatgcccaagtagttatatactactaaccaatcggtcaatgtagaatcctaacaatacactctcctttggagccaacatccacggcagacctacggccctttcttgacatcggccccactaccacttgatgccaccacttgggtagtgctcaagtattatatactattaaccaatctcatactttgtcaatgtgtgatcctaccagctgattaagtgattttaaatatcaaagacactgagatcatcatacaaacccaattgaaagatataaagaaccacataaattcattggcttcattgggatgttgtctcacatatctagattgataattccactagaaagcttttaaatactaccaaaaaataatgactaaaagagatcaagacctacctttctgtgtttagctttcagctttccatcagcaccaaaaacacaacaagcattgtacaacttatctccggaacgctctggtatagatccaccaactatggtgatcttcaaaacccgagcagcttctgaaagcatggctgttgatggagatgcatcgccgcccgcatcaatgtcttcagcataaacagggaagcaatcgtttgaataaggactgttccatatttcctgacataaaacaaagcaatcattcttttctttgtagcagaactagcataggctcaaaatattgttcagttaagaggtaaattgaagttaacactctagggatatggaccattgcgttgggaatgatgctaactcttatttagttgccaaaaaatgtgcaaaccctttttcttttaacaatttcattctaggcaattcaacacacatcactataagaaggtcacatttggattgtataactggactatatgagatatgtaaaatttaggctaattaagatttttcgattccaaactttgaaatgtactaaattgtacctccaaacttttcaggccattaaaaatctcatgtgaagtattgagattgttggattcaatgaaatttcgttcaattttactagggagtctgacatggatagaaattctagatgcacgatttggtacatggacaatcactaagttaggcattcattagtaaacttgaacaacggaattggacagaactgcttaaatccaacaatcttattagttggagagaatttttaacagcctaaaaagaaaccacttggtacatgtaaaagttctgagagaaaatcctaattatcattggaaacctctacaatcctcccttgtatatgattgaaaagcttgagataaaattacactttctctaattatctttaaattcaatccaattccacctttcaaactaacaaccaaattcaatgaacaacaagtcaagattcaaacacaaaaaaatacaaagtaaacatttttacaaaactcactggaagtaaaacaagcttagcacccttttcagcagcttcctcaatggccttccgagcatgaacaatgttcctctccttatcattagtcaccgataattgacaaagtccaatcttaaactgacccagatcgaaaattggccccaaaaccccaaaaccaacaaaaccccaaatcaatacaaaccccaattagatgaaaaattcaaagaacagtaaataaaaaacttgcctttgagagtggtggaactggcaagggaagagccggtggtgctcgggcctgttctgggttgtaggaggaggaagccattggtgtaaaggagaaagctttggtgggaaatgggagctttgtagtggaattgaaaggagtgtgattgagattgaggagagatgagcgagagagagtgataaaggtgagatttttggagattgtcaacatttcatttcactttcactcaaaaactcttctctgattttgcttcaaacttttcaacttgatttgagattactttttcttttttattttctaagatggagtttgagatttactagaagattagggaaagaaaaaaaaaacaactaatttacgatataaatatttaaatttaaatctcggttataaataaatatttaaatttgatctcgtttggcttaacttctacttttgcttatagatagaaatataagatgagtataagtaggggtgaaaatcggtcggnnnnnnnnggtttttaaaattttataaccgaccggtcggttacagtttttattttacgaaaaccgtaaccgaccgtttagaaattataaccgtataaaaccgaccgt

SEQ ID NO: 36949 - DNA, 8178 bp, Cannabis sativa
  modified_base (7208)..(7208): a, c, t, g, unknown or other
agtgacggtggtgctcgtggtggagctcgtggctgtggctattgtggagcttgaatgagctttcgtttatggtggagctcatgaaagagaaagcaagaaagagagagcgagagacgagaaacaagtggtggagctcgtgtaccgccgtctaggagaaagagagaggacgacgaggagcagaggtcagagagagagagagagagtttaaaaatgtatagatttgaaaattttcatatctaaaaacacgttatattggagcgagggaaaatgcgttatttgaaaatttttagatttgaagtaattgctgacggttttaaactatggcctataatactataggccacgatttgaaaccatcggtaattcccctttgaaaaaaatctgcaattcttaaggcacgtttaaaaacagtcgaaaatacctcacgagtatttaaaattatatggaatactcaattttttccaacggttttaaatactcacttaattttttttagcgatggtctcccaaaaaaatatttttaggaccgtggtgaatagtggtttttgtagcggtaaaaataaaataaattattgttgttttatatttttaacaacaaattaaaataaataaaataaaaaatttaaaggaaaaaaaattgtacttagaaaaaaatgtttaattttatctttaattatattttccttatatgtaagaatgtaatatatgtttaatttatttaatttttaaatatatttgtatcgtattattaaaattttaaaaaaatatataaatttatatatcaatattcaattcgtgtaaatgtgaataggatttgattgaattgactcgtgctaattaaattagatttattattttgtgaatacccctaaattaatagtgctttcttgatcggtgtagaggtgtgtcagatagcctatcttggattcaacctgtcatcaatgtcttgataaatcaatcacacatcgaagaggaaaattaaactagaaacaagtcactcactctggacgatcaaaagatctacatgtgcattccctattgtttttttttgtttttttttttttttttaaattttgaagtgtcaaagatttgaatattaaacttaatgagagatattaaaactcttctactatgctaaaaatttcacacattaaaaataaattacatttataatggtatttaaaattttacctcgttgatagaaaaaaatttgggtaaaccactcgttactaaaattataactgtcatatataattaattattcattgaatggagtgagtagactacgtgctgttaatattctatagtatttaaaattcttctatatgaaacgtgtatatatataattgtttacattctaaatttccacatcttgaattttatttgagaataaaagaatgatagtgttgaataatagaaaaaagccattaataattaagtaaacgtggaaggaagtgaatgaagttatagtttaagtactggttaagtctcaagtcaaagttgatgtaccaaaaaagagagtgagagagagagagccagtactatgtataattaattaatatataatagctatatattattatatgtatagtcaagcccatctccaatcttcaatgaatcaatcaagacaattcagcacataataatttggataattaatcttattcttaatgcatggatgatatcttacgtttttatttaaaaaatgggaacaccaacggtcatgtacaaatgcttcaatattctatattctattctatgtgtcaagtaaagtaatcactaagtttttgtgtgttgagctttctatatatttttcttaattatgctaattaataaattaatttgtacaatcatttgtttatttattatttttattaatgggattagtcaaagttatatatacgtcacttgtccacaataaatagtattatgttggcttccatgcatgtgttataatacagccaaaaataatataataataaaaaagagaatttagtgtttatcatatgagaaatattatggcaacttcgtgaaatttaaatttagtattaaattggatactatttcaacactaattttttttttaaaaaaatttcaaccacaatactaaaattacacttaaaatatattctttattattatattattttattaaattatctcacactataatatgtatataaatataaaaatataatcataaacatattattttaatattaaaaaagaagtagaaaatttgatgtagtctatagtgtcccactattgggatactatagactttcacatatataggatagcatttagtgttctattggagcaattttgtgtccaaacttcactatttttaggattttagtatcccattagagaagaccttaaagcataggtatggtaccgactatttttgtgaggtgtaatattattattagtgaaatttaatattagattcaacttattttacttaataaatattatagaaaattattaattagttatacgataatactttgtcatggtagtattgtaagttcatatgtgtttggtccggtctgtatttatctgtgcttttcaataaatgagtcgtgccgtgctctgctacggaaaaatattagtcgtgtcgtgataatatttttaaagggtaagtcaaacacggccagtaagtctggtattattgtaccggtctgtattttttaaacaagccagcccatttttttttatttgaatttaaatttgtgctttattttttcttatattttttttttataattatttcaagttatatttatataacttttcaataatattgtaaatataattatataaaatattattagcatcattaaaatttaaatatatacttataaatacttaaatttttatatgactctataaataaattaattaatatattatcttaattttttatgttttaatacactaaaaaaaaaaaaattcatgttttaataattttaattatagaattataatattcagtattatatttaaattctattattattttaatttatttataattgataaattcatatcttattattattaataataaattataagattttttaatatgtagtgccttatttttcaaacttgtcgtgtatcatgcttttcggcctagtctattcatgcttatatattgtgtctcgtgattcccgtaccgtattgtgcttaaggatatatttttttgtgttgtgtcgttctaatttataacttcgtgctaagcctatattttttcgtgtctaattgtattcgtgccttttaatttcgtatcgtgttaaaatatctgacccatatttatattactaggcaccatcatagcaatgctcttaccatattattatgttatatgaaaatcacaaaagttgattaaaaaataaaaagctttgatttggagaacggtagaatagactatagtactagctacttttttaaattttggcagtgaaataaaataattgtaaacagttgaatttgtactgtgttgattattctttagtttccaagtttgaatatataggaaaataatttttaatataattagtctaaccaatcaattatagatacggaactcctgaaaaaaaataaacaaattaaatttacgaattaaaaaaaaatatattaatataatatattgttaataattactatttttttaaaatataactcaaacttgttgacttgagtatttatagttttattaattatttgattttttttcttcaactttttataattttagtatagttttttatttattaagaattataaatagtgagtattatcaataaaaattatataaaattgtctataactattaaaaaaatatattgttataataataaatttaattaataaagaagttaatctagttaaaaaataataataataataataataataataaagaaataataaagaaaaagtaaaagactaatatttatatatatacataatttctacatacccacgttttgaaattaaatttatagaattggattttattctaactctgagctgctctattcaagagaattgtcaaggaccaaaatatttattattattattattttggctggatggaccaaataaataatctcactcaccaatctcatgcaagtggattaaaatatattatataaatatattttgaatttaaaaataatttgaatggctgtcgaaaaaataaatcaaatttgatcaagggaaaatatgtagaattctttatacatatttttgtttttttaaacaaagaaactgtaccatttttttaattatcatatgtgcgcaaaataaaattttgtgtacaaagaaaatgtacaaatactaggttgatgatattacatgtaaagtataattagtttttttttttttttttaattagattcaattagatgatgttaagtataatacatgtatgtttatttttttttttaattaggtaatgtatttattttttagctgttgctatgttataaaataaaatagtcacgcgtgcaacacaatatttgaacgcagtttttggcgtgttaaattttttccgaatttcttaaaattttacaggacctcttaaataattacaattaatttatatgaccatgagaaaaaatttgattaaaaatttatttcgaatactaaaacagatagagatgtatcggtgcatcccttttaaaggggtgcattatagaatattctaatatttttttttataaatatcattaaaaaattctataatgcaccccttaaaagagatacaccgatgcactcatatcttttttggtatccaaaataatttttcagtcaaattttttgttatggtcatgtacattataattatttaagacattctgtaaaattttaaaaaattaaaaataatttaacacgcaaaaaataggattcacatagtgtgttgcacacgtgattattttattttatacgcgtgtaaaattgactggttgaacactactttctatattcgaattttttaaaattttataagatatcttaaatagctataatatacataaaagaattagattattttttttttttttctgaatgcggaaattggtaaagcacccaatatcatttttattatttaaatatttattttgaaaacgtaataaattattttatcatgaattaattacaaaactcaaataactagtgtaatctaatctcaattctattcacagttctcacccaataaccatgtttgccggatcgatcctaaaggtatctgacaccaatcgttttcaccacacagaaatgatagaaaaaataaagtatttctctcaatagtttgagtaaaagaagagtaaaacgtttgaattaaaatttagaagaaataattatttttgtgttaatattttacacttatcatataactaagaatttcttgagttcttatgaataagttctgaaaattggtctatgccgctttttggcagtggtggtgtagtggaaggttcgaaatgaaatatttttatctattttaagtgagaataatagatttaattgtgcataatgataatatgtaaaaaaatagaatgtaaggtgttatgctaaaataagtgagtatagcatattgatagagagttgtttgactctataaaaaaaattcatagattgtacagaaatagagaatatttcaggcctattaaaaaggtattactaacatgtaatgttttgtattttgaaatcttctgattaaaaaacaaagttatgtgtttttcccattaaaaaatctatgtaattattgatgtttttggtagttttttttaatctaaatttctaattcttttaagaataattttatttttatctcataaatttttatactattaaattttaccacttatggtatacaatttgttaataatacttgtccaaatataatttttataataatatagttattctattgcaatttattcaaaataagtgaaggtagtagttgataaataaaagtaaattagttactcttcacattttttatattaatgaataataaaataaaatatatttttctttttttttttaataacaatttatactaatatttttatttttttttaatcattaaagtaaaaaataagcgaaatctatttaatttgcattcatttatcaattatcatctatggtgtcactcgtttcacaataaaattgaatagaatatatgatgaaaagactacattactgtaaaagttttatttcaaagagtatattaattaattgtatacaataagagacacaacttggtaatgtaaaaaattaaaggagcaaaaataattactattcttcttctaattaaagaaattaaaaaatctctctaaattaatagagcattaattactatataggtaatattaggattgggcattcgatccaatctaattttttctcctcttctgatccaatccaatagtagttggatttgaaaaatcatgattcaatccgatcaaattagacttcaaaatctaatcaaattcaatctaattactgattggactggattagttttttaattgaatatccaattacacatttaatttttaatattaatttaaaaagtgaagaaaaatacataaagactaaatatctctatttctttaagtttaatactctataaaaaatatcattattacaggtataatacaactaaaaatttgaaatgagtaaaacaacaacattacaaaaaaataaaatagaacaaaacatcatgaaaacaaaaatacaaaaacaacaaaatgttataaaatttaactaaaagaaactactaaaaatataattcgaaaatatattttttattattatacataaagaaatataaataatttttttaatatataaatctaattagattggatcgatttttaattagattttgagaatgacatacaataatcaatccaatccaattataatatctaacttttaacatctattctaatctaattgtcattgaatatctatttttttttgtaattctattgaattggattagttcaattaaattgaattgaacattgtccaatcctaagatgttgccccacaccactttatcttgatccttgaaatttagtaacgtatattgctaaaaggtattagtgtacttagcatcattttcagtgttatatcgttatgggtataattaagtattgagtcttatataatttaagaaaatnatttttaaaaaatatcgctaactagtgttgagcacaagtagtgctcaataacaatactctttgataacatttcaaaaaaataaaaaaatggcaaaaccacaacgttgtaatatatattactacattttttcatataataattactataagaaaatagacgataatatatcgacacaacatgttatgtacaataaaatatatatattgaatgaatgtggcttatataattaataatatttataataaaatatcgcaagacgtagtttattcaccgattgagggcgccgccccaagggcatatacgtcactgtactcactggtcaccaagaaaaatcaaaattctcaggttaacttcctcacatttcactatatctatctatctctatatatatgtgtacatgtccatcatcataatccacaaattacaaactctactcttgcattacacattctcttacttatttctctctaaatctctcctcatattatatccacaatgacgcagtcaggttcgtatatacataaacatttattaattatataattaatatgttctatatgtatatatgaatgatttaacttatagtctttcgagatgattttatagaaaatatgtactattttcaaaaatcattaagaaaaaatatatatatttttaaaaggaaatattttttttaagggccggattatatagatacagacttatataacacatatatgatgatggatcattacaggagtaatctccagtagtactccaatattcaaagatcaaccagcagcaatcgtccgccgatcaggaaactacaaacccacattgtgggatgctcattttttccaatcactccaagtcatatatacggtaaatatatacacacacacattaaatatatgcaataattatattaattaatgcatatatatacattatattatataatgatgattatatatataggaggaaagctat

SEQ ID NO: 36950 - DNA, 4952 bp, Cannabis sativa
  modified_base (4903)..(4904): a, c, t, g, unknown or other
aagaagaagaagaagaagtggaaataggaggttgttactgtgtgttttaaaatgaaggagaaccctaccttattacacatattaaggtattttgacatggactttttattaaataggttgcgtatttgttttttgatcgacactaatatgattgtctaatagtgttgatttaaaactgacactcaattttaatagtgtcggttctaaaaaaaataacattttaacttatggaaattagtgcttcattggaactagcaaaccacagtttaaatctggatcggaataattcaaaacactatagagtgtaatcggcgacaccgtctttggcgatctggttaattaggactattcaatgctgagtggtttggttgtggttcgtactaaattgtagacagttaaaccggactggaccatttacaatatatagtttgtaggttttatgtatatatcttataaaagaaattttacatattattacccaaaatattaacctaccaaaatgattgaattaccctaaaataatacaactatgaaacataattattattatgttatgttttaaattttatattattatttgtgtgctataaacatgtcacttatcatattaaatgtatactttcaaaaataaaattaaaaatctcataaataatataattactttaaataatgaataattataaactcaacttaaagtatagttttgaaccaaactaaattttttttaatagtttggtttgagaaatttattggtttgattttgtttctaatattcaagaaacttttatattgatttagttcaaaaattacaaaaatttaaactaaaccaatcagtgaacacccttaattaaaaatatttctttcggtagtagtgctaataagaataacaaattagtacgagtgtcgttatatgttggattcgtgaaaaatatataaataaataaagcaaatagaatattcggccttcttttgttaggcaagaaataaatgctgcatgtgtgcatttttgtttccatataattgtatttcaattaatgaaattttaaataataatgattttaaaaaacaaataaatagctctcttgataaattatttgattcatttcctggcttggatgtaatattatataggaccagtctacgggacacctcttaaaatagtatttcagtagacctttcatttgtttcgaaaatattcataactttttagttctttttttttcatgatcgtgtatgttatagttatttaggaccatctgtaaattttgtaaaaattttgaataatttatattatcgaaaataagttttacatattttgttgtacgtacgactattttttttatacacatggaaagtaactgtttaaattttctttttcgatattgtaaactattcaaaattttctgaaaagtttacaagtggtcttaaataattataacgtacacaatttaaaataaaaaataataaaaaaaaattatgaatgccaaaacagataaagatctaccaaaacaactctttaaaaggtctactacagaaatctccttttgtatatataatattctaattgtatacaattaattaattgagtaaaattgtgtagataattaacaatatctaaatataagaaaatatttaagtaagattattacttttgtttatataagtttgggttttttaatattttatgttaaactatagttttttgtatttttttttttttttgataatttgttaaactatagttataagtaggtatcatgcttattttgaaaattctaaataatttacactatcaaaaattaaattgttttttcttatgaatcagctgaatgtatatcactttaacttcttttttgatacaaactatcatcaccttataaaaaaaggtattctcatctactctaattacaagttactctccacccatattctatctgccaagaaaactttctttggaaaaacactcattatcctattttttacatttaccttgatagtctaaatagttttttccaatgtgtaataatatatgtgcttattttttatatgctagtacatcttaattgctattttggatttatttttaatactgtaaattatttttcaaaaaaaaatcaaaatatctataatttggatcttttttatttttatacttcaaaatagttttttttttttgtatttttacaaaattctacactgaaactcacatagaaactaatggagcaacctaaattccaactaaagttcacatagaaacccacatagaaattatttgagcaacccaaaccgtaaatttaaaaattcccttataattacaatatataacaactacaaattaaaaaattaaaatataacttctctagctgctgaaaataaatgcacccttatgtactgcaacaattttgttcatttacgccggaattattagcgacgggtcatctttgccactaataatggcagtattagcggcggactccttccgctactaatagtccatttttattttttttaaaaaaaatgttagcggtggaggtttgccactattgctaatacactactacaaaaagtactttttgcgttagttaacgcgtcttacaaaaatagttgaccgaggtaaaaaataagaaaagattttatgcttgagtgtgtggctgaagctaaaaaaataacaattagcatgtcaatgaacttttttaccaccggcgtgttatggcctaactaaagaaaaaaatgctctttgtgtagttctttgtctcaggtgaaagtacctgaagggtattcctcaaatgtctcgactttggtagatacagacaaattaattttaagcgggttgaggtctcatgatcatcatatattgattcaacatattatgcccgtgagtattcgttctgttttacctaagaaagttcgatatgctataactagattatatttattcttcaaatctctttgttgcaaagtggtagatgtgtcaaagttggaacatctccatttaaaaattattgaagtcttgtgctacttggaacaattttcccccgtccttttttgatataatgattcactcgactgttcatctggtgagagaggtaagattgtgaggacctgtatatttaagatggatgtatccatttgaacggtaaatgaaaattctaaaaggttatgtaagaaatagaagtaggcccgaaggttcaatcgttgaatcttacattgttgaagagacagtataattttgttcaaactacttgccgaatgttgcaagcattgggtcatgctttcctcgagttgataatgaaataagtaaagggggtaggggtgtttttgtttgcgacgtaagtcgagaagatcgagatgaagcacatcgactcgttttgcaaaatattaacgaggttcaaccatacatcaagtaagtatagcttagattttaatattcgattgaattaaaaactttcaaatgaaattttaatgatttataaatatatcttgaaggaaatattttgattggatcaagaccacttatcctagtaagttgagaaaccagaaatgggtgcaagatgaacattatcgaaattttagtacatggttaaaggaaaaggtagtataattatgttgttttgcaaaaagtggctatattttctttaataatttactttaatattaataaacttcatttatggtatgtgatttttgaaacgagagattccttaaataatgtatctcactcactacttttgatatcacattttccttcgtttagtgtactaaagtataaatcatactacataaatactcaattcaacaccaaagatcgtgatgatgctataataacacaaaatagcggtgtaattattgttgctaggacgttccaaatagctagttcaaaagataaaaatcttattgaatgtgatatgacattttacggtgtaatcaaagaaatttgagagttagattacattagtttaaaaatccttgtttttctttgtgattgggtgaggagtgataatggagtcaaagatgatgagtttggattcaagttagttgacttgaatcaaataggacataagccagattgatttataatggcatctcaggccattcaagtgttttatatgagtgatcaactagatacttgttagtcaattatcctaacaacgcaaccaaaagattataattgtgaagagtctagtggagatctaacacttgatgatcaaacatttgaaattaacccaccacctatggttgacaccatcgtggacgaaatcatatcatcccgtgaagacggagaaggattatggattgatttaactatcaatccacaaatattggtttgtgtgtttatttatttgtatgttttttaaaatcaatcaaaaaaatttgttgtactttaatatatgatttgttttatttttatttgtaggttcattgattgtagatgacgatgattatgatgatgacttttccctttggggtcaatccatcggcggagaaccacaacctgaacatgatctagttgaagttgacgcagaaccagaacctgaacctcaaccaaagaaaaaaggaaggggagcatataaaggcaagaaacatataaaggacaggagcaaaggaaaaaaaaggaagtcaatttcaactaatggagccaattatatggtgagactgggactcagattgttagcgagattgacctctatgcaagaagaaattttccattagcgtacaaaaattagcatttaatgtcgggagaaaataaaaatggcttatggacttacaatacggtaatattatgaagctgattctatataggatatgaaatttaatatttgatgtaattctaatactcattcataattattgcagtctatgtgaacccagaggataagcactttgtaaagaccgcttagctttnntttggaaattagcagataattagtactttattatgaaagttaattatt

SEQ ID NO: 36951 - DNA, 2023 bp, Cannabis sativa
gggtattatattttgggttttataaaattgattttttttttcatatatatatgtaagtaagtattagtatgtatcggatattttgggccctgaatttgaatgagtcctaggcacaaacttaatccgccttaaagttctgctcagaaaggcgtgagcctaactggagagaaaaaataacttataatagctaagaatatatagaaatgaaaagttctagcagatgatataaaaaaataatagattaattatgatcaatttgggtggtatatatatacgtaactttttaaataatattaattaataatttgaccaatttaatcattgtctctcatcattaaattaatttaacatttcatcatcaagttccaattaaatattttccttataaataggtaaacaacataaacaaagaaaaaaaaaaaattaagaagataattaagagtagtgacatatataaatattataatcaaaatgcctaatagaccagtggccttcaaacgtgagagtgatggtaagttcatcacagccgttgaaatagatgatcgagtgttcctgaaattcactgattctctcatttcagacccaaatgttcaacatcaagtctacccacttcctcgtactggtaataatgatcatgatcataccaataataatgtgttatgcatgatccaaagtgttgggaagaacaagttatggaagtacgaccctgtcaccaactttatcattggagttcaaaattccgacccacaagaggaatccgattatgtgttcgaaatgatcgacgggacgttcaaatgcgccaccaccggaaacttcttggtcaccgatcgcaacgactatgtcgtctcccctgcacagcctctcaatttcatcgaggtcgttatatagtatattataggatacttctacaatgcacgtttatacattatatataaataaataaataagctcattatgatcatcattatgagactactaatgtatggtgtgacttttatttggtcatctctccaagtaattctatatcatgcaataatgaattagtgtataagctctcgttcttacatatatacatgataattaatattatatttcataaatttttaaaataattataaaattgtaatatgacactgcttaattatttgcatcttaatttggtgtttatttatttattataacaatacttgaaatgtgacatgatgatcaaaagggcattttgattatcattattcaaaaaaaaaaaaaacaaaaattgattttttggtaaccagttatcactattaattcttaatgtcatgaaagtactcgagtcacttgttactgctagatttagggaaaaaatcagaatataaccaccaaagaaggagaagagtagggagatggtaactggttacctctatcaaaataacaactaaatagtaactggttactaagcatgatctagacttacaaaaaatctgaaaattagaagaaggtgggaatttttttttaaataattataaaaaagaatgttgaaaaatatggaaaaacagtttaatgtgacgggtaatcaattatctttttaaaataagcagttaccttatactatttaatccatatattttttatttttattattttgaaattttccaacacaaaaaaactatacttttgcacaatatggtctctagagtttgggtgaagccgaaagagaatcaagtcaagatcaatattgatgatgcattatttactgagacttctcagtttggtgttggtatggtagctcgtgattatttgggccacttcattgaagctcgtactattgtctctactatggtagctagtgtggcgccatgagttagctgagattacgggaatttgtggagttcttagctgaatcaagaataaaagttagtagatggtggttcttgagacgaattgtttagtgacgattgaggctgttcacaatcaattaatgatgtcatctcattttgatttagttgttaagactatgggtaattatttaattgtataagtggtg

SEQ ID NO: 36952 - DNA, 5553 bp, Cannabis sativa
caacacccaacataagattatacacaccttgaactaacaaatttagcgctgaactaagaggagcacttggtctcaacatagctaatggccgtccatttgattctccaatttggggaacccatgtaccgacaggaattgcaccaattggtagttggagtatgggcaatgaactagaacaatgcttaaaatacctgcaaatacctgaaaactaataccatttgtaaaaacaactacatagctattgtaactttaaaggcacaatcaaaacagcatacattttagtattccagaaagtgaagcaagatgtaacagttggggaaaagaaccgtcttcagtcgatgaattgataattggaacagtagcaacctcattctgtataatcttcagagcaacatctttcaaattatcatatggtccaccctgcataagaaataacacaaaagaattgttgaatagttttctccgtaccactggtagctctgaggacgtaatatcaaatgttgaaaaatgagacgaaaaattaattaaagaaccgtggaaacaaattatcaaactcattttttttctacactttaacctacaaatcacccaaactcatagcaggcccaagttggttactagcagaatgacttaatattttctcataaaaaactttactcacgtgagattgaaattgcgagacaatattacctagtgacctagttctgcgctcagcaacgtttctagagcactaaagtctgcacttatcgtgcaacacaccaaggcacaacaataatcttcataattaagcctactgaataagcatagtaaaattcaagaagcaaaattctcacatggacaagaagtcttggcaatgctcttccatgctcgtcaacttgtccgttcaaatatgcttttccctctttccaagcagatatagtatgtgtttcaagctcttcttctgtcagattagaaccatgattcccaagctaaaagtaacagtcaagttagtatataatataattacaaactcagaaataattttggaaacatacatgtcacggtattattaaatttaatttttaacaaacaaacaaaaaatctgaacaatttcacccatcaaacaaattgatggaataattaaaacaaaaaaaataatcaggtgaaaaatcaattgctcatgtcaaatgtcaaatgacatgtttggaaaaagatgagaaatgaaataaagtgaaatttcaaataaataaaagcacgaccaagcctctagatcatatttaaagcaagtcaaattgactgcaaaacaaaatccagaaacaaatatttcaatatacattcaagagtatatttcatgacatgtgtaattctcatcttaccatgtcacactatccaacaacagaatttgggaacctccaaattacttcaaattttttgtatgttttgtaggagcaagaaagcttatccatgaaatcaacaaagtgatttatcaatctagaagagctcataaataggaaaagatcatagttctagacatggatatacctctcttaaaattaatataaaatccaacgcactaagaacaccaacaaactgtcccctcgtgaagtcccaaagcggcgctagagggattccctgaaaataacttaaacttagaaaattcaaaccaagtacgtgatcagcagcaaataaatactagaaaatgtttaaaaacaacagagtgaaactcaaacagcaacaccaatgtaggctatttgtctagttaaaagtggatttagtcttaggtgaaatccacagccatataaataattagaccttcctcaattgttcccctaaattcacaacatttgtggtgacaatcataggtaaaatctcaaacattacaaaaaaccttgaatgattctaaaagcaaattattgaaaaaaaaaaaaaaaaagatacctgctcatacaatatatggaatgcttgcttcacaggcaaattaacatccaacgcaacaacctgaaagctagacagttattaaaacagaacctatccaaagatagtcaaaatggaaaaaagcaacaaaaacaggacacgcaaaaaggggcaaatggaaaagcatccaaaccttgcctgactcgggtagtagctcatatacagtgcgtgttgacaaaaatagtgaaatgcggtgtcgggagccctgcaaatcagcctctgatatccttggcactgcttcagtcaaggaaccatctgtaattcgaacctgtgttgtcacaaaaccagacaaaataacagtaacacagcaaaatcaatagtccataatctccaataactactgcccagaggaatgcaccatgcgctagaaacaacatacagcaaagaaacgccacttaccgcatacattactgactagagactatagtacaaaagaaaaccagaaacagtctatacatctatacataaaagaaaaaaaaactcaaaagtgtgaaacaaacagaaagaagaaaagttagttatcaatagtatctaatagcaaattaataatcattagttcttaccaaattctggaaggcttcagtatccacatccatattaggtccaggagatattactggattaggtaggaaactagggtctgtagccaacaggatagtgttcactacgccatactcgccactcacataaggttggtgctcatcatgtcgccattctccatcaacaaaaaacttatactgcacagggtatataatacatacaaacataagcctccaatttaaaatgcattattaatattattacttcgaatctctgcaccgcacctaagcctacaagaggaacaaaaaactataatagttgctatgtaagcaccccttttgaattgcattatataattgcatccatagtgtccataattctacaataaaggttagtgggttgctgaagacagcaggttctcacattgtaatgtacatattaaacctacgttaatagtctttacatggaagtgaccatttaaagcaccatttcaatatgccatactgtatctctagagtgcatgtcataagtagaattacatgtttccatcaaatcaaggatataaatcatcaactaagtattcaaaataaaaatccattaaatcactaaaaaaaattttcttgctaaagattaaatcgctataaaatataatgcatgcattcatattgttctccaaccaatttaatcaactaacctggtggtatccaggcaataggctgtatatagcctggaaaacggtggggcaaccctccactggtgtcataggaacaagctcagaccacctttacaaaattaaaagccaatcagaattattattattatttggttcattctcaattcgcatgatcattaaaccagaatgagttagttaattcgttgaaatcaagttcaatccatttctattaccgtgtgaaagagccactgagaaaaacacttctacccccataaggccacacgaaccgcattggaataagcactgggcctggaacgccaccaacctctcgtgaagcatccatgtttgcagcaaatatttgcgtcaataatttaccaaaaactcaccacccaccaagaaaaaaagaattcttcaacatcaaagctttacttattgcctgtaaaatcaaattgaaccaaattgagttaaattcttgtccttgccctaaaaaagaatataaatttcaacaaacctaaataactaaaattactctgtaattaacccaaagaaagcaaaataagaaaaacacaattcaacttaaaaaatcataaaataaaacagaaactgaggtaacaacttacaagttaatgagaatcatcggtcaaaaccctaactctaaaaagacaaaaattcgaatttgggaaagaaaaaataaaaaatactgcaaatgcaagtagaactgtaatcgaattcgaaaccctaaggaagccaaaatcgaatataagtaatttaaggggacaaaaacagaatgaaatgagattaaatggtgggtgagaaaaccgagaggagttgcgatacgatcgaatctaatttcagaaccctaaaaagacagaaagctccgatagagattgtttagaaataaaaataaataataatcataataaaatgaaattgcttttttttttgtttttttaacaaatgaaattacgaatttgattattatttaagggggtttttctaaaatattaaaaacttcagggtcatatataaatttacagagagtttaggggacaatttttagtttctagattggtttggtttggtaataacggtagtagttggtgttggtagagaaccggacgcacgtgcggctagtattgtgggaaccggagaaaactaaccggactacaaggaacatcttttattgttattttttaaaatgtagggaacaatccttttattatattgttacaattttatattttgtgaatataattttatttgttttgtacaacaatacagtcttccacctattctctgtatttttttattattacaagaaacaacaaaaaaaattcaaatgttaggttttctaagacttttatgtcatctttttcttaggaaaaaaaaacattttatcaccattgatcttcatttaaattaaattaatagtattaaattttattcatatatattttatacatcatgaaaaataaaatatcttaatcattaaattctatgtaaaatgtaaaacgttatgatactccttacaaggaaaaaaaatatcttaatcattaaattctatgtagaatgtaaaacattatgatactccttacaaggaaaaaaatgttacgatactaaatccaaacacttttataataaattgaaatgtataaaataagcttagttttattaatagttacaatttacctaagaacttgtgtaacaatataaatttgaagacatcatatcagatagtaaaggtagaatttacattgcatattgataaattttaagtgtgttttgtaaattttaataaaatatacatgaaatatcaatcgttacttatgacattaaattcaagtgtttatgcaataaattaaagtgtttatctttggaagataactaaacgataatactctattttattaatagttacacattttaaaaactcgtgctacaacataaattcaaaggtacgttacaacactacatttaattaattctacaataattaaggtgtacatctttaaaaaataactaaaatgagaatataattagttttattaatagttacactttaccttgtaagaactcgtgcaacaatataaactcgtaggcaccacatcatactaaaagtacaatttaaactaaatattcatataaatgttataggtatataaatttcaataaaatatgggtgaaatatctttgaaagataaatttcaataaatgttacttatgacactaaatttaagtaattctacaataaattaaagtgtatatttttgacagataacaaaaacgaaaatatacttagttttatgggatattggtggctaaaccacttgaactttacgatttgtaacacttaaccacaaaaactgaatttttggcggctaaactac

SEQ ID NO: 36953 - DNA, 5928 bp, Cannabis sativa
  modified_base (42)..(65): a, c, t, g, unknown or other
tttcattgttttagaattcatgttaggatgttaatgaaacannnnnnnnnnnnnnnnnnnnnnnnggtaaaatatatccaacagaaagaactcttctccgttcataatatcaaagtttaaccaatctaagattgtcaaacccatggaggagctgcaatttcttgaaagtaggatcttagatttactgatattgatacactaacctgaccaagagcaatattgttgaaaagcatcctgcaagtgaaccactccctgcaagtttgcctcgataaaaaaaatggtgtcatccgtatacatgagatgcaagaccggggggctgtgtcttgtaatctggtagcctttgatcaagcccaattcttcttttgccaataccagcttagacaagactttcgagcaaaggatgaacaaataaggcgataatgggtcgccttgccttaagcccctttgaggattgaaagatttggtaagtccaccattcaaaaggagttgaaaattgacagtagtgatgcatggcatagtaagtcctctaaatcaatcatgatatccaaaagccttgaggactttatcaacaaaagaccatttaattttatcatacgcttttgacatatcacatttgatacccatgaaagctttcttcctctgcttccttcccatatcatggacaatctcatgggcaataatcaaattctccgaatccatctacctttgacaaaagcagactggaaagacgatataatcttgtccaaaacaatacgaagtctattagccaaaattttcacaataattttatagcatacattgcaaagactaatggtcaaacttactagcattacttctcttcgaaataagaacaataaaagtacgatttacctcttttgtgaatttttctgtggcaaaaaattcctggaaaaaagttgttgtttggtggccgaccgtctcccagtgggtcttatagaatttggtagggaatccgtcagggctcggggattttagaggcggcatatcccagacaaccgctttgatctcttcaagagaagggatatctataagaccttcagtctcctcctggctaatgcaaggagtgattagagaataaagctcctcatcaatcagcggatgggtagaagtgaaggagtataagaaattcgatctaaaatactcggcaatcgaatctctatcctcaatccagtcatttccatcctccgaaatagcccaaataaaatttctcttccttttaacaattaaagaagcatgggaaaagcgcgagttatggtccttatcttttaaccagagctcccttgattttaatttgtttccaaatggcctcatgtcgagcttccacttcatctatttccatcatcacaacactctcaaggtgtaagttctcttgggtaggctccctattttcgacctcggtgagaaaagttttcagtagatcaagttttttcttgcaaaatctgaaattttcttagttccatttcgacaaagcggatgcaatcaaccagagtttagagcagaggataaagctatgatatccttcaataaattgcttccatgccatttgaataacccccttacattcatcatccatattccacgcatcaaggtatcgaaaaggagccttgaaagaagcagcatccataaacgtgttgagaactattgccaaatggccagagtgtcgaataggcaagtttttagtccctgattttacaaactgtgaaatccaactagtagagtagaaaactctatctagtttttcacaaattatattgttccaatcctagccgtttgaccaagtaaaaagagcacccatcccttcgaggtccacagcaccacaatcaaaaatgaaattacggaggccacgcccttcccgttcattaaccggcctgcctcccactttttcactttcattgagaaccgcattaacatcccccatgagcatcgaagcatctctaaagttgctgatagtatccatcttcgcctcccaatactcttccctttcgtctcttttgggtggagcataaacaaaacaccccacccaagatttgaaattacgatcttcaccaacacgggcaattattttgccagtatccatagaaagaatttgaatatcccacctcgctttccaaaaaagagccaaacctctggttgttccaatagcagaaacaaccacaccattgttgaatcccattctttgccaaatcccttccatgtcccagctttgttgtttagtttccatgagaaaaaccacatcctgattaacgctacgaatcaaaattctcagcgatttcactgcttgaggtttgccaagaccttggcagttccaggatagaaataacatggtggattgggaggcatgttctgacccgcctccttagcctgagaaaaatccgactcacaaagcacattttcgacaaaattctttccgttagagtagtgtctattgatcagaggcctttctcgtaaaggagagacatgggtggtcaacacttcagtgctttcctcctccaccaggccttcacagaatcaccataggttagaacattagcgtctatcttggacgaatctccacacttccttttccccaaacctggagacttagaacccagttccactgggccccagctaccgtgatccgaaaccagatcatccaatctacgtttcttccatgggcttggtccaatgagggagttcttacatgggatatccaagcccataaagtctttccttgccaagccttttagtttttgtctaaggcccaatttcttcttggtcctcgaaggatcaagcgaacccttgaataccattaccagctgttcaatttaagcctcggagggacccactgtgttagccacactacctccactatcactgacagtactattagggggaatgacaacattgtttccttctttccatgggcaaaatgactccgtcacccacgtcctcacccttttcctgtactattgtaccttccttaaccacccctaaatttgaaatcaccgtttctagcaccacaccgttgtcgatcatgccatcctcctcctggttactcaaacatacttggtggatatccgtttcaaccaacgctcaataagcgtagcctccatctgaacgacatcatccccttcacaacttcttccttgcccagattgaggttctcaaactcccttgctgcttctttcgcctgaatctattcaaaaatcgtgcttcaatctagacccatacctaaccgatggtccatacataggaatagtatggttgaagtcatcatgtatcagccgcctttttcttctacattgcacctcctcatgaccaataatcctgcataaagtaaatacacggaagcttctcatacttaaaatatcctcatagacataccccttcctccattggaaaatggagtcccacaaggatcggtttagaagcattgatctccaccctgaactgtataaacttagtagtagggaacccctttttccacatacgatcaacactgataacaccgtctatcctgtttgcaatagctttagcattatttgttatgaaaaaatgaaggggtacatcatatacttgaacccagatagggaatgagtcgaaactagtggaacgccatctcccacccactagcaaaggcttgagtatgggatgaccaccatagacggcccaagggcttcggtccaccacaaaagctgcttcattttgtttctagaaccagagagtgtaaacattcgtgtcctcctccttcttgttccaccccgtaaagagtcgccatttctgggcgaagacagatcgtaagaggcctttatttcaatgtaatcgtgaccagcttcttcgtcttgttccagtgaaagctgtagagtttctctgtcactgcactccaccatttccaccacttattttccttttgaactcgccattgaaaaatagccaagcacaagagctaaacaaccagagaaaagtgtcttgaaaatctaacacagggcaagcaaagcacccaggatcacagaggatcaaaaagggcagcgaaatatatttcagaaaccctcattaacgagatgtacggagagcgtgcgtacgaagagcaatttatttttttagtggtttattcgattcaaaaaaatacacacaaattacattgatcatgtaacaaccaaaaagtgtgttataaccaaaatattttatgttatgctaattaattattttttattacgtaataagttttttaattaatttttaagtgacattttaattgcaataataattatttggtatatataacattttaattgtattaattatgtacgttgtaatttaatagtggtttatcaaaaaaatattattataataatttagcttaatatatattaattaattttaaatcactatgtagcattaaatatttttttttttatttctatttttaatattgaaaaaattatatataatacatatatataaaaaaagtatatcaaattgctcaactcaaattaaaatataatataatatatagctaatttaattcaatccgcataattttaccgattcggtccgcaaagtgcgtatattcgcacttatgtgaatttgattggattaaaaaattcaaaattcacacttgtgtagattggatgttgattaatatataaaagtaaccgatccaattcaatccacacatatttatttaaattttaaaaaaaattatatatacaattaaatattttaatgtaaaaaataataaatttaaaaatctaatacatacaatataaatatatttcaaaacttaatagatcaaatgtgtaattcattcttacatataatttatgttttttttacatacaatttaaaataaaattaaatattttgtttcgacttacaattttttcttttttcttttgaatttattatttattttaatttattgttagagacataaaataataataattttttttgttgttgttaattatgtgaaaagatatatgttttaataaaaattaaataataaaatattaaaaagtaaccaattcaaaataatcaatctaatctgtatttttacgaatttgattgaattagattcaaaatatgaaatccgcacttaatacagattaaatgtattattaacaaaaatagtacggattgaattggataacactcctaaaataatgtagagaaaatttaaagaagctaatagacagggtggtgtaaaaacttgatgtaaaataaataaaacaaattatattttagtgatatattttaaaaaatggagtaaagaaacatttgaaaatactttttatcttctaagttatactaattatagtttggttcccaaatatctattgagcaacttgtagagtgatacaagttaaaatacttgcagaaagtgaaaacgtgttattcatctctcaatgtgttattcttttctaattaattatgtaagttttacttctctccgagtaaaattgattaggtacttttataataaaccatctaaaaaagatatcgatacatatttttatatgttttgatattttaaagaattttttagttcaatttttatttttgtttacgttgtaacgattgaagatattttgaaattttttgagagatttaaaaaaatttaacacgtcgaaaatagagtttaaatagtctattgcatgcagaattcttttattatatatgcgtgtgaaataaattgtttgaactaacggtgtttgcggtgcgggtggtacagtttttgaacattttttcaaaccaatacgcacatgcagtttttttaattttccaaactgcacctacaacacaaaactaaaaaattacagaaaccgcgccgcaaaaaatggtacggtgcgatttttacagtttggactatcaccaataattaaactatcacaaatacaacaaaacttgagcaacaattgtcaaaaatac

SEQ ID NO: 36954 - DNA, 2171 bp, Cannabis sativa
ttggtgaatagggggattttgagcaattggaggttatggaacatgatcttaatgggccaaaaaatggattgggggtgggtcttgcttcgcaggcccaccaagcattatgagtactataagttggaattatcgtgggcttgggaacccacgggcttctcaattccttgaagacttagtgcttcaaaagaaacccagttttgtttttgtttgtgaaactatatgtaaaaaagatgttattgagagggttagaaattgtttgggcgttgaggcttgttttagtgtggatccttttggtcgaaaaggtgggttggctttgttttggaaagttaaagaggaggcttctctgttgggatattccaataatcacattgatgtggaaatttctcaagaaggaacgacaaaatggaggctaaccggtttgtatggagaacccaatcgttctcttcgtcatcaaacttggacccttattcgcactcttcagaggaattcccaactttcttggtgcgttattggggatattaataacattgggagtcttgctgaatagaaaggggggagaccttatccaaattctttgattaatgaatttcaggagatgctttgtcaatgtggcttggtggatatggatcttactggttaccccttcacttgggagagaagtcgaggtacaaggcgttgggtggagagtcgtttggataaagccttagtgtcttctcaatggctcaagacttttaatgatgctacacttactacttgtgagttttcttcctccgatcacacacctattcatttggagcctactgccttccaacgaagtcctgggattgcccactttcggtttgaaaattcatggactcatgaacctatgtgttatgagattgtcaatgattgttggagtaacaatcctcttctctctattcaagataaaataaaggtctgtgcttctactcttgctacttgggggaaggagttcacgggtggttttaagagaagaattgtagctagtaaaaggcggatgagtttgttcaaagaaaagtccgatgaacaatctatacggttgttccaagaagctcaagatcaatattttggtgtattggctcagcaggacacattctggaaacaaagggccaaacaattttggctcagggatggagacaaaaatagtaagtattttcatgccatggctagtgctaggaagagaagtaataaaattcaaagtttatctaattcggatggtgttagtttcagttggaatgggggtttggaacaacttattattgattattttgtctctctttacacggccggttcggctgattataaccattttgtgagtggtattgtgccttctgtatccgtagttcaaaatgctaagttacttgctgacttgactgatgaggaaattagaggttctatctttcaaatgcacccggataagtctccgggtcctgatggcatggggccgggtttttttcaaaaacactgggatatagtcgggggtgatgttaaacaattggtgaggaacttctttgatactagaaatcttcctggtggtttaaatgtaactaatcttttcctaatcgcaaaaaagaagaatccttcagttatgggagatctcagaccgattgcactttgcaatgttcactacaagattgtttctaaggtcttgtccaaccgaatgaaagttgttcttaatcatgtagtttctgaaactcaaagcgcttttatccctggaagacttatctctgataatatcatggttgtgtttgagataatgcatttttttgaaaagaaagactacgggtaagaaagtttcatggctatcgagttggatatgactaaggcgtatgatcgtgtcgaatggtcttacttgagagctattatgatccaaatggggtttgatattcagtgggttgatatggttcttcattgtgtgtctacggttcagtactcggtggttcatggtgggcatgttatgggtcctattactcctacccgtggtttaagacagggggatcctttatccccatctctttttattctgtgtgcagagggactttcaaacttgatcaaccagtatgtgaggaataatcttcttcaaggcattcgggtggctagaggtgctccgattgtttcacacatgttcttcgccgatgatagttatttgtttt

SEQ ID NO: 36955 - DNA, 5930 bp, Cannabis sativa
tatttcctattgttgctactgttttgctctattttcttttattttgcttcatgagtattgaattacacccggttggtaatatgattaaaatcaatgtcaatgtaactatctttagccatcacaataagtatgggtatggttgggtggtgcggaactcttctagtcagattattatgacttggacagtaagctaaatgggaatggttgatcctgttcttactaaagctatcggagttaaagaagtgttgagctagttgaaataaacaggacaatatgatgtggtggtggaatcgaacaatttggtcacgatccaagctatccaaaggtcattaaatgatttttgttattctgcatttcagagtgcagactaattatttcaaatttaaatattgtattttttatttttgtcaagtgatttgctaatcgtgttgctttcactatttggctagagcttcatgattaaatgttagttgtacttattcgaattttacaattctcaatagtttacgtgatgttctatgaaattgctaaaataatatttgtacattacaatagtttttttaaaaaaaatgtatatttcaatagttataagcaaaaacacaaatgacagttgagcaacgtggggattgaacacaaatcatagagaaaataattcttaccaatgcaatgagtcagctcaaaaattaatataaatattgaatttatcgaaaaatattctttcattaaatgtttaatacctcattgtattggatttttttttaattaaaaaagaaaagaaaataagtatttccttttcatttcagatccggtatcaattacttccttctatttaatttttagtttctcactaaaaagggaccaaatttgccaccaaaagaaatgtatataacataacttattgctcaacatatatataataataacttatttgttaaaaaaaaaaaaaaaaaaacagaacctacaatcaatttttaacatccaatttgaatatcataaataatgtttattgttttactcttcaaacaacacccaagagtgtaagttacatacaagtacaaggaacacaatctaaacctttcaatcaacttctaaagtatcaaaacatcacatttgttttaattgttgaaagatactatacctattgcgaatcagactagactcatcaaaaaatatttattgactttcgagtttagggtaagaaaaagaagtaaaaataaattagttctaccagcctgagaaatgtattactaccaattcctaggttttcctggcatcttcctgtcttaagacaactttctgcattaaagagacaaaaataaactcaataccatttgcatagcaacaccatgttttgaagaaagagtcaccaacgaagcctcaccataccttatggttgcaatatccagtaaaatcctcgagctgcgctgcataggtggaaatttttccttttacaggatgaggatctatacaaacatcaaataaagcttagtagtatacatttatagaaacagaactaggaaaaaacaagttcgtttgtagggtcggaactgcaagtaaagttgaatataacaaataccctaaaaggctaaaactaattctatcatccccaactaaactacatagtgagacctgacaatcgaaaggtagagttaatggtgattccttgtaaggtaggtaatgactaatgagtatgcagattatccaagtgaagttgatctacaggtatgagttagcattaggagatacgttctcttttaggtaacgtcatcactgtttcttaagtgccgctaataggaaattagagaaaatggtgtttgaaaagagtaaaagcaaaagacacacacagctatttatgttgaatcaaaatgcttaagaaagaataaacaataagatagtgatatatataagaaatctacattctaacccaagcaatatcacaatctaaaaaaaataagatatcttagaagaagctttaggctttaaaaactaaacagcaacacttgcaatatttcgactcggtgcactgaaagagcatgaatacctattcttggcagttatgcatcagaaattcctttatatccttctttctcaagaattttggctatgttgatgtctcctgttttcacaatttttccatcctcctattgtccaaagaagcaaataattacattgcaagggagtgattaattgaataacttgtttatgactgctttgtaataataacaacaccatagtgaaaggagaacaacactacattagcattagcagaacatcatattccaataacaatagcttttttttataattttaatttgatcactaacaactacttatcttcatatagttatgtccttaagaattttcagtttacatccaaaagttaaaaaatcgtaagttaacatgccaagataccatcaaagtctagctgtttcaatatactagaaataccatatatggatttcttaagtttgttttctcccaaacaagtatcttccgagaaattgtgactataataatcaaaccaagtaacattcactcaaatagaaattaaaaaaaaaaaatagaaagaggaagcaaaatggacgaaaaactttgaatgaggaataacatattcttgaggcagaaactgtaaaaaaaaaaaaaaaaaaaatcttttaacggactttgaatgaaaaagagacaaactgcgatacaagaagtcgtcaccagttcatatgcaacacaccaaaagttcacttccagcctatgctatgcagctcttgacatgtcaaaagagattccttgtttttaaaattaaacttttacattttttatttcataagacaaccaaatcctaccttaaaagtattgaataatttaaactgacttaccataacatgaatatatgaaggctttatgaattccaacagtcgcagataatgagtaatcatcaacacagaattttttggagtcagtaaactgtttactgcttttgccacatcgcgaagtgcgtcaacatccaatccggaatctatttcatctaatatagacatgtcagcccccaaaacctgaaaacatgcataagtgtccataaacagccccataaatgatatgatcaatgtcatgaatatatatcatagaaaacagctgtacttgaaagtcagaaaacaggtccatcaaaagaaaagaaaaagttgaattcattacccaaacactaaaagaatttcaaaaacgtataggaaggtactcattaaaactaactaagtacgtgtacacttcatattacttctaaagacagttgcccctccttcccaacaatatagataaacattaaaagcttgacttgacaatgcaatcttttttttcctttttttgcatatacaatagctttagataatttggcttcactgttctgagatgatacataatcacagtataatggagaagctactagaataggttaaagaaacatcataactaagtagtaagagctgtacagcatcaccaagagtttgatgcttaagccattgtttactggacaatatcattcttttaaatatttttaatttttctcatcaagtaaagtacactatcaaaacttcaaactgatatggcagtgaagcatagcagcaacaaggaccttctccagaaagcaagagcataaatatatagaacatagtacatgaaaatttctgtcagatagcaaacatgaaaaatcattaacaataattaacataccgcaagttgtaaaatctcattccgcttcttttcaccaccactaaatccttcattaacatttctattgagaaagtccgtcttcatgttgacgaggtcaagtttaggaaatatgtaagcatagaactgcaaggacagaacagcatcttatcacagaaagcaataaaatgttttaagtatcaatgaaagttagccaatcaaacaatcttgtttctttcaaagaaaattcactatacgcaaagtaggaaagaagaatatccaagtaatgatcctcgggtcaaaaaacaaaggatagtgagaattagcgaagttatagcactaaggtagacattatagcttagaatgagttctggtcatcttcttctaccaaagtacaagaacacagtttcatctatttattcccacccagtgttatttctcaccaaaaatgatgatcaagacgcctacaactaattgacacttccaattccatttcatgatatcaagaagtactacttagcacaagtccttcatttttacctcatatgcataagattagatttagtatgcactcacattaaaaagtaaataactgaaatcaagtcaaaaaaagattattcagcaaggacgatgtcttcttctagattgtcaaaatactggatgaaaaacaaaagataatgaagttgccaatagttatatacctcgattggtccaagctccggcagaccaagttttctccttcgagcattgtaagccatgttcagaaagtcaatattgctcacacccggaatctcaactggggattggaaactcataaaaaggccagcaacggagcggtcctctggctccatttccaacaagttctcccctttaaaaaccatactaccccctgtaacttcatagtctggatgacctacaagaacctaccaaccaaagtattcaggcagacataattacattttcattttccatcggaacccaaaaaataatcaaaaaattctacagaatttagcaatattaaacccagatacaatttatttctcacaaaatcacttaccttagcaaacgtgctcttcccagaaccgtttttccccatcacagcatgaatctaaacccatccaaaaacaagtaaaacggaagttggtcacgcaattatggtcttcaagggtaaaagttttgaaattggaatattgtttaagagaaaattgactgacctctccttcatagacggtgaggttaacgcccttgagaatctcctgcttcgattcggcaataacggcagtcaaatctttgacttcgaggaggagttttttgtcgccataggagccggaggtggtctgagattctgcggtggataggctggcggagacggaaagggaagaacggtggcggttggagcgggaagtgaggagtgaagcagaagctggaaaagaaagatgggataggggaagacgagaggaagagaaggagtgaggatgaggaagaagtgtagcagccattggagagattatggttgaagtggaagaagaaaggttaaggtgcaacggcatggaatatcccatttcgtttggccggcgcttgtttggtgttagcctcttctgttatttggttagctaactactccgtctacattttttccaaataaattgtaaataatttattagaacaattaagttggcatagtaacaattttgttttatttttatttttgaaaaataaaactaccttctataattatttttattttttaattttaaaaacaaaaaataaaaacaaagaaaagaaagtttctcgtttgggtattattaataaaatagtgagattattcctattgtaattaaatgacctaaagtatagattgtaagtcatggtatcttgtcttttgacatgcaaagttcgtattggttttgagtagggttgttcatataaaccgaaaaatcgtggtttaaattcggaccactacaattcgaaccactgtaaaccgtaatcgggaaaccatttttgatcgtttggttcggttgcggttcgtaataaatagttaacggttaaaccggaccggaccgtttataatatataattaatttatatatattttatatatgactatatgtataactttgaacttttttgtgtgccaaattttttattgcatgaattttagatttttatgttatgtataacttttgagaatatttttatatcgttatttataggttatagatctgttacttatcatg

SEQ ID NO: 36956 - DNA, 6242 bp, Cannabis sativa
actgttgcttccacgatgattcttccgggtttagtgccggcgccgacaatacagtgagacggttagttcgtttttcttttttcatatgctttagttttctgtttggtttggtgattcaaatttgtaacatttttgaagattagggttgttctatcgattattataatttgactagttttggtattttaggcttgtttttaactacaataaggaggacattctaggtcggcatgatgcacctgtacggtgtgttgagtactcttatgcagcaggttcggttttttgtattttaactttgtttccatttcagatttactttacattttgtcttttcgtattctatgacgatttgggcattggagcatgtaatgcttttcttagagtgtatctttgagataatatgctaataactaatctgtagcaatcttactacttttggttgaaacaataagatatttgtttggatagtccagccattgaaataattagtcacttcatttatgttttagcttatcacattgcatttttaaaccaatagtcagaaatggttacccgggcaagatcagttttctaggcctttcaaatagtacaaccctgccattcttgtcttgtttaagttttatagtgcattaattgcttctatctatttttaagtagctaatatgctatggtatttactcattactacatttgtagtgagctaaaccttttaattcataacttagtttacattttcacaattgaagatcagaataagatataatatattataaactttctgctgtcctgatctgtttatggttgcaggtcagttgattacaggaagttgggacaaaacactgaagtgttgggaccctagaggagcaagtgggcaggagcgcacccttgttgggacatatgctcaaccagagcgtgtatactctctttcattagttggaaatcgtttagttgtagcaactgcaggaagacatgtgaatgtctatgatctaagaaatatgtcccaacctgagcaacgaagggaatcctcattgaaatatcaaactagatgtgtgcgctgttatccgaatggaacaggtatttatttgttaggtgtgaaatatggatgatgtgtcacggactttactttgttcagagttgatttgaatttctcaaaatgttcctcaagaggattcaagataatttcatgacctttgtatgtgcttgtatcgttgtatttatgtatgtatgtatgtatatgatggtttttgggctctgatttgtgtcatttactcatgttttcttctacctagtattgggtatgcttactgatttctctacattttgcaggatatgccctcagttctgttgaaggacgggttgcgatggaattttttgatctatcagagggtagtcaagccaaaaagtatgtctttctgtagtaatagacatagtagtatatacaacaagaagcttaaagctgttaacgttttgctttttattaaatgatttttttttttgcagttttattaggaataagtgctgtttatccatttgactgtttttctatttgcttgatcctcaatttataaatgagggattgatgtgttattttggagaatacccctgtaaatttggattaaatgatttgttttacaattttgtttctcacttttttcccttgcctatcatgcaaactgaaatatccacgtaatgatggtagaatgctctatgatgtcaatagtcagttaattaggatttgcaggctttcttaaggaagcttctatataaaaatataataacttttatgtggtactagcagaccactttttccttttatcagtgttaatggtgtgatttttttctttttcttacaggtatgcattcaagtgccacagaaagtcagaggctggaagggacattgtctatcctgtaaatgccattgcattccaccctgtgtgagttcttattatccttgtgtattgagatgtttaattttacaactgctgggtagaaaagtaagacgccacaaaccagaacttctgataacggggttgttaggacaatcagcagtattacataactgacattagcgcatcaaagatgcttgctgagataacttattaagcctatgggaacgttaaacttgcttgccaataaacttttctcagctgggaaaatgcaatgcaagttcataactgacattagtgcatcaaaaatgcttgctcatataacttattaagccaatggggacgttaaacttgcttgctgattaacttttctgagctaagaaaatgcaatgcaagtttatataggttatgtattgatatttgacggaggtccatatatatgggacaaagacaggctagtctaccaaattcatttgataggcagcggcttaaatggattggtctgttggttgttccatgttagcctttttgtgtttgcccatgaaattcttatcgctcacttatatgttccaacttctcatcccttcaaattttctatctcttgttctaaaaatttcttttaaaaaatagaaattttatttatatttaccttgtatcaatcttgttttgtgcaacatatcatatgcaatggctggcagttattactttagtgtcagaccaggatccaaaaacttttgaagtgtggatggatttgagctgtttagattgacaacccatgcagtttgataatacctttaaactgtgtgcgtctgatcaaattggccaaaccagatcacaaacacactttttgcatcttgctgaatgtttttttctatcagtatttgtatgttactttagtgtatattttaaactcgactttcaacattcgaagtagaaaatgatttctgttagccttggaaaaatttccttgaactcaatcatttctatttctttgcatgcatctattatttaaatctttctctaaattcaatatctagatatggtacatttgcgactggtggttgtgacggttttgtgaatgtgtgggatggcaacaataagaagagactttatcaggtaaaatttcaacaagcaccactcgtttcatttcctttagatagaaacattatcaagtgtggaaatttactttcattttattttgcctcccttagtactcgaagtatccgacaagtattgcagcactgtctttcagcaaagatggccgtcttcttgctgtggcttctagttacacattcgaagagggagataaaccgtaagaacaaatcttcacttctcacgcaatctcctaactcaacaaatatttgacataattttgttcattttgcagacacgaaccagattccatatttgtccgcgggataaacgagatagaagttaagccgaaaccgaaagtgttaccataatcatcctgaatgattgattgaaattgtagaatttgtttttgttggacatagtattcatccatagtagcctgcgacgctctcggtctgcaattaagtttgtcctacttgatatgtattttaaatatctagttgaagtggccagacaatagaacaatgtaccttttcatcttatatagtctttgtggtaattacatccataactttcctactcattaaaacagatacttaactattgtcacaaggatacggtgtcaaaatttgcacgaatttcagtcaagtataactatcattttaggcatattcacaagcaacaaaaacgtcactttgtgggataagtcataatattgaacattagcctttgccaaaaagtacccacatctaagaaaaactactgtaaatgcataaaaggactaattggtcgtgaaatggggattacagtatgtctttatagctaggaagttcaataaagccccaaactttaacccacagttcctccatggcacaagagaacacgaggtcaagcatgtttcgctcggtatatcatagtagcctttgatttcttgtgcttcacaccaactacctaagtccagaaggagctgcttgtggactgcctcctgccactcctcgccttgtagctcttgattgagcaagcatctcatcatagttctgatcagacaaaaatgatcagaatttccatacaaagtttatctaaaaaacaaaacttatcatgagcatgacaaagaatacacaattaaattacccgtttctcaaacgcaatgtcacgtgaattgataattttgtctgcaacaccataatctatggcttcttgtgattgtagatatttaggtctttggatatctttagtgatttcttccttggttttaccagtgccttttgctagcagctcaatgtaatactcagtatttgcatccagttcttttgcctgagaagtttacacagcgtcagaacttagagagagacagagagagacagagagaggcgcagtcctaccttaatccacatatctatgacagccccgcttgatcggttgacctttggcagatataactttgctgcgattcaatgcaaggtatcagaaatgatgatagcaatttgtttgccgcgctttgtacacataaagcatggtatattatatttatgaaaccaagtagatgaggatgtaggacaatgctggtgcataaattattctgtgttaattaagtacaatgcagcagatggatgcaaatagccactagttttttcaaagatcatgagtgcattaatttgtggtatatcaaatttcgaatagaagtagaaaccatactggagcagttaggttgcacagcacgataaccctttgctccaagtgatagaagcatcgctgcttgaccataggccataccacagttcaccgtgtagacttctgacttaacatacttcattaggacatgcagatagtgaaaatgaagcagggttaatcaagagaaaggcatgggataatttttaagatagtttcttttactggataaaataatataaacagttgatcaaaactagagcctgaaaaaaattaaaatgggatatataagaaatttctctgacccatgtgaaaaagatggtgggtaaccaattcacttgtttatagtgttgcatttaacctgtaagtgaaaaaacaatctttttatagatactagtacttacagacatcatatcagctatagcatatgcctccgtttcagatccaacagtctccatcttctcattctaattataacagaaaaaaaaaaatatgacttaagtaacacacgaataataagatagtgaatcattgccatgtgtagattgaggttgtttgtacatgtgtacgtatcctgaacactaacctgtgtcccggatgagtttatgtataaatagataggcttagcagggttgtcataatccaaccacataaattgagcaacaagaagttcagttactgctggaacaatctgcaacaatgagataggataaaatgaatattattacatttcaaaagtgatagaaacataagtatttattaaatcatgcctaggaatttattaagacaagttttagtgacttacaggcatgcccaaatagcatatccgagcatctaacaacaaggaaggcaaatcaggaggagcagtacggggtcttccatatcctcttgctcctccaccacggtacatgcttacactcatactatattttgatggacctttctcgtgcatgcctgaaagactccacatacctccatgattcaaatagttatgagaagatgagatgctatcctgtcaatagattttagaaatataaatgagtttaattaattataaaatcgaggttctttaaggaaaagggagcaagaaaatcgattttaattttgtaaggttacattatacgtgtcttcaccaagccaaagtggaaacaaagataaaaagtatgttaagagagtgtacctctgtcactgcttctgactgacgtcggacagggttatcttcggtcatgaacatgtccatttgagaaggagaaagaccatacagatactggggtgcattcttgaaattatccatcactgtaaacagaagattactctagtcgtcagatgaaacatataagattatgaataatcaatattcctatattctaacaaagagtgcccttacagggagtcccaaaagcacttacgaaaatatgaaaatctgttattggtatcacagaggcttactgaacactcacaaattaccacagaagacaaaaaaagaacataggtctgcatacttgcaatcaagctaaaacaatatgcagatagtaagtggataaacaatcatttgaacaaactattttattcgaaaaatttccaaagcatttcctt

SEQ ID NO: 36957 - DNA, 5398 bp, Cannabis sativa
tttttttgtaaggagttctttgtccattttaatgactacatgatctggctcgtaatagtaatcatcttaatctttttctttccaaccatcttcaggatcttcggccttgggatcttcctctcgaccttcattgacgggattttcatcaacttctttcttagtacgttgagtttttttagcagggcgactagttgcctctgttggatctccatcgattgatgtcttcgcccgggctacaagatctacaccgtccatagaagtctctccatcatgaccaccaatttggtttcgggtgagtaccatagttttagtatacaacctttgatggcatcaatgctttctttaactcttaatgaaagcaccaaaatatttaccgagatttttggaaacaaatttattatatgtgaaagctaaagaaattgatcaaagatacagaaaataacaatgagaatttttatgtggttagtgcattaacgagccttagctcacgagtcaacattattacttgaaagctagaaaagccttatggtttacaagaatgtttgagctttacttttcctgggcaattgagaatgagtttctaacccctttgcatgaaggatttttcgtatatttatagttttaaagttcttacttattagctcttgcctattgatatggtgattacaagtagcatattaacatgtgcttatttggtgaagtcctgcccatgccacagcatgttgacaattgccaaaaaccgtgtcatatcttcgtggagaataaagacacattaaatgcttgatttccaagtactatctttccatatttaagaagatattatcttcggacgagatccgtggaagttaattcctaatatcttgggatcttgtaattaatgagaatgcttctgagttagacatctggatgctcgttttttacttctccaaatgttttgtttgatgtctcccgaatatacgctgtgctggaagagtatctcgcctagacaagccttctatcttccattagaaaataagttcttgctaatggacctaatccattattctgattgggcccatttttgggcctgaaataactaaattgtatttgatgttagaattctacgtgttctcatccaaaaatacgaataacaattccccatatagctcttaaaatgattgagaaaatgagaaaaaattgcaagataatcatcaataacttctccctactcattaatgaaactagctatacgattttcctccctccatttcataatactagcttggaaatgggaggaattttcatctctatacttgagctagcttatcttactcttttgcacaagaaagctatggtacatcttagcttggtaattgaaatttttgcaggcttccttctcaatttgttgataataaaggtctttgggatgatgttgacaattgagtttagctggttgtaactttatcttggctttttgaatattctactccacatccccaactagtttagagttaaatctcctcaaaatgtgctttactatgagaagttttagaaaaattccttttcaattgctatgatacataagcttcctctagttttccagaaccacccttaaactccatatgattagtccagaaattgtaaaatttgaaggccttaatacttgggtcattaacaagaaaatctttcattaaacaggaacaatggtcagaggttgtctcccactgaattatgggtccaaaatcaggaaaagcatctaaaaaactttcattatttagaaaatgatgaatacgagaatagatattcttacttgatcatcctggttgttagtctaagtatagaaagaaccagaacttttcaattagtcagtcaatccgagagctaactaattagaagactctaatatctcagcttgagtcacacaatgacctctatatctattgttcttattaagaggagcattaaaatctcctattcaaagctaaggttttattgggaaagtaagaatttctaggctctgccataacatttttgtagacttaatcgagttgtgcccataaataaaagtaatacagaaagtctccttttgccctgcaatcttggcatagcaatacacatactgatctatttctgcaatcacaatgacttgcactaacttattcttccacataataaggattctcccttctatggcaggactggagtaaaaattccaacctgcaaagcttttattcatcatttttactatcttatttcctctcattttagtgcacaaatcacaacacttttaattctatagtagtacagaactacttgttgtttattagaactattcaaaccctaatgttccaactaagaatatgacaattattcatagttaatcattaggatggaccttactctcaatctcttttgtaggtagctcttagagaacctcaaaagtatttttatctttcttcaaagctacttgaacatcagtttttagcaaggtttatagatttggatcccttgtctctttggtcacttcagggtttgccaattttgagtgtctttcatttggcgcaaaccattcagatgtttccctatttcagtggaaggaccctcataatttgtggcagctgccaccttaactgctggatcattcactattgtagaatctacagtagatcctgctacttgactcttgtcaatttttcctacatcagcctttgttgtagcatcaacaaccttgactatagatactacttttactttccctgagccatttttttttcctgtaatctaccatactatgaccataaccattgcagttcttgcacttaataggcaaccattcataatccactccctattccaccaatctaccttgctcagtgatgtaatgaatcaatcgagaaggttggccagttatatccatttcaaccaaaaaattagcaaattgaactcttcttctttttttggtaaatttgtcaactatatttggtttgactattgtgcttacaagagcagttaagatttttctcctctaatattataatccaagatcatgaagccttattcaaagaggaaccgatcaaaccagactaactacattcaaattcgtcaaccaaagtcgaacaatgacaggtttcctattaaattggataacccctctttcaaggtcttaatcccaagtagcatcgtcattgaacttgacaatcgtatacccttccgtcattcgaacaacttgagcaatgcctaaattttcctagatccttttcacaaaaccctcaaacactacaaatggtggattagcacccaaaaccatacaaatgactattgatctccaattcattgtctgaatttttacttctttaccatcaatttgagcaatttaatttctctccatccttcagcataagctcagtgtatgatagcttagctgaagtatagaaaatattacctaaagtaaatttttgtcatttctttttttgtagaggtctagattcctcctgttcctgttcgtctattcatcagcttggcgaatttttttattttgacattttcaaagatttactaattcccacaatcttagagttactcaagataatatcccttattgaaattgcttcaacaattcctctattgcttcatggaagcatttcgtctcatgttctttatcacaatcggaatcttggatcagtggtggattgatactggatgcgggctttcggatcatttgcttcttcttcgtcatggaagagacagagagagagaagaccacacatgcctttgtgaataactatttgttactcgtttttagtttctaatttagtccctcaataaattagaaatactacttaagatatttgtatatgtagcacatgacactttaatacccaatgacccacaattactaaaattattactttatttgggtcaaacttacacactaatacatatgagcctatatttagaattttaataatccaacagtttatttttctcaagtgtgctaaaatatatatagcaatacctcatatttttatcactccattagaaatgctctaagaccatctctaatgggatatgtaaaaattgagctatatttggcacaaaaagtggttttgctgtgacatttttatatcaacttttattattgtgctttatttcataattataaatcttgattcaaaatttaatatgttatttaatgttcacttaataatttattaaaaaaataaaataataacaatccaaaggtaaataaaaaatttaataataataataaaaatgcaagtgatcatttaatataaaagagcatgttaactaaaatttgataataaaatatttaaaactacataatggtaaatacaaaagcataacatgtattatacattattaaagcatttaacaaagtaaactatattttatatttacatcacttattacattatcatgctctaataattaattatattatggttgatttctttttacatagtttgattttatattggggattactagactagctgctagctagagtagaatgaatgaaaataggaaagtatgatcaaaacataatgcgagcccaggattaaagttgagaggggacgaatttttttttcataaattaagaaaggcgtaatttaatgttctaggtaatacatataatatattaaaaattgatacaaatttatatttatataatattaaatataatttaaagtaaaaaagtgacaatgaaattgttagttttaatggttaagacattaagtaagagttcaaatcttaagactatatttccaaaaaataaattttcagaattaaaaataaaaatatctaagttggaatttgaatctttaaggaaggtacattaatcattgaaacttaaagttaatgttttattaataattataaatatatattgtaactaataaaaatatatacataattttttttttttttttagagggtgagagatcttcgcctttggtccgccccacactataaatttaattaatcgacttgcaaaacaaatgtaatagagatacgtacgcatcgtcaatttgaagcaaaataaacttttcattggttcgttttatattttatttcaaactctcgtgcatgaggaatatttctttagtatcacaacacaagtagtgataattcactaaagatcacgatcagctaacctttacattgattggctataaatatatagccatgcatgcataaattattaacacacacatacctaatattggatgtagatttatataattgtatatatctataagacaagccagtcactcattctaaagtatcatgcattttgcttaatatatattgaaagtacttgtcatgtgtataatttagggtcctaccttatatattttgtatacaaatgtacatatataattacaattatacagct

SEQ ID NO: 36958 - DNA, 2578 bp, Cannabis sativa
tttttttttttatagatgttgaaattgtaggatgttcaatctaaaccaatgaagtaagatgtgacatgtgtaaattttacttttgaaatttatatgattgtttcatagtttctacttgggtttttgcaagctttcttgttgattttacggttgtaattattcatttttgattgtgttaaaggtaattgcgttcttgactttcttctactaaattataagttgggtagtttaccaagtaaggtttccgtctaaggtctcatctcatgtgtttttgttttatggagctgtcttctcatctactatttcttagttgacttggatgaagaggcattagtgattgcttgagtggtatggttataacttgtgtgagtattctttcaataaaatttagttttttgactcttgttatttgtggtttcatggtaattcgttcattatgttatttgtaattttgtctaatgatatggttgtttcctcttttgttttgtaagatttcttgttaaattatgattgatttggaattcttttgattttttttctttctatagtgttctttggggttaaattatgtatatgtagaaaatattaaaattttaaatttaatatagttttatgaaagttcctaggtagtagtattatcaaagttcctataatcctaatatttcgtttcgattatgttacggctttattctttttacttgatcataattcgtaattcaaagaaataaagttttgttaaaaaaaaataattaatcaattaagaaaaataatagaagttatgttttattttatgtttggattagacatgcttgaaagtataaacgacttatgtgcttagccttagttccagaatttgggtgtttgaaattgacaaactgaagaaggaatagaatcaaatgggtttttgattgggtgttttattgtttaccttgttgcaggtttcatgtccataaaatgtcttctacccatgtttatgttcgattgcataaagggcaaaccattgatgatataagcgaaggattactggaggactgtgctcagctcgtcaaagcaaattgcatacaaggtaaaaagtcctggcatgttttttttcttattctgtagaaaatagaaattttatacaaacataaagtagatgaatatgtataaggttgacaactagttgaaaacaacttggcaagtttctcacatgaccacatgttagttcagtaaatattggattgaattaagcgtaaccacttgggtgtactaagaagtttattcaactgtttagttgtcatgtaagtaaattttggtgtcaatgaagttaatttaatcctgatatggcactaccaaaatgaaactttgggtgttgagattaaatagacttttgttatttaagtatgccaaccttgctggcttgctctatagttaggttgactcatgcaagatataatgtaattaactatagtgaattacaaaccttgctttcgatttttgattgaattctagatgctagcatggaaataaatgttgtcttttccagtcaagatatggagaagtggattgggttacttgttgaaagattgaaagaatacgaactaaggaccctagatggagactaaatttctttggtgggcatatatatggtttttcaaattcactatccttggctccatttggtggggacaacacaacatgataatgatgcaatttattgcaattttggcatgcaaaacagccaaaaaaaaaaaaaaaacaataataccaaaattattgtgattttgtaatgctctttaagctcagtgactaaacaaattttcatcatgattgctaggttctgattttgttgcagcttgcaagcattgcgcttcaagttgttaagaggcttatccaattggccccttcatctcacagggaaattggctttcgttttgaattatggagaaatgaatgtacttaaaatttgatcttttataatttaatatgtagtctggtgtttcagtttgctatcttttttgcttgatagaggaatagctgtgatttttaagctattttatttctcaattttatgagaaaaaattattttgtattgagatagatattcacattggctttctatagtagtaggctaagtcttcaatacaaatgtttagtatcaaacctgaatattatagttttcattgagcttctgcattatgattttttcagaacaaatagttatttttcattaatgattttaggttgctctttggtcattcacattaaatattttagattttttctttaagagtggtgtatagagttgttatttgtaagataatttcttgctgttaaaaagtgtaacaaaagaaaaagcattaaatgctatgtgtatgttttatcaggctataatgaagatgtgaaagacagaggatgaaaacaaagaatgtagaagtggccaggattttggaaatttaaatcctcaagtcttcaaatccttctgatattgaatcactttttggtgcgattaacaatgatcattttgtatttggtagtaagttcactaggtaatctcttttacatatagcttttgactttcaaagttgatactaatata

SEQ ID NO: 36959 - DNA, 2290 bp, Cannabis sativa
ttatatgtgaaatgattgtgctaatacgctcatgaaaaagatctaaaagcacatcaaattagattgattctgataaatacaagtgaaaatccataaaccaaatcacatttcagtatttcacaactcttttaagccttcttagctctactactaatactctacttgactaaaaacacagaatttccagaacaccaactgtttgacaaagttacaaactgaactttcctaaataccctaaacgccagtagacccaaacccgccgctacctctaacagtggcatctaaatcttcaacctccattacatctggggttattatcttctcaattatcagttgagcaatcctgtctccaactttgacttcaaagtcaacatcagaaaagttgaagagtataaccccaactggacccctataatcggcatctataacccctgctcccacatcaatggagtgcttccacgccaacccagatcgaggagctaaccaaaacaagaacaatttcacctcaaaatattgccaaaataaagagaaagataattacaagtgacaaaaaactacgatgggttataccgattcttgcataggttccttctggtacagcaatactcagatctgttggtaccaaagcttttcctcttgctggaaccttcgtatctttcgcactgcaaaaatttagaaaacccagaaaatatattacggaaatgaatcaactttttgagaagatggcaaaaataaaatatgggtatttgttttccttacctcgatagatcgtagccagcggagagaggagagcctctggatggagtaacagcgttctcagagagcttcttgactctgaaaaatgatgggttggtctgagaaggttgatggacgccattttggtaaagcttgggaagcttggttggtgggtcgttgatttcaggggcgttgtgggttgccattgtgatgaaacgatgaggaagagtgaagcgaaagggaaaagggtttgtggagagagcgatgattaaggaatgggaggaagttggggtaggtttaaatagggaatgagccattttgactcgtttggcgccaagatttcccgctctgttttattgagaaaggagctcaaacttcgaaggtttttttcttttttttaagcttacgggcatatgaataaataaataaaaggcttagatatttgaccttttttgaatttttcaatcgttaaagttttttaatctaagtatttttatctaatttcattcaattttactaatctatgattatttatatactaaaccatgctccccaaacaccacttgagactagctcaagtgggtaagtgtgtgttggaggtcctggttcgagtaccatgtaaaacataattctaatatataaacgattaaataataataaaaaaaaaccatgcctctcgaaaaattatttgtattaatttttatttggcatattagcggcaaaattctttgagctatatgatttgtaacactaaatcccataaacttatttttttaacagcaaaactacctgaattcaagagcggatccatgtattttaattagtcaaaatatatatttctaattaaaagtgatatttataaatatgatacaagttttaacataatagttaagttttatagcataattgggatcaaatcgcaataaaagcataatcacattttagtattttaatttttttttaatctctatcaataaaatttgtatttactatttcaatcattgaagtcaatttttttatttttactgtttttttttttactttaactatatttaatactataaaaatacaaatttacatcaatttttaatatgttatatcatgtagaaaaaatggtacgccctccctcacttaaaaaaaaaaagtttgccctctcaacttaaatcttgagtctgccactgcctgaattgcacttatgttttgatttttaccacttctgttttgttgtctctctcttacttatacttaactctcattacattctcgtcaatctagcaagtgagtgtgactaaatatctgtgtccaaatttctgcgttaatattttggtactttcattgagaactataactcgagacgcttatcaagatggttgcaacaaggtcaagtgttgaaagaagtaccacaactagccaacccaccggggcatgccaaccactcaaactagtgacagacgacacctgcatctcaaatgttaggtggaggcctcgaaactagctccacagctaggggtgttcgcggtgcgggttgtgcggtttttaaccattttttcaaacc

SEQ ID NO: 36960 - DNA, 6916 bp, Cannabis sativa
tagttacagtatcatccctgtaaacttttaaaaaaattcaaataattttcaggataatgatgtaagcataacgaataccccataaaaaaaatagaaaaaaaaaatattctaacatatgttttcaaataacaggaaattaatggtagcactcctctttttcaattctcctgtaacaaagtcaagcaatagtgacaaataagtagtaatcagaatagaagttttcaatgacttcacaaatattactccaatgtattcttatagtcaccatgatttaaaattatacattgctaaatccattaaccaaatttaaaggtttctaccaatttttttgtttttttttttttgttcctttcccataccccactataatcttttcctgaaaccaggcagataaatgtaactacaacaagtttcaagtgaaaagtttcataaatagattattttgggaaccaattgataaatgtagctatagagaaacttaaaatactatgattaagagctttgggtggctttctcccttccttcacgttagcaagcctgttgttttacagataggacacaggttcttctgcataagccattgtttgacgcagtcagtatggaaatcatgtccacagtcgagggctccaacatcgtctccatcagcgtattcctcctgttataaataaacttgagcttaaatgaaatggttctaagaggagatatggtaatgtatgcatcttttcttctttctatttcctaatgatagggaacacttgaaaaactagtacctggcagatgcagcatggttcgggatctggtccggcttctactggaataggttcatatttgcgctgtttcattaacttcaaaactatctcctcactcagtcctgtgctaacatctcctatgcgttcctccagagccaaaagttcctattatccataaggacatgttatgggaaaaacaaatatcaaaggctgcttcaaaaggccaaattacggggaatatgtaaacataaatattaaggagctaagctatgttaacatgccaactagtaaaggccactagagcagctttgcttttatgtacctcataggacatgttatcaacatccaagcgcatatctctgtgcctgtcgtgcatttcagccataccatgatatacgaatgggtcaaagagcatataatcctggcacatcatcaaaaataagtacaaaaattaaccatacactcatcatcaaaaataaagaaactattcagtcatcagtcatccagtaacaatcatatctcaactacaagaagatgacaaaaatagaagtgacattgtaaactatttcactaagaatggctttactgtaaacattacaggtctaaatctactagagcatatttggcaccacatacaatggcacaaggctttaaggtaatactaatacatgaggcataaatataaaactgacagccaaagccgagcaaagttatttcagtaaatcaagcaaaaaattgaatagcaacagcattccaaagcaaagtaaaatctattgtcatacgaaggtaaatcactgcgagcataaaaataaaatagaataaaaatctaacctcaacttgtaaattttctccccgtcgcatagcatgcaagacttgacgaatctgctaaatggtgaataacatatttagtcagttcgagaattattagtccatttgcaaaggtcactttgttttccttttgtacaaaggtcacacatatataacaatcacctttagagccaaaacaatatcaaagtaacaaaaagaaaaatattacgcggatatcagcaacatgcgtgtcgaactgatcactccaaaaagaattgtcaatttctctgctacataaaatttgggcatacagcatacgtatataatcattgtcaaaattatcttcttccagaaactctttatcattttgattgtcccattgatatatacttaccctgttcgattatgaacacaagtagctttgtaccacgagtaggctccaaccaacaaatccaacaatcatgaacacaatgctaatgtaacaaatccaacattaccttccgtaattacacaaatatagaatcaaaaatcaatcactctacacaaaaaaacagcaagtttatgcaactttcaggttttgttgaagactcagctcaactacaaattcacttctgactggaactttatccattaggaaacggtgattcatgcatttcttaacatttttaaaaatacaaataagaataaaaaagtgaaagaacaatatgaaataaagaaaaaaggaaaataaaccaaacctcagatatgagtcgacgcctcccttcaatgtcagcagataaaaccctcagtgaattagaaatattaagaacatcttcaccttgtctgtcccccatgaatgctgacctaagtaatgaatggtgacggttttggctattacgcccagaggacattattgtgtcctgtgaagaagaggacggtccaggaggtgatgggatagaaagaccactacgacctccaggttgagaatcaacggatggaaacagagaccaaggtgcaaattccaatgttctttgacggctttgtgttggtggaatgtgatgagggatccacgcaggagtagataatggaggactgctggaagaggagacaatccttgtagaagaaggaataccaagagaagtgcttatgtttccagaggccaaacttgaaagtgttggatcatgagctgaatttcttatttcatttgcagaaggaaacataggatgctctacattaggtcttggcatgtttaatacgcttgattcttctcgtacttctgtgcctctttctccaagtgctaacgaagttggcatgcctgccgctcttgaattagaagccccattccaaagaaaaggatgtgtaccacttcctgctaataaaggggcatgcacactgcgagaatggttttgtgaggaacctgaattggttgttgctgctgcagttgatctcaagtccaagggtgcactgaatggggcagaactatgttgtgattgatgaggagagcgcagacacaaccgcctggagttttctgcagaggctaaattaaaaagtaaagactcgcgtcgagatctagcattagactcaccacccaaatgtcttcgagaagtatctggtatttctgtaaaatttggagaaaaagaatcagaagctattgttcctgaagtgactacagtcctcgagtcactatgatctgaagtactgccactaggaaaagtacatgacggtgcagataaacgtaaactgctagaaggactataacgagtgacaccagtttgccatgcagaattttcagattgcggaaaagagctagaactcccgccaggacatgactggcccgaagtaccttcaagagcctttcttttacaggataaaccccagttaccgagagtacctgaactactctcactttttcccacaataccaccagcgtttccagatgaggttccaccaatatcagatgacacagtagtactagatgtctgctccatttccagtctgcttgacaagtagagatctgagcctaaactagcttcaaacctctgatcaccgttaccactattgctaacaaatcctccatttaaattcatgttctgatggacatgactagagctagaaccttgcaagaaggaatgcccatttcttacctgatcactaccaagactgatgatagaagtctcaggaaaaagaacttcatcagacattgaaccaactgtgagttgagaaccatatgaagatgacctaccattttcgatcttaatcccatcatcattgatctgatttcggagaccagatccagtaggctcacttgtagaagcaaagttctgtacttcattattgccagcatttacaaataactcaccaggagtcgcataactggaccaccgactttctacaggaggtatcatgctattggaagaggtctgctgattcataccactgtgtgaatctgacccctgcccaacaatatccacactttctggaaacagattaatgcttctccctgttccttgcatcagaataggtctgctcccccaaaacaatgttcagaacaatgaacaataatgaaacctcctacagaattggtgaccacaaaaaacacttcttgggcacacctgaaatcaaaaaacagcaacaagaaaaagaaagagatacacccgcttagaacagaaaactcaaaaaacaagtacaaagttcaaattttaaatttcaaagttaagatataattttctaaataatgacaccaaagtatatacgatactgtttttattttaaaaaaactactcctcagactcagaacatggtaccctaattgtatataagaggctaaaaagactaagaattcttcaaaaagtataattgatcatattatttccatcagccggataccacatttaaacacaccatggttgaaatagagagtgcaagcaaaaattatttcacattatgcagtacacaatgccacacaaaaacccaaagaatagcagcctaaaaaaacaattggtcatgtgtgagtggcgttttctgtctccgaaaccttccatgtaaaatatttgccacattacttttctagataattcagaaaacggagaaaaagaaaaaatcaagcataatatgtatagcaaaactgaagcaaacaattgcaactctcacagtttcagcgttcagatttggcaccaaaattacctatatatatcattgcaaaattgggaagaaggatacaatggcgagtgcaacaaaggatctaatacttagcatcacatatcaacacaaaaacttcttcaacgaaagattaggcagacatatacaatactaaagcataactctgaaatggaacaagcttgtgaaactgaacacacacacacacacacaagacgagcaagttccgaaagaagaaaaatcggcagcgttattactcaacaaatctacccattttagaggtagagataatccgatgccaacaattcatcaaaaccaaatataaagtaacgaaattgtagtataaaccaaacagcgaataatttccctttacccaaaaaaaaaattataggaaaaaggaagtaatgggtcgaaaccgatcatcaaaatctcttaaattatcacgaaagggaaaccaaaacaacccaaaaatcaaaaatcaaaatttctctgtagacaaggaaatgatggtcaaaaacccaaaaaaattaaaaaaattaaaaaaaaaaaaatataatgactaaatatagggttgattaaccaaccaacaaaggaggagaagtacctgagagactgaaaaagagtgagatcaaaagcgaaactactcgatcaaatttggccccaaataaaggtaacccattacttgtgaccaagaatcggaagcgtttcttgagttttcacactttccctctctctcgatggtgtccctccccaggtttcagctaatcaaatttctcatttcctgagcttgtaagcaatggagaggatgggtagaaaagagggagagagagagagaggcgaagcagagagagagagagagagaagagagtatagtaatctcgaatctaatctctgatgtctgaagatttttgaatgggtggggttggggttggggttggggtttgggtttgggtctgaaaaatactcggaagccatctcattgtccacgtagcttgcatgcatcaaagcttgggtcccacatcgtttctttacttccaataaaacaaaccctttctccaaaatatataattttctatttaattataaaattactattaaataaaataaaacccatagccataaccacaaccaccaccaaaaataaattaaacaaaatcaaagattagggttattaggtcatgactcatgactcaaaatctgagttaattacaaagttagctttttggttaccatataataaataataataaaaaataataataataagctattttggggattactattatgtttggagatttgaccttctttttattttttccaagcttttgtggctataaagaaggcttcttttttgattattgggtggcttaggaatgcttgtgggaaattttattatttattcatttatattttaaattttgagttgagttgggttgggttgggtgggtactcttgtctttcaaatcatatatatatgtttcatattttaattggcaaaatggtattattttggtaaggaataaggacatcccaattacatctttctcatctcaactcaaggctcaagcatctactttgttgattccagtaaatacctataaatgcaaaataattgtaaattagtatattaagactctcttactaagagtaagatataaaaagaagaagaaaaagtgatgtaattttttataataattgtctctgtttttgttttcatttcaactattcctacttaatttgttgtccctcctgtggtggtggaacagtggaagcttgcaacagctaagttgggtgaaagctgtacttcactacttcttagttgggctgggcctctttcataaatctcatgtacaatgtaatgtactctagttgttttattcatcttttatttttcttaatcttattattattattattattattattattatgtttggttggatggaggaagaatctgagaaaatatgggtaatgttatacctctttttcttctgacatagcaatgtgaggaaaaatattgtccactagaattaagaaagagataatcaccaattagaaagagtatgttgttcaagaatgaaaacatggttgccaactatgcttagactaggatatgtattttattttattttttacacaaataatattagtgatagaaagtgacttccaatagtaaaatttaaagttagtgttaaattaacactaaaaaattattattttag

SEQ ID NO: 36961 - DNA, 3694 bp, Cannabis sativa
tattattatagttagttgttattaataatttttcttttgatttattcaaaaaaaaaatctaatgatacgatcataaaagataaaagtaaattcaataagtccaaaacaatatagtcaagtcaagtcatacgttaatattttaagctctcaatgatttaatctcagtcatcacaatccttctcacttacaatttattgtctatgaaattatacttatttcgcacttaaaataggtgataacttagtccagtcattaaatattcttcacattattacattgttcacaaatttactgatttgaccgttggagcccttcggccgacaccattatagtgttccaagatttttcgattattttcttttttgttctataagttctccgtgtctgtatgcgattattttcgattgattataaattttagcataattttcagtctatcatttggacctattcgactttgataggcaatcttcattctgcaatttggcctattgatatttgatagccaatatttactctaatttgggtggttttttttaatttctgtaaaattaatgtaaatgaaaaattaatataattatgaatatttttaataaatagttaattgtaataaaattaactacttaaatattttactattattaaatttttttacataataattaactacaataaataaaactacataattttataccaaattttttgtaaatgttatcaccaaactaaatattataattatttttatatttagatgcttacatatatatatttctaaaaaaaaaaagtatcataaattctggaaaaagaaagagagagatcttatcagtcttaaaaattgcactattttcttctaccgcgaaaaaataaatataataaataaatcttgtttaaaaaaaataaaatatttttcgttaatgtataagttacctctcgttacaaattccaaaataaaactaaaaattttacaaaattaataaaaataaatataagaaaattaaaaaaaaaatctaaatcaaagaatattaattaggaaaaaggaagttaatctataagagaaaagtacatctatcctatcttgctaagaagataggctaaagagtaactaagaaataataattatgtacgaaatttatcaatctaatgcaagtggtttatcattactacaattaatgtttttattattgttgagttgcaactcgagcaattccatagtaagcatggagatcatcctttgacgaatcctcgtgttgttgttcgtcttaatattattattttttgaaagtaatagagcattgatatcaggcaagaatgaggatgaggtgtctctcttgtagggcccgagccacttgtcgcacatgtaagagtacgtcctccacggggccaagtgcatctttttctgttctatacacttctcagctgcaaaacacattacgtttataaccatttttaatctctctgctttgccaatgtataattctggaataagttgtacaagttccttgtattcttcactactcactttagtacccaattcgaactcgctcctcaaattcacctctattattactcgaacatcttgatttatatttttattctcttctaccacatcgataaacttatgttcccctcctataaattaaattattattaataataattcaaatattattataaaattaagtaatatttaatattattaattaaagtaatttgcaacataaatattttaagtttaatatttttgacggtaacaatacttaagctatatttttataacttacctcacctttaaatgtcaagtcaattatatatttatttttttataaaaattaatttaaatatatcgataaaagaagagattaacttgacacttatttgacaggtacagatgaaagttacagaaatataacttgagtattattaacctagagttaaatttaagtattacgtcgcaaattactctattttaattatatttatttacctaaagaaaactggtgtgaagatcgagagatagatttgcaaatggcagcattgtaaccattgtttcgaagacagtttgaaatttgactcaacacacaattcttgcaaaaattgctgatgacctttgctcctccgcaactgcacaaccttattgtcccctcctccggtgatgatgatttgtttttgatgagtatttgtttagtgatttctcctatctttgtttcaagttcactacttatctccaaatttacctgtaaattaattaataaaaattctattaatataattaactcttactatttacataaattagtaaaaaattaatttaattatataagtacgtacataccagcaaaccgcgtttaatattcacccaaacatcattttgacctttctttgttgttgttgaattattacgattatgatcattaataacaacgttattatgatcttgatttcgatctcgtctatcagagtttgaagcagaagaagaaagattattacgcgattgattaggattagggttaggattattagtgctaaaccagttggaaatattgtatgcaggagccctcactgtagttccaataagcttttcagccatggattaattatgttgtgttggtatattaatgacctatacttaattatgattatgattagcttcttaattaattagactctttactctcacaccctttttatatatgcacttaaatgatcatttaaattgggaattctaattctaaacggattagtataaatcttaattatttgaatgtaaaatcataattaaaaagataattaagatatttttattttttttgagaaaaaaaatttaaatgatgagaattttaaagggattaagatattctgcacgtaacatatactttttcaatttaattatttattttgcaagaatgtttaattttttttattattattataaacaataatttttcaatttaattgtgtacacaacaaaactatgcgcttttaaataattgtgtacaagtacgtgtctttttttaaaaaaaaaaattaattattttttaatgaaaaaaataatcatagttaaatattagatattttttatatatgataagaacactcctaattacattctatactaaaattttttaaaatacattattaaaactattgcactattaccatacatcaactgtaaaataaataattaaaatttattttttaaaaaacttagtatattttatttattttaaaatatataatgttaatatatacatacatcctcatacaaaaataattattaaaactcaaaataattaataaaatatatttaaaacaatgaattgcaccaaaatagaatattatttaatcggccattaattcaaaacttaaaatccaaacaactgcattaactttaagagcattgccatggagcatcaaaatatttagcatcactatgtggtgacaccttataattaattatcgattctctataatgtttattaaaataaaatatgtgagacccgatattgaattgcactaataacaatattacacattacaaaagtgctcgacaccattagtgtactttaacattttactaatactaatggttcacactcattctccctaactgtcaaacaacatattaaatttgaagaagacgaagagacattgtctgaatacgatatattactagtaggggtgttcatccgat

SEQ ID NO: 36962 - DNA, 4878 bp, Cannabis sativa
  modified_base (1487)..(1488): a, c, t, g, unknown or other
ctctaccatttattccatgtgggacattgtccacaatacatgccaatgataaaaggaagaggagaatttgggtctccctatctagccccctcttagcatggaaaaaccatgcatggatccaataaggagaatagaaaactgaggagtgatcacacattccatgacaatattaataaacatctcaggaaactgtaaggcaatcaacatttttttttaataaaatctcattccatcgtatcataggcttttttaagatccatttttatcatacaagatgaagaggtatgcttcctaccatactattttattaaatcttaacaaataaggatgttatgaccaatgtatattccatggacaaaaattcccttgattttctgcaatattacttggtaaaacagttctcaaccatgtacataacaccttagtgattgttttataaacaacattacaacaagcaacgagtctatactcataaaaactattgggataatttattttaggaattcgtgttaaggtagtagcatttacttctttcaaaagctgccataagtcaaggtaaagaggacatcaactataaaattatcactaataatttctcaagttttcttaaaaaagcgactagtgtaaccatccgagccaggacctttctcattaggaataaaaaagaggacaactttgatttcatttgcatcataaggttgagaaagattctaaattcaaatagtcagtacctacctcctttgagtcattttagatcccaacaaatgattataaaactcaaggaaaatcttagtgacttcaggagcaatatttacccattttttatgttcatcatgaattgcatacatcgaattctccattcttctaaatttgaagttgatgtgaaagaatttagagttacaatctccttccttagcccaagctagcttggatttttgcttcaagaaggatagatgatgtttagtagcttctttaaaaactttcttagcttccttttcaactgagaatagtgccaaattcatggggtctttctggattgcattttgacaatcttgaagagttgatgttgcttccttttcatgctcagcaatgtcactaaagccttctttgtttagctctttcaatgctttacagcttttaacttttggcaaagtctaaacataggaaatccttcacaatttagagcccaagcattagggttgttcatcaaactgctcaaaccgcccgcactgcaaaaaaaaaaaatacggtttgaaattctttatagtacggttgtggtttgaattttttttaaacctcgcggtgtagtgcggtttgcgattttgaattattaatatgcggttcaaactgttccacactgcatattataaaaataataatttttatatttatttaggtccaatatgtgaaggcctaacccaaaagctactaattattgtattgttaaaacttgaaacttttgttttcatatttattttcaagccttnnggtatttttgacaagtgttgctcaagttttatcgtatttgtgatagtttaattatttagtgatagtccaacaacacaatttttgcggtgcgattttttgcagttttttagtttcgcggtgcgagtgcattttggaaaattagaaaaattgcatgtgcgaattggtttggaaaaatagtcaaaaactactccacccgcaccacaaacaaccctaccaagcatgactaattttgttctaaaattggtcactcaaactccacatattgaaatatctaaaaggcatcctcccttcccattaatgtgcctgaagcgtgagaagggcaggactatgatcaaaatcacattcgggagaaaattcactttagcattaacaaacatgtccaactaagattgattccccaagactctatcaagcttagcttaaaccttactcaagccatcatgcttgttgttccaagtgaaaagaaagaaccattaaattttacaccataaagaaaggtctcgataacaaattccttcagttggtggtaatctttaatcccttttcctgccttcatcctctattctacatgccgtacatagttaaaattctctatcataatccagggaatgtttttttatttcgcaaaaaccttcattttggtaaaaagaccatctctttcatgacttccattatgagcataaatgaaagtgactgcaaatatattactattcttaggcgttattgtagtgtgtatatattgactatcacactccaaaatattgatatcaaatgacattgggttccaagcaagaataattcttccattaggatgataggaagaattggaagtaaaacaccaatttctaaacaaactaagatacaaattccttaaattatgaactttgaccctagtctccaagaggcaaccgattctcagacacttctcatacatatatctttcaatttctcaatactttcaaaaactatttatccctcagacattcaaacaaagaattctatccatttgaatcgagaggtactccccgcctcttctagattaaccatatcgagttttcccaacttgtgtttcctcttcatttaggacctgaaatggattgacactcaaactaggtccttttcactttcaaatttttcttgactttttccgctaaattcccaacactttgcttcacaggagctgacttagcaacaatttcattcacttactcttttcaagttctactggctttttttgcttatctgattgttccttgggggcccatttcctctgagtttggcctcctctttcacattgtgtctaagaatgacttattcttttacaacctttacatatgatagatatccattcatagtaagttcttaagtaagttatctcacccagtttattctcaaaaccattattcaggcatatcttgatctatgttaactttaatcattactcgagcagaggagagccaatctcgattttttggttgcatgatcatatttcaagatacacccaatcctatcccaaaattttcctcaaagaagtatcaccccaatatttgagatccaagttattcacttgaatccaaacaagtatgcaactcaaattctcatgacaagatttttcttgtgcattccaaggcttttataattataggtttcctatcaaagaacgcataccccctattattaccttattctttgtctgttactgtatgaaaacgaaccacagagaccccatattttaataaagaaactttatccacacctttatctttccagatattatgaaagaattaatccttccataacttgtaccgatagattggccccaaggacataacaaatcaggactgagttctagaaggaaacctcaacttcaatatcattaaaacctattttgactctgtcctttttcccctccttccccaatttagaatttaattgtaaaaccggaacaagttcagtaggggatttacctctgtagaatctttcctctgaagccttcataatcccaatccaaaaaaagatggttttagccttagtcaatttctcttgaggtgataaagattcaaacatgcccaatttccttgaatccaccattggcgcctgctccaaatgagaatccgaccgcttctcttcaaatcaataaatcaattaggttcctctatttcaagatcctataagtctgaaaattccatggcatatataccaattagttctgcatgggattttgtcttcaaaattattggatcctttgagcttggacatgtcctcttcgaatcagtcgtttctttcttcctattcaaaacttccttttcccactctttttgggtctctcacaacctgccatagtaccatcataagaaaacgaaagaaaaaaaaaatcaatgaaaaaaaaaggggacttatgaagtccctcactatattttgaggtgtgtaacacctctaatgagacaaaaaaaaatttattgtatcaaaattattttgacctgctagaaccggttttgtaaccggattgtacaaatttttgtgtcaggtaaataatttttttattggggttctttttatttattaataaaatacagttttaagggtagtattgtaaatataattttttggtgagatgtatctttcctcaactcatatgtattatgagagagagaaaatgttttttaaaatttaacatgtttacaagtatataaatagtttcatttggtatcaaatatgtttttctcttaatgcttttgatgattagtactaattaatttgattgagtagctaagattatgatgttgttggataattttattttaaatgcccattatacaatatgaatgtatttatttttggctaattaaaatttttgtttcttaaattttgacatgaacgaaattatgttcttgaactttttagaccattaaaaatttatgtcaaactattgagattatttgatttaatgacttctctccaatttcattcaattttactaatgtggtaattgtttatatattaaattgtgctctatgaactttgatatgtatcatatcgtgctatccaaactttattatgtactaaattgtgtctcctaaactttcatcaatgttggacttctgttaataaaatttgacaaaattcttaaatctaaaaatcttaatagtttgtgttaaattattaaccacttgaaaaattcaaaaggcatgatttaatacacgtcaaaattcaagaagcttatgtaaaaaaaaaaaaaaagttcaaagactaaaatccttaactatcattttttttttgttatacgtggtagttgtttatattgatcgattgtgacatttgtatttgaatatgttttgtttttatttttttttctaagaatttcaataattttattattactacgtacta

SEQ ID NO: 36963 - DNA, 3947 bp, Cannabis sativa
ccattagggatgtggttgggaattctcgttggggacccctttacttaagaataaaatttaaataaaaaagtgaatcacataattatcaaaattatacacaatgttttcttttgaacgaaaaattatacacaatgttaatatatattatccagtataaaattaaaatccttttaaaaagttactaataataagatactacaaaacagataaagaagcatgtaaaaataaataaaaattaaaaggtttagttggttgattgttattctcatccgttatgtttaatattcggggaatgaaaagttagatacatccctcatactccattagagacggtgtccagtaaggcccaatccttatgagtaaaacttgcaggtctagtaaaattaaaggtatttgatgttagagtttcacttgatgactttagttgagagagattgagatgaaggaaatatcaaattctaagtatttaaagagtcagagattacctcaagaataagctaaaaatgggactacttaatcataaacctttcactaaaatcttaccaaacacaggtttagttttacattcctattcccaagaacttaaaactcccataacaaatacaaaggacaaaacttagtcacatatgccatctgaattgaggtgtgtgcatgtttctatgaaaagctatgcttatctaccatgaataataattaatcatggtaatgttcatatattatacacaaacacaacacctctataacaatctgagcttcccagtccccatgttccatgtacgatatatttgtgacgtgtaaagtgtaactctcatacaaagtagtaataaataacaataaaacagaatgagtcttaattgtcggtcctcacagagccttgtttgggtctcatattttaatctgggaatctcttcgtttgttggtttggcccttttagatagagatatgttctaaagaatcattataacaactatatatggccgttgcgcagtacttgtatcaaattatctatgattgtctttctatctttccaatatatatataaaatacaaatcatgttacaataaaaatttaataatttataaccaatcaggtttctgactggaaagggaatcaaatcgacctcgctgcagatgagggcggacggaggttcatttatccttcaggtggcgtcctggtgacaaatgccaccttacacaatcaaattctagagctgatctcttgtggttcaactgtttcacagtgaaatctctttattcttttagcctccaaatggaaaataaaataaatcttggaaatttaaacgagtatttcagggtttttattctttcttttttctttttacttgtatattcagttgatgctattattcagtagtgccacctctgtccaattaaaattatgttatattcttatcagaatattttattttatatatgctgctttccttgtatctcatatgtcagctagtgcagtatgtggtgtgtgcatttaactgatataatatcttaacaagtgcttagttcactgcttatggaccacactgatcatttagttgtctactgaaactttatagtttttaattttttaacatatggacgtaactgaccgagaatcagtcagttttagacaaaataattgtaaataatggacataaaaaaaatcagtaattgtccaagttgcttcgaatggaattcataggtcggttcccatatatgatatcctttgtgatatattttttttttccctttacctctaatagattgataatttttgtatgataatataattcttaccttggtcaagacttgtactttattatgagcttaattaatcaagtgtgattcgtttacaaaatttgatgaaaaagcattaaatgataacttatctgatctcgtgaatgaaacttcatctgattatttcgagagacagccataatgacaactcattgttaatgcaatacgtgtcccttatgaatgcttctattggacactaaatgtgcaagtatacaaaccttagttacgggaaagttccagtggttttatgtgccaggtgttcttatcttaactatattattgtcatcacttaaataatatgtttgaaaaataatataaaatcaggatcgatatggacagttatgagtatgcattagtattataaatttgaaaaggtgggaaaatctgtgcatgagattgcttatcttagttacaatattggtagttcatccacgtacaagcataggatctcgaatccaaaaatagccataaaataatataaattcgactaaaaaactaatataagggcattgagataacgaagacatatatcatcagtctcattattcaaggtttgttaaacttatttaacagctcagaactaaaaataaactaatgatattattagataatctgccaaattacatatgcatttcggcgagtcaactcaaacacgtaggcgacgccccatttgggtgctgcatacacaagcaaaccctagattttggacaagtaattacccttttaagtaaatgtattttaagtatggtttagtttattattatagcctctgctacgtatcaacgtgtacatattgtaaatatttgtcaaattattatgtttaattaaattatcgtgtctccttgataccgaacatggaaacagtagccttagattatgctcgagttaaatattaatcatatatacatggattataacaaagactataattagtaataaaaatgagttaactcgattgcaatttcatatgttcctatatgaaatatatatgagctaataattgatactataattagggggtgaaaagggtatatgcatgcatgttaaggttttgtaaacaaaatactaaaagaggccttcagtggggctaaccttgtagataacaagttaaatgtcattcctgagatctagagatattactattattataatatttgaccaattagcatttatcacttaattaaacaaacgaataagacactttcacactcgtatcatcacatgatttgacgttttgtgataaaccatatatttagtaatttactctacacataaacaataattaacttagaaagtaagaaagaaaacataaaatatcatgggagcaacgttagaaagcatgtacatatagggttgatctgatctggtcgacagctgtcctagtgaggtgtattagcaatatttaaaatagtaattaactagatgattcttttaattaattagtattgtattaattaacatatatatatatatatatagcacattaaggcacaagcttcagtgttttgaatcactaaaaattcctccagactaccaggtggcgattccagaaagtttcatataaaatgattttggggcttgcccaaattgaccattgatcaagctttgttgatcgaataatcatttctataataattttttagtattagtaatgtaagaaacatattaagtaataaataactaaaatttattaaaaacacagaacaccatacgtcaagaacgtaaagacttattgtctttgcttgtcaaaagagctgacattattggacgtcagatttcacaacgtggttggctattaatggttgaataagggtcgtcgatttccatggtctgaccctacttttttgaatttaacgttttgcattgggacacgtagtcgaagaaaattaggctctatcctatatgtcattggtttcatcagtttaagtattacaaaatatgatggaagcagaaaacaatggagattaattcctacatgagactatgagagatctcatgcatgcagatatagtatatatacacgcgaacacgtataactacacgtatacgtatatggtatatatttacaaattaagatctccggttaaaaagtggtgtattatatcatgttaaaccaattaaagtttgacacgtcaattaattttttatttataa

SEQ ID NO: 36964 - DNA, 2647 bp, Cannabis sativa
acacaaaatctaaaataatatttagctaatattatatgtgataattaatacgtgtagtgcatggagtaataaagatacacgtataggtaggtacctcccaaatacgaagcttggagtaattgataacgtaataagccatagcaaacttagtctggttttcaggtggatggagtggtacaatctctcttacgatgcacccttgctccaccagaatattcctatgatgttgtggaacatcgggcaacatagccaccaccaaagggtacttactcttagcctttctaagccctttggctaaacccaccacgcctttcacgtagtctccgtcacccgccaagaacgtcacgtaagctcggcttggaccgctcgcttgcttggctagactcctgcctctgcctgttgcaccgttgatcatgatgttaggagccatattagttagtgtttgtttggttgatgagaaaatatttatatattatgattgatagtagttttgatttggtcgtaagtaattgggaggtttgggggtgtttatatagagatttggaaagatgggttgagatgggatttattaattttaaaaggaaaataagagaaaatgatttgtggaaaataaagtatatgataatgatctataataataataatacatatatatgtgtgtgtactatataatttaatgtatgttgaaaagttggcatgtctactgtatataaaataggtagaataataaattaaataaaatgaagtaatgtatgtgtatatgaattatagcaatatattacatgtgttataatttcaaagaccaatattagatatgtccctactaccgacatagctacacaccctttaactaacttgtctccaagtataattttggaagatcacaaagggtagtgactagtgagtgatatgggtactattttctaaccatagaggtctctataattaaatgtggcactagttagtgtgatgagtgatttttataataattattaaaattaaaatatataaaattaggaatgcacattttttctataagaatacccttgcgtagaatcactttaatgaagcaggggttccaaacggaccgagtgtgaggacaggatcattttttattcccgtatgttaaacggggcgggatgtgaatgacacctcctcttgccctagcggggactcgcttaatattttaattgtttttatatttttataatatgtacgtgtttatatttttttaatatattagtgtcatttttataatttttttagttgtaatttgtataataattaatatattgaataataaataatatgtaatattttaatttttatgaaatttaatatttttaaacatttatagtatatttaactttatattaatttacatattttttttcaaatattatactaattaaataatattagaaatacataagttaaaatgaatggtcgcaacacaatctagatgtcgaagtaaattaacgttattatatatgataaaacaataacatcattttgcacttattattatttgggtcacaaaccaatccaccttttaatgataaaaattttctaaattttaactaaatttgttttaataatatcaactcaaagaaaaatttattttaactaaattttgaaaaaaaaaaaataatattatttgaattaattaaataatgaatttataagacaaccagtactaacaataccccttaaaaatttaatggaatttttttttattttaaaaatatattttgttgaatcaataaaaataatttttttcttttttgagtaaaaaatcaataaaaatagttaaatagtcactttttgtatataaagaaatttaaactttatttttatccattattcctaatttttataacatatttttttacccattataagtttcatagaatcgtatgtttttttttttttttttttgttaggcatagaattatatgttaaactttctaaaattgaaaaatatatataaaaaaaatattaggaacaatataagaaatgtaaattcccattaaaacaaatatgtagacacaattttcacattatttttctctttctcttaaaaaaaacccaaaagaatcatagttaaaattttatgtcataaaaataaaataatgtatttcatataaaattttgcatctaaaaaataaggttcaataagttgccacaaatatataaccacatctttgctccatttatgatcaatgattaaagtatatgaattatttagtgaagataatggtgagaacccaatctttgaatatttttttctaactaattatataaatattgattaaatatcatttttttaaaagatttgtggggctaactatattaaatcaataattatttctttaatttttcaaaaattatataattttttattaatggcaacttattttattttatttaaatgtttgtggggcttagatattttttttaaaaaaatcatgtgtaataaaaaacaaactaaaataatataataaaccttattttgtcaactttatatattatctattctatataaaatatggttatgtaacagaatttttagtttaataatattttttagtttcatacgttaactttaatagaatattctatcacttaatagaatattctttattaa

SEQ ID NO: 36965 - DNA, 3263 bp, Cannabis sativa
ttttttttttttttttataaaaggagaaattttcttattaaattaaacaacataattacatcaagcaatttcagttcaatcaaagctaagaaaagtttaggaaaacactactaactacttacaacatgaacaactttataatattactagcatgttaaacagtgaaagatctatattcaaaaatacaaagatttctattagcataaaataaaccacaacagctattacaacaattagcatatgacactttaagttagatcccaattgcccaatctaaatcctccaatcaagtacacaatgggcaaagtggtgaaacccactcatccatgaaccttacttagcagtgcaacataaaaagggacaaagaaaaaaattaagtgatcatggctctcaagaaaatcaatacacactggacaacatggagaatcaatggagagatgtagctctcaagtttatcgctggttatcaactgagagtttatcatctaccaaagtatgaacctatgcttgagaatcgaaagcctactccaaactaccccaacataatcaaccttctcaacatcaaggagaaaatatagaatttgcttaccttaaaccttcccataactccagcatcatgtatcattgccttaaagatattcgatttaagcttgaagagttccttccaataccaactagggtctcctctagcaacgtggagtcgaagattgccttttcaagtaaacactatgacccatttaacccaaagtgcatcaggtttagcagaaagatcctaaatgtatttattgatcattgttctattccattttgatccctctttaaaacccataccaaacccatacctccatattgtttcgggagacacactttatcccaagaagtaatatgaggcttgcatctatagtccttggcaccccataggaagtcttgacaaagtttgtcaatctctttaacaacactccgaggaagaataataatgctcattcagtaactgcaaataccaaggaccacagtgaatcaactgagccctgtcagcaaaagaaaagtgcctagtagcccaattatgtaatcgcttttgcactttagagatgataggcccacaatctgatttctgccatcttgcgggtcttaaatgaacttccaagtatttcaatggaaaaataccttcctcatccttgacaatttcttgaatactccttttagtctttggacttgtgtccccaaaataaatttgagatttatttttattggcagacaaccacggtgctttgtaatactctgaaaatgcttgctgaatattttgcacgctctgggagtggcccttacaaaattaagatttaggattaattgttattgttattttaatattaatttattacatataatttgattttaaaaaaaataaaaaataaataaattactttttgcattttaaaataggttagttaatgtttttattaaaagtgttattccaatttttacccagatgacgtggcgtgtccgtgtaggcaagaccgaggccacgtagaatacaacatgtcaataggtgagccaaatcaccatgctcaacacatcaattgacaagggatttaaagacatgggcaatatcaagttacaagaaaatagccaactaggagggtctggccagaccacatcctggccgaccaaggatgtttatgagccagccaaccccaagcaaatggtaggtcggccaacacaaatagagagaataaaaggaagccctattgaatggtggggtccacatccatcctcctggacgggtcacaactcgatttcagatacaagacggctccaacaacccacaaaagtagggattcaaccccaaactatctacttatcttttagggatattagttagttatttttgttacttaaatatatgataaaagatgtttttccttatttttaagggatatttacttacttgaagatagatcttttgtaaaccctaaactatataaaggtcattaggcaaagtaaaaagggacttgaattctaagtcctttaagcactagagcatcctcactttctctctcacacgccactttccatttactagacacttagtctcttttctcatctcacttgttcagaatctgtcatacatcagttctcattattgtaacattcaaagagagctatagctagaaattacaagataaagcctgtaatctgcgtggtgttatctctcaaattaatacaaccaaaaggagagtaggtcattacccacaaaataagggggtcgaacctctataaatcactgtgtcacttttattatttgattttacaatttacatgtagtgattgttaatcataaataaggctccaatgtcaattgaccaaatctgatatcaacattttggtgcttttattaagagtattatttgtcatcctgatcaatcatcatggctgtaactaggagaaccactacctccacttcctctggtcttcctcaagatcatatgacagctgatcccaacattcaaattcctcccaccacggaaggcctcaatgatctaactcatatcgtcactctgacaaatcttgcaaatccatctaataccactaatcttgttaatcctactaactcagtgaatcctaatgatcgacccttgccgcccaaaatagatccaccaacagaacctcgaacagaaggtcctgtcaacatggaacaacctctaggagcgcaataaggattgttctccaatattatgcatgggaaacagggccaggaattggtgagcctcatgtggacctgggagacgatgtcgagttggataggctcagagaagttgtaggccaattcacccgaataaaagaaccatatgctattggttgcgatgcttttgcccaacattttggtgcttattattttttattaacgaaaatctacgttaacactcacattatttataaattatgtaggtattattcatataggttataaatattattcttactatgccatattgatttatctaagatttttttatgagtggttgattaatttcttaccctataagtttttatttatttttttaattttaatgccttactctataagttttgttatcccaatttctgcactctgacgtggcatcactcgatggtaacacgtggaatcgactccaggtatctgctcgcaagacataagccgaacaggacacgtacattcactcggacgaagtcctctagaccgagcagtgggcaatctgcacagaacgccaacacttagcgaattca

SEQ ID NO: 36966 - DNA, 2587 bp, Cannabis sativa
attatttctgctatttgtgtaggatgatttcttaccgagaacagctacgccattagaagatatattcaaatcagtcttctggttagaatgcttctctcttcatcatgtctttagttcattggcttgttatatatagatttattggagtcaattattattattattaatatctcttaaaccaggccttggtgctttggacagcttgccctgcttattatttttggtgtgtttaagagataccttcattccagaaggtagaaaacttagagaccctcgaagactttatgctccaggaagaatgtatcatattgtggagcgaaaattttgcaggtagtaaagcatttacttaatcaaacttaataatccaggccaatttatttattttttaactctaaattcttaccatgtactgtgcttgagtttttagcgcactaggttgcttgagttgacggtagtacatatggttgaaatttttggcttctttttccttatcctagtttgtaaattacagctcacagcaatgtcaaacccaaatattttgattgaacaattgatcaacataaagatgtccttccatccaattactgctttatttcatgtagaaggatccggaaaaaaatatcgtattatgtcaagttaaagcttatgctttaatttctgaaacaattgaagttagttttctccctactttgttttttcacagatgtgggagatttcccccagaagtcaggactgccattcctgttgatgggagattcgagcatattgtattatcatgtaatgccacatccgatcacggacttatttggatagaaagggaagcagagaaggctttaggagtacgtataattacttttgttaacctatagctattatgtatcatcgtctgttaatttccatcatcatactgcaagtaaaaatatatgcagatgttcctcgtctgtcatctggttgcattgtttaaggtaatttctgttcccatgtattatagaaattttcgaggtgaattattcactcatgttgtagagtatcagtcaacgactaaaaatcttcatttccatctacttttcccttcacaaaacaagggaaagacttttaaccacacaataagagaagagtattctctttctgctctcattttcttgaaaggccatgcaacttttttccaatgtgtccttcacgagctgttggctgaaagtttcactgttatgtccgtacataactgatcacttctctcctattttttctccattcagctcgtagaatttaaattcactacaaaatgctggtttgtctggccttcggtgtgcgatatcttaattttacttgagctacttctcgtaactgtatttcaaaaccaatactagaaggcatttactcatctctctagatggctgtgtcctgaagtagaatcttttcctttgtcgaaattttgtatagctgattaacggtttgattactctacagataatgaaggaaagtcattcagataccataactacacctccaaaagtgcaaaaactggaaaggctgcagacctttgaaaaagagcacaaagatgctttagaaagggctgttagtttgaatgtacctcacgctgccacttcagattcagatgaagaacctcatgatgaccaaaatacaagtcagaatgaaaactctgcagaaacttcaatggagtcgggtcagggaaggactaactggaatgaagtaattgagaagctttacaagaaaaaagtgtctggaagtgtacaacaaactagtgataccaatgacccaaaacaatagcaccttccatttatgttctttcctgcttgtggttaggattagtttgtgtgtcatcactggttcccatttttaaaaacgctaggttttgtatgttatatcatgtatcaatctatgatgtcaggttaatatcagacaaaaccgcgtctattaatcccttgaccataatagaacaaaccatactgaggaaaacataatataggaatttacgtcgcttgagaggcaccaggtcagctctgattttttttatttttttgaatattattttgtagtgtgtgcatttgttctgtatatacattattgacatataaatggtacagcaacgtgatttttgctgccgaatgtcttttcccattttagcttcttctgacattttattcagtgtcattttgttgtagaagaaagctatcgactccaatacagaaaaggcttgaacaaaatatgaaacttaatttgtccgaattcaatatttcgactcactttagtattgatttatgggatctgcaaacggactttataattagtaagcaatttttagcaaaatatgtttgatcatgtgagagagagtttgtttacatacatacagttcctagtgagtagtgagagtatgttcgttgaagtcgtagttggaatgtttttgttggagtcaatgccgaggctcacctaaatttttatgagaaatgctaaagggcaaccgtggtgcctagcaccctatgtgttaatattgctattgcgtggtgccaatcacaacgcgacatgtcgagaaggtgctaggcaccacttgttgggaattattttacca

SEQ ID NO: 36967 - DNA, 6987 bp, Cannabis sativa
ttatacatcaaggaatatggtcttcgatgaggtatcatcatggtggtcatcgcaaaaggaagcattactagattctaaaaaaatgaaagatagtttgcatcaaaaaatgggggagtaaattgttgagttacctttaactccagaattaaatgaagaggaacaaaatgaagataacgaagacacaacatatagtccctagcaaacaagggtgtatcaaagagcatgacatgatgatagacaaccagaactttgaagatcaacaagagcacaaaagccaaatccaaaatacgccaatgctactagctgaagaagagaagttcaatgaactggagtcatatgaggaggcatatcaaaactctaagtgccttgaagctatgaaagaagagatagttgctttggagaagaatcagacttgggaactagtgcaaaagccagaggaagtaaaaccatctcatgcaaatgggtctacaaggtaaaactcatctcagcggttcaattgagagataaaaggctcgtttagtagctcgaggattctctcaacaacatgggctagattatgacgagacatttagcccagtctctaagattacaactgtacgagtcctactaacacttgtggctagtaaagactggagactatggcagatggatgtgaagaacggttttctacatggagaactagatcgagagatatacatggtgcaaccaagagaatttaaggatagagcacacccgactatgtttgcaaactgaaaaagacactctatagatttaagcaagctccatgagcatggtatggcaagattgttgagttcatagtagaaagtggatatttcatggtgcatgcagattcaagcttattcgtcaaagtaagggaagcaaagatcacgattgttctagtatatgctgatgatctcattatcactagagatgatgacaccaaaatttattaaacaaaggagagcctattaatacgttttcaaatgaaggagcttggtggattgaactaaggaaggcatatttctctatcaacaaaagtatgctaaagatttgttgcaaagatttggaatgcttgagtgcaagcccatctcaatacctatagaagctaagccaagctatgtgctcatgctgggaaggacttgcaggacagagcaatgtatcagaaacttgtaggtagtctagtctaccttacattgacttgatcgaatatttgttatgcaattggagtagtgagccgatatatgcagcaactaaagaagccgtatctggaagtagtacgataaatactaaggtatgttcaagatacaattgactgtggtctcctttataagaaagtgataagtgcaagactattggatactgcgatgcagattatgctggagttcatgatactcgacgatcaactattgggtatgtattcaagcttggatatggagtagtgtcttggtgtagcaaaaggcaatcaacaatgtctttatcaaccacaaaagtagaatatagagtagcagcaatgacaactcaagagagtacatagttaatgcaactgatgaaggatctacaccagtttacaaactacgcagtgctacttcattgtgataatcaatctacaatttgtctagctgaaaacccagtgtttcatgcacgaacaaagcatgtggaggtacattatcattttttaagaaaaaaagaaacaagttggtgctgagggggagtattgaagaatcatcaccaactctctaaaattttttagagaggccaaacccattatagtaaaagtaattaaaaatggtcttgtgaaaacttcaagtttattttagtaacataattaggtagaagtttctagaatattatagttagtcttttagtagtataaatagggatcttagattctcaagttgtgcatccaacaagaagtttttcaaagtgtgtccaaaagagttagagtgtaaacaaagtgttataaagtgtgagtcatataagtgtattgtaggtgtttagtagtaaataaaagtgtgagtgcttggtgtgttgtcaagataaagtgttcaaatcctggtgtaattactttttcaataatagaataattacattttcacttgttgtcgtgttcaacatatctaacctctaacaaccactcttaaaagacaaagttagttagctgtgcagtctcgctaatatcatccttgacaagccaaaaatggttatcgcaattcaatcgaggtttttccacaatgaatgttagaaggataaaaaatttcatttccaaagttgaacaaaattattgattgaactattttagagtatggaaatgaaataggtgatgtcattgttgatttttgtaaattattatacaaaattacttataagagtggaacatcccaaactacaaaaatgtggttagaaatacctatcataaacaaaaggaccttaatggttatgtgaggtgtttaaaaagggattatgcaagcatttgcctttttttttggtgtgactaattaagtttttaaggattttaattattaccactgtcgttatcaatatctaagaaagtatttttgtgtaaagattctattattttcttttgaagaaggaatatctagaagattattgatgtggtaaaaaccgattcacctcatctaagaacacacgacaaagaacaccaaatagtgaaaatgtaactcaagccatcaacgatcaatacaagaaatcacataaaattgagagcaaaattaaatggaaaatgcaagaaatttaactaaacacctttcttttaacgaggtttgaacaccaagccaaagttgtattttgttgtattcttcaccatttatagtgaattttgctcatatagattcacatgctatgccttcaactagtataattctttgtttatacagtagaacctctatctaagaatacacttgagactaagtaaattatattttaattgagaagttataactaaataaagtcatactaaaaaaattaaaatactgaaaaatatcaatgtaacaataataataataaataattattaatactatgtaataatagaattattttagagtaaataaaatgtttatacatgtattataatttagaagaaaattattaattttacttaaataaatttacaaaatatatgtttattttttattaaaatgtaattaattattcttatataaaagtatattttgttaatacgggacttagaaaatgtataactaattacaatttcgatgttattcttatttataactggcctaaattaggacttgattttttttttttttataataaattaaagcctattcttgaatagagtattcttagatagatgttctactgtatatatatatattttcaattatagtgtttgctggtcttaatcatttgttgtgcataacaattatatttcacttatctatttttacttaacatatacattcagcttaacatacacttttttttttttatttttctgatatatttgaaaaacaagaagctaaaggaagaagcaaacaagagtactacaatgtgtgagtttattacatcacttggtacatcagctgtgtatgacctatgcaaaaacacatttcttggttgcctacgacatgtgaatcgattgtgtcactatgcaacttacaaaaggaatgtgaaaatactcattgaacaactagacatcttggagaaacacagaggagaagtcatagctatggttgatgaaaaagtggatgatgaaattcatcatagtgttatagaatggctcaatgaaacaaaaaatgctttatctgaaaatcgtgcaatggcaaagcatgccagccaaaactttagtgatttcatgttccatccacgagtaatgattgatgaaattaccttatcaaggataacaactaccataaacgaaatgatcaaacggtacatagagtttaatggtaggatttcttatccttctcgtttttatgataaggattatatttccttcaagggaagaagatcagttttggaaggagtcattgatgcactaaaaaatcgtaatgtaaagatgattgggctgcatggaatgggtggtattggcaaaaccacacttgcgaaagaaatagctcgacaagcgaagaaggaggcgaatttatttgataaggtgatcatgggcagtgccatttctcaaactcccaattatgaaaatatccaatgtgaaatagcaaaggatcttggtgttgaatttggttatcatgaaaccaaattaactaaggcaataaaacttcgtgaagagttaagtaaacaagagaaggttctgattattcttgatgatatttggcagaaaatcgatttgtttgatataggaatacacttcaacgatgaccaaataggatgtaagattctatttacttcgagatgtcaaggtttatacagtcctgtggttgagtttgctcttgattctttacaagaggatgaatcaacaaagttatttacaaaaattgtggacaaaacacttgatgaaaatcctgattgcagaccccttttgagtgaattggttaaggaatgtgggggtgttccaattgtcatcaatacagtggcagctgcattgaaagatgctccttcatccaaatggaggactttcttacacgaaatgagaaacactgcctcagagaatattgatggtatggactcaaaagtgtttcagtctataaagatgagttactattatttggaaagtgaagaggccaaatcattattattgctttgcagtacatattcagaagatgaactcatatctgataatgatttattgatgtatggtgtggggtggccgttgttaatgaatgccaatacattagaagctggaagagacaagttgcatactctaatagatatgttgagaaagaattgtttattgttgcctagtgatgaaagcaattccaacatttattatcattgggttaggctgcatgatgtaatccgtgatgttctcaaaccaattgcctcagaaaagggttggttttcagtatctgagtatgcaaaactgcctgaagaaatgaacaaaggtctacttgtagagtcattgcttattgatattaggactgagttgcctaacatattggcatgcccgaagcttgtttcattgattgacacaacttttcatgaaaagcgtctttcagaattcttcttcgaagaaacaagaaaactaaaagttctgaagttatatcgtgttgatctacgctcaccaccttcatccttttgttgtttatttgagagtctccaaactctttgtctaaacaattgtgacttagaagacacaacatttcttggaggtttcaagaacttgaaatgtctaaatctttcaaagtctaaatttgaaatattgtcaagacaagtgggacaactaactctcctgaagttgctaaatttagatttttgtgaaaagctcagggtgattgaacctaatgttatctcaagtctgataaatttagaagaattgtacatgagaaatgtgtgtaaagtatgggaggttgaaaaagtcagaaaccaaagaagtagagctagtctcgcagagctaaagaatttgcctcggctgaacacattgtatttagaaatcgataatgataatcttttgccaaaagacttcattactagcaagatgacgaggtatcaaataatggtaggtccatcctttaatttcatgcaaaaggagaacatatcacattcaagagtcttgaagttggagcttcacaacgccaatttgatgaatgaaaatggtcttaataagcttatgaaagaatgccaagcattgcagctcaagggatgtgaagataccaccattgacatttgtatatcaagtgctgatggttttcccgaattagagattttcgacttacatgatgctcctaatgttgaataccttgttagctcagccttgatgtactgtaatcgccctgtctttcgaaacttggagaatatggttctcactaaattggagaagctgcgaaagatatgtgatggagaattggtagcagattcatttggtaagttgaaaaacgtcgcagtaagtgaatgtcacacactgaaaagtatgtttccagcctcaaatattgttggacagcttgaagaaatgaaagtagagtattgtgatatgatggagaacattgttttccatagaagaaaaaatggcacctcacagaagattgagtttctcaaattacaaaaattgtatctgtgtgagttaccaaaattaattcaattctctacagttcagtgggagccaaatttcactacttcatcatcaatggattccttaccaaatagcaatgcattgtcattttttatggaggaggtatgcataagctttttttcttttatcaattaaatgttaggattttacagtttcttgatacttatgaaattttaattttaaacatacagttagttgaatatgcaatcatttttattttcacttcatatgaagttaattataattttattttgcaggtggtagcatttcctgttttggaggaattagatttgagttcacttgaatctatagagatgatttggccctatcaacttaaagaagtatcttacatgcagaatttaaaggatttaactgttgaggagtgtgaaaagttaaagtatgttttctcttctagtgtggcaaaaagcttagttcaacttagaaatctcaaggtagagtgctgtgagaatatgcaagagattttagtcaaaaaagaaggaagtttgaaggagaccattttgtttcctaaactagagtggctcaaactttattctcttccaaatcttaaaagtttcagtgttggacaatatttagcaatcgaatttccatccttaaagatgttggaaatatgggaatgtggagaattgaagacattccatcaaagctgcaccaatgaaattgagaaacctgaacgacctttgatcgatgaagaggtacactttacattttaaatgttcaaaagtttaatatctatattgtag

SEQ ID NO: 36968 - DNA, 3170 bp, Cannabis sativa
agtggtgctgtgtcacattgccttgggtgtgacaaattactctttccttatgtggtacattttcaaactgcttagctttagtttcatcaaatgattgacaattttattgaattcttaagtctcatgtaattatttatttaatcaacttcagggatacttaactattattttatcttctctgattagtcgagagatgtttaacaaatggcaagctcaaagatggtgggcagagaactatgacaaggttatggaactttacaatgttcaaaggtttaatcgtaatgcattccctcttccaactccacctagatctgaagatgaggtgagcttgaatcctgcttatataacatagacattaatcacataagtggctgttttcagctctaattgtcattgaggagagtactttgtataagttgtgtttaaacatgattttttgagaagttcgtcaatttgtcaagtgtaatgtttagagattgaatcctatctacacaaacttattcttagatttactctttttcatgtttatgttatataatattaattcctttgtttacagagctcaaaaatggaatctgcagaggctagtcctgtaacaccaccactatccaaagagcggttacctcgtaacttataccgtccaacagggatggctatgggctactcatcttcagattcatttgaacaacactcaatgcagtcccgtcatttcaatgattccgttggtgttaattccacaccgaaactctcaagcatcagtggggctaagacggaaacatcgtccatggatgcttcaatgagaagtagttcatcaagagatgcagatcgttcaggcgagctatccattagcaatgctagtgatctagaggctgaatgggttgagcaggatgagccaggggtttacattacaattagagcattgccaggtggaaagcgagagcttagacgagtcagattcaggtaatatttcttgctgactgtaagcttagattgcagtaaattgattgagctcttgcacagtagttcctagtagcattctagacaaacttttaatgaagttcacaggcaaacaattaaatatagtgccccatttaatggccattagcacatatcatatgtagcttgctagctggaaaaacatatttgtcaataaatagaatggcaagtctactagacagtcaaaataatttatatcctctactctttcaggcatttaattttattttatttggtttctgataaggggtaaattctggaagacacattctcatttaataagtgtgtacagaaaacttgtgacattaatttcaccatacagcggctgttactcgttagtgcaagctgtaattatgtcaaaagtactcttctaagggtcatgatttagccatttgaattgttgtgctattaaacctgggttttgctgctggttcattttcaaaccttcttatatgctttggtttcattggatctggacaatgtatcacttaaaagtgaaaacttttgtgattttttataatgtttttaagccgtctaagatattgtctccgacatatcaactctttacttgttaaaaagaaataataaaaaaattagttcatttactattcttttgattgcgctccctaagcttttggggacattgtaagtcatcctgttctgctttcaatttaacttcagactgaagatccttgcgtggctttaaagtttagtttctattcagtttcatactaatgatggcttaaattgtgaaccataagatacaatttttccagctacaaactcgacataattattagtattactcaagttgatgaagctgtttcctcacattccttttattaccattcggtgttacacattacacatgcacatctgtcaaattttacgatcaaatgtgaaaaaagcttctagtttatgataattgtttaggaattgtctatgaaactgatcttggttgatgtttatacacctcgaatgcagtcgagaaaaattcggagagatgcatgcaagattatggtgggaagagaatcgagcaaggatacatgaacaatacttgtgatcaattgaaggtgggaatggggggtcagctgctggtgctatatcatcatccagagtctgaaggtgttggtttatttaaattttgtttatcttatttgtttcgacatactactaaaaagccttgtctatagaatcaaaatggtgctgctggcgcctctggatgttcaaaatgttgctgggcaacatatcatactccactacaaaaaaaaaaaaaaaagaaagaaaagaagaaaaagaaccaagttgcaaggtggctgtatgttgttgatccagatcttctttctcataggatatgggggtaatggtaatagacttttcatttcctcaattttcttttttcttctttttattcttattattaagctattggtgggtgaagagcatctttgtatttgaatttcaaagtcgatatgtcaataccagtgaaaaaatattctctttctttttttttttctttctactgttgtaacttttttcatagtaaagcatcaacagcttttccctaaaggctaaagcaatatagctccctgcagtaataaactcattccagctggtaatattactagtagtacacatttaggagagaattggtggtttgttcctttagaatagagagaatttatacagtagaacctcactaatatatacgaagaataacctcaaaaatgaaatcttgggcagttataaataaaaataatttttaaattgtaaagccttgttcataaaatttaatcattaagaaacacagcaaataaacctaacaagtattgaaaaatgtccattaaaagaaaccatcggttctttccggtcttgaatctctgctcaaaacgcttcttggtctccttcaaggcagtgactttcttatccttagactggagaacatcaacattaacaacatccttgagatcaacatcaagagtgtaccgagttggcatcaaatgttggtagttaacaagcttgacaaaggccttaactcgggacttcttggcagtcttcttagccgagtctttgcgaataaccttgcttgggtacttgttaatcccagcaaccaaacaatgtccataagggcgatcacgagtaccatcatcaaagttacgaacgatgacaccctt

SEQ ID NO: 36969 - DNA, 2835 bp, Cannabis sativa
tattgatgcttggatcaatacggatgatgatcttaattggcagttcacggggttttatggggaccccgatccttcgcagcgaaaacactcttggacacttctaaagcggttagctagaagctacattggaacttggctatgcgggggagacttcaatgagattagatgaatacatgagaaatttggaggaggggggaaacctagatacttaacgaaaaactttaacaatgctattgacacttgtgctctaagagaactcgaattcgatggtagcaacttcacttggtgcaatggaagggcgaaaaatctgatttatcagcggctagacggagtcatggtgaacaataaatggtggaatacttatgcaattgtaaaggtgaaacatctaagtaggtggtgttccaatcactgccctctattggtaaattttaaagccattccaaatgatgataagaagcagccgcaatggggatataggttccactatgaaagtgcgtgggctgacaaagaagagtgccatcaaataattaaggagattaaggaggggggcaacaacatacactcggcaaaggagttgggtataagaattactcattgtgggcaaatcctgggtcaatggaatgcgaaggaaaaaaaagaaagccagactaaaataagagaattgaaaaaagaagtggaggctttatctcgggatcactcacacaaggttttaccagattgaaagaaaaggaaagagaccttaatggacagcttgcaaaggaggaaatcttttggaaacaacgaagcagggcaatttggcttgcacatggggaccgaaacacacgatactttcatcaaaaggcttcttctcggcgcaaaaaaaaaaaaacaaatctgtggcctttttgatcacaatctaaactagcagagcacggaagaggagattgagaagaccatatgtgatcattttcaggtttttttttcagccaatgaacccgaaagtgacctcataactcatctacagtggtttgttccttcgagactaagtggaagacaaaatgaatacctccttcaggattttacagcaatagatgtagttcaagcattgaaacaaatcaattcgcttaaggcaccaggagatgatgggatgcctcgactattttatgaccaccattgggatgtggtggggtcggatgtaacacgtgtgtgtctggatatactcaatactaataaggattgcaggcccataaacaagacgcttctttgtctaatccccaaaataaaaaatccgatccaagttggtgacttccgacccacaagcctctgcaatgtttgctacaaaattgtggcaaaatgccttgcgaataggatgaaagatagtttaaaggaggtcatattagaaaatcaaagtgtattcattcggggtcgtctcattcaagataatgccattttgggatttgaaagcctccattgcatgaagaaaggtcgatttgggaatggaaaaaagatggtgctcaaacttgatatgtccaaggcttacgatagaattgggtggaggttcatagaagcaatgatgatttgtttgggttatgacaagagttgggtggataaagttatgagttatataacctcggtctccttttcagtccttattaatggagaagctagtggacacattcaacctcactgtggccttcgtcaaggcgaccccctctctccttatttgtttctcctttgcttgaaaggtttgtcatgtcttatccaagaagcagaaagagcggatagaatccatggtattaaatttggaaaagagggcctcaaattatctcacctatttttcgccgatgatagttttatcttcttagatgctacggcaacggagtgtaaaagtatgaagactatcctagaagaatattctatgttgtcaggacaacaaataaacctagcaaagtcttcactatgtgttggcagcaagataaagcaagagcagggtgctattctcgcggctgaaattggaaaagttagttgaatatcacacaacgtatcttgggcttccggcttctatagggaaaaggaaaaaggaagtatttgaagctattcgctataagatccgagataaattacaaggttggaaagcaagtttattctctcaagcggatagggaaattctgttgaaagcggtaattcaggccattcccacctatgtaatgagctgttttcgtctccctaaggaactaattaaggaaaatcatggaatgatggcgaggttttggtggggatcgttggattcgaagaataaaattcattgcgggaagtgggaaaaactttacaaatcgaaggacaaaggaggaatgggattcaaaaatttggagaaattcaaccaatctttattagcgaaacaaggtaggaaaataattaacaatcctcagtcattgatggcccgtgtcctaaaggcgtgctactacaccagttctaattttttggaagcaaaagtaggtggatatggctcttttatgtggaaaagcattctttggggccgacaaatcatcgacaaaggcattcggtggagggttcaatcgggctgagaggtgcgcattaatgaagataaatggttacctcgccccacaacattctcactccgcaccctagcaaaggttagtaaatgagctactttagatcaaatgaaagatgagaacggttattggaagcatgagctaattgaacaatgctttcacttggatgatatccctcttattttgggaatggccccttgctttaacaatacaaatgacgatcatgtgtggcacttcaccccaaatggaatttacacggttagtagtggatacaaagtggctg

SEQ ID NO: 36970 - DNA, 2801 bp, Cannabis sativa
aacaacaaaaaccaaaaatatcattttctgaaactgcatgagaatccatatcatatattcatatggttccttcaagataccacaaactaactctacttactcatatcatacatggcttaaaaaaaaattccccaataccttccacaaaaaataaaaacaaaccacaagggccttctttctcttgcataataaaaaacccccaaaagaaaaaaaataaaccactagagcttaaggaatcctcattacaagatcaaaacccaagtgtgttaccaatcccaaaactcacccatgttaaagtgatgaagtaaatgtataagtatatatatgaagaagcactaagagtcttctttttcttatatgctatacagtactagacttagttttcaggaatcttcaatacaaagatcaaaaccaaagtgctttaatgcttcttctctccctaaactcactcattttatagtgatcaaataaataaaatgtaggattgatttgtgtcattatatgactttatcacaatatccagcagaaaagagccctgagcattatttcataatacaggaagagagagcagcaggagtatatattcagtaagaaaaaaattcataattaattggaaaatgccagatctggcaaaagggcttttgcttcttttttaccctcttccattttacactgtaattgcaattagcactgcttacttgggtcgtctccggtaagggtatagaatgtcatccaagctctcttttatgtggctacacaccctattcacattcctcgctacacccgatgctactaagattgcattcctcttaaacctgagtatacatttatgaacttttaagcttttggttgaaggtaaaataaaactcagaagctagaagattaaaccgaaaagtataagtaatttgttcatatattgcctattttcattttgaatgaaatatgtgacttgcctgttaaggtattcatctcctgctgtatgcattggtttgtacgttcgaggctgagggataggatgaggatgaggatgatcattttctagaaagaatacagaaagaacaatgagacagcattcaaaatggataaattacacaaaatattgaaaatgaaacacaatcacttggcaataacttataatccacagatatagaatggatgaatgagaatagatcctaagaagagaattatgacataagatcaggaaaggatgaattgaatatttaatgcacaatgtttttgataagataagaaatcacatttatggttataagaacaatcacttacataagagaataatcgccaaaatgtatatttatataagaacaatagatgattaaaaagagaagacattttccatgcacaaagacttataccttcacttttatgagcatgagtagaagcatgagccggagcatgagtttgagctgtttgaccttcaggccttttatccaataacacctaacaaaaatcaattattttcggttattaattgacaaaaacaaatagctggatcgaacatcactacattacaaagaacttcatctttaattcaggaattaactctaggtttatgatcatgactgtattggtgatagttatctatccctatctaaaaccaaagacacgaattttttagtattgacaaaacaagatttagcaaaccttgctatatactaaaaaaaatcatctattttcagcagttgctgaacataaaaaatgcaaaagaatgagtttttggtatttcacctcaaggccgacacaaaatggcaattctgcttgtttgttctgtggatcatttggagaagaatctttgttatccaaaaacactgagtaacctacacaagcgtacttaaaatccgtaaagctgcggccctccttagaagcttcgaattcagtttctcccacaatgtagtcaggtactgaaaaaaaaaaaactcaaaaaatcagcacgtctactatatttttatcaaacattaataatatgttatttgtccttacaacagccaagacagcaccatgtacttggttaggaacaatgtcatagttcgcatatgaatttgactaaaaatcactcaaaccatcattttaagatacatactacatacaaaccataagattttcaaactcccgaaacctaaaaagaaaacaaataacattctttccttcactagaaaacaaagggacaacaccccatgccatggtattcaatgtgtgtttcatatttaaaagtatgaagcaaagagtaacaattccactagactagaaacacattacataaaaagccataacatcacatcatatacttaataatttaaaagctggaatctgaacttaaaacaatctacttaaccaataatctaggagagatgggtggagggtgagagtaaaagggattggtggaatccattgtttggtaggagggagaaagggagggagaccttttccctccaaatcccaaaaatgtaatccctccacttttggaatgatttaagaaaaagacaaaatgaatataccagctaatttcctctccatccttccaacctttctcctaataccaaacaatacaaaggagagatactatcctctccatccttcctaaactctccctccttcataccaaacatagtcttaggtgtttggcaacatagacttttttttttaaaaaatgactatttgcaacatgaaattctttagacaattctttgcaacctagtaccattatatctattgtgcaaaaaaaatcatcaaaagcatgctactttgcaaaattatattttaaaaaaaaagaatctactttcatg

SEQ ID NO: 36971 - DNA, 2250 bp, Cannabis sativa
ccggtaaacccaccactattgttgctgggcatatgtggcacgacagcattcgttagcatgtggatgcacaacgtggcagctgccctgctgatgatgcccgtggccacgggcatcctccagcgcttcccgacgggctcggcacaatctcctttagtcaacaaattctgccgagctgtggttctgggagtcatatactctgctgctattggaggaattagcaccctcaccggtacaggtgtcaatcttatattggttgggatgtggaggagctatttccctgaacaaaatcccattagtttcaacacgtggtccttctttgcctttcctttagctctggtaatattctttgccttgtgggtcatactttgctgtttgtacatccggagaggttccagccaggccctttctgcttatttggacagagaccatttgaagagagagctccaattgttgggtaagtataagtaacactgaaaactattagaatataataagtgatcactatgtttgtaggtttttacaatttgttacttgttacttgtaaccatattctgtttccatgtttggcaaattagcgtggtaccccttttttttcacttttcaatttgataaatatatattatctggataagcacaaaagatataaactaatattattattgggtcaaaatattggaaaaaatgttatgttatataatatgtaataatgtaaataagaaggggaagaaaattcatcaaattacataaggcagtttgtctgtttgtgacattcagttaaattatgttacaggtccgatgtcctttgctgagaaggtggtgttagctgtattctcggtgcgtttttaagtcatttaaatcttttcgttagctcaaatgttaatacatagtaaatatatgagtatgtgtggtttagctttctaatatattgagttgagtttgtgcagatgttagtagttttatggatgacaagaagattaacagacgacattcccggttggggtgcactcttcaacggtcgagctggggatggaactgtcagcgtgagtttatagttttcttaaagcaagtaattaatgtcgtttaattaatttagtagccaacattctctcaaaaagtgtcgttttaactcaaatataggtaatgatggcaacgttgttattcataataccaaacaagaagaaaccaggtgagaagttaatggactggaacaaatgcaagaagcttccttggaatatcatactcttattaggagctggttttgctattgcggacggtgtcaagaccagtggccttgccgagatattatctaaagccttggactttttggagaaagctccttactggggcattgccccggctgtgtgcctcataagtagtctcatcactgagttcatgtccaataatgccaccaccacgcttgttatacctatccttattcagatagccaaaagcatgcatgttcaccctttacttttcatgattccgggatcaattggggctcagttctcctacttgcttcccaccagtacaccttctaacatcgttggattttcgactggccatatcgaaatggtagacatgatcaagactggcttgccacttaagattgttggaattgcagtcatgtctatcttaatgcccactcttggtaagcaaatcttctcattcatatatttactcatatcttaatgtccattttaaggtcaattcattttatgtttgcatatatgtaatggttagtaaaattttattgtgcaggagcttatgtatttggaactgacagagcaatttaagagcatccgtagtttaaaacagagcaactctgttttgtaatattactggcgttctgttttgtaatacacagcaaaaagtaaatgttatatagttctcatcgaagtgccaatattttactttacgctcttaaataattttaagtgtctaggaacatagaaaaatatttaattgtacaacgatatgtaaataaaacatagtagtttactttgaagtgtttattaaaaatgagaagaaaaaaatggaaaaaaaaacatattggaggacaaaagatgataacaataatatctccagtttgtttcttttaactgtaaacttcagaccaattcggcctcagtaatattagcaatgtcaaaagagagattatattttcaaaaaaatacgatcagcatataaacaagatacactaaccataagatgagtagtctgattaacagacaatacggaaaaaaaaaaaga

SEQ ID NO: 36972 - DNA, 4367 bp, Cannabis sativa
aataaaataaaataaaaattatactccaatttttatgagggaaagaaatgagaagtgtaattacttttaattagttagttactgtttgaatatatgatgaaataaactcacaaattaagtaattatctcgaattaatcctaaatccttagcacacccttaatagtttttttttttcttttttcagaaacatacccaacccttaatagtttgatttatgtaaattagtaataagggtgaaagacatggaattctgaatttatgggattctatttcagtgatttgtgtttgccactaacgtcgttaaggatttattttttaattaatattttataaaagttgaagattcttaatgatcattgattaggaaaagaataataaaaaataaattcatatctgttaaagactattatttttatcaattaattgataaaagcattagctaattataagattttatttcataaaaacattagctagcaccatacctaatagcaatactcttatttagatactaatcttcacaacaacacgaattctctatttgttatttttttttttcatcacaaataaatttggtgagtgattaattaaaagggaaatttgtacttgtacaacacaaacattataaaagcaatttaataaataaataaaaataaggtatcgttaaattaagagaataaattatgataaagtcaatgtcttgaaacattatcattaaaaaaataagcattatcactattataaggtaagatgtcaagaacaaagaagttgagacaacaaataaatcatttgtagacttcttcctattattagaaaatacttgtaggcatgacatggacaaaccttattgtgagagagatcataatccgatgaagaaaaagaaccataattatttatatgcatttttattagtttgtgtgtattattgggatcacttcttctcaatcttcccatttatataaataattcatttcaatgaaaacatcttcaaagcaaacaactcaggaaggactagtttgatagaatatatatgtaattattcttattattatattatttttaatattttatatttagtttaggattttattctgttggaaaatcaaaattcgtgattcttagcctaacttgtaggcatgtactccatatatattaaccatactcgtatcatgtcaaaatggtattcacccataacataacacagaatacacaagagcttataggcttggcttctttggggaagttgattttagatctggtattattagttgacttcatttttttggcaaatgtttgtcttattctatcaaagtttgtattagatttggcccttctttccttgtgaataaaattcccaagtctttcttaaaaataaaataaaagaaacattttggaaaatgagataaaagaaggtaaagtaaacctatgaaaaggggccaactatgactttgaaatataggttttaaatgcaaaacaaagtttcaacaaagagggaagaaaatcatcgctatattgaatacatctctttgattaacatttcgatcaccaaaatcagatacttttggacactcttgcttctttggtaccaacttcattcagtgttaaaggcgcccacaaatgctacacaacactttttttctttcctttcctttcctttcctagagggacatcatcccttttcaatattctaggcacaataagataggatccacaaaaacaattttcaggctgatatcttccaattagcattcctgttgtttcaattgtgttcttacaagtatctagacctaacgaatcataagcggtgactgaaatacatgttcataaaatatctcgatggattgaagccactcaaaataactgcagagtgagaaaagaatgttagtagtgtaagctattgtaacattaattcaataaagaaagaaaattgagcagacacacttacagattggagtaaggacgatgacaagaccaattgggtataggaaaaaagtggtcctttctagaaagggaagaactgcagaaaacaggaccatggttatttgtaccaatattccaactattggcagccatgttattatggttgtcgttttacaactttaatagaaaagtaaaaacaaagattggattgagtcagtggtaattgaggataaaattattctaaaaccaaaatggaaaatcaaaacaaatttatagacagtgcactctagctggatcattgtcaaaacaactccagttgcatgaataatgaaagtcagttggttttggtgatgcttagtaacttattggcatgatttaaaaactaaatgctataacttcatctttcaatttaaagatctcaagaatgaagaagaaattctttttgcttcaagccaattcaaaacaaattgaagacatgtgtcaatgccatattgaacgagccaaaaataaattcctatatcatgcaaagcaaacccaaactcttgtctatgagcaaaatctttatcttaccatcatagcctaagaagttgagataatgatagtaagaagtagccaccatgaatagtaaatttgacagtagcactggaatgaatccgtgagctaccaagagaggggatagaaaataatggatcactgcaaaatcatgacatagtagcattatttcataaattagaatcaattttctttttttaaaaaaaaaaaagaaatatagaataaaataaagaataacgatttattaatgccgctattaccataagccatcacaaacatcgggaagaaagagttgcagtgcacatcaaatgcatacagccttcagtgatcaagaaaagaagaaagatagtttcagtcaccaaaataattcaatatgaactgtaaatcacagaaactgaaaaaggaagaaacagatttcttttgaaaaactacacatttttctcaaataaatgactttcattacaggaacagttagaatgcaaaatatatgtttgcacgcacataaaaggattaagagatgcatgtgctgatgatttaggttcaggaaaaaaaacatgttcaattctccagttgaaatttagattcctaatcaagttagaaaaggattgaagacttgccattcaacccgttgctctactacatgactgtttggagcttcttcccgaaggtaagaattagtgataaacctgcaattacgttgaggattttgccattaaattgtgttcaaagatataaattgaagaatcagccaacatagaagaattaatcaatatagctagaatataatatcaactatcctgcgcagtataggcagaacatatatttaagtgtcctgcctagtatcgacctttaggtttgtagattaccttttttttgtatggtgagttggtagattgtttaaaacatatatcacaagagcaaattagcacagcaaactaataggggcaattttaagactaacaaaaaaaatcccgccaatttaatatcacttaccaacaaaaagtggccagaagtgtcccggttaataaaaaatggaaaatcaatactgaaataactacaaaaaaagcatgcccagcactgtggtcgtacctgaaaaaggcaataaaagaaacataaatttcggcattcttgaataaatcaataatatagaaactcggtatgtcaaagtattacaactgaagatattccaaaaccattatataattttattttcttcaaataagcagactaaaatagaaacatttctgtattcaacttcatattcaccataagatagggtagtaatagcattcttgaagaactcaattattaaaaaaatcagtagttcaaagttgtacaatcaaagcaagtcctcaaacctggtaacctttctccttcacatatatccttgagtaaaacttttgaattagtcaatttcgatttcataacaaacgctacaatgaatcaaaaaaatttaaaaaccacttggcatgaagataatggtgaatgttaatctcaaaacattgtagcacttgtttctagttttaaagttgtggggccccactaattattaaggaatttatgacatttggataaaaatagacaagtctcattttcaactaaacatataaataaattacttttaagaatctaagacaatattatcatacacaaataaggggctgttttttgttaggataggaaagtgtagaaagagttagtatgtgggggaatgtgaaactcaacttttcaaatggacattaccctttaaaatccagtgaaacccatgaaaaataaacacattcccacctaaaaaattaaagcaaaaaaggggtacactacacattaccctatccaactctgatattaaatatgaacactttatctttgtattggtttcctttctcatgaaata

SEQ ID NO: 36973 - DNA, 2952 bp, Cannabis sativa
tttgtgattgtgagacggagagtcagagactttcggcggaagaagctttaccatctttagccatgatccaagataatacaaagttttatggcaattggttattattatattagtctaattaaaaatgaaaagtaatctacgtttccttgaaaacacataagaagctgcctctttcaaatattgaaagagtggtcactagaataaattatcctgaaaaaaagagtaaaggacattggatggttttaccatcgaattcaattgacgtttttttttcccaatatacgtgtaagtatgagcaaagcacaattatgttcatgggatgagtgagcgattttggaaagtttcctaaaagagtcaaaataccatatcaaacaaatgtatacgtatttgcaaaaaaaacaaataaaaaaaatgtagagacccaagcctcgaaagaaggctcaccttgttcaatagttgtttgagtagaaatgcctaaatttgttttttggggcatggaacccatgtgacaattgattcttggtcgatgcaagttttaattatgaaacatggtggattcaattcaagcatctccatcttctaggtgaacattgaacagtatattgtttatactattcatagcaatatgtatggtattcatattttattggactgatacattgaaaacacattcattgtgtaaaaacaaattagataaatgaattgactagcaaagaaaaggttactttcatttataaagtccagtagatgacattaagtttggcaattaccaagcatttgttcttttgactggcaaatcaatgcttcattacaaagcttaaaatagaaattttgataatgcaattaaatttctaaatgggtcttgttcaagagtcttgagaaggaacacgaaaagatctttgataattaataataataataataataattgattttaaaaaatcctgcaatgttaaaatctcatgtcttccatacccgaatggtgccgtcaacggaggcagatatcatgcagctgtcctttgggtgataactcacacttgttacctgccaaagaaaaacaatatgaagaaaagacaaaacaaaataaaacatacccaagattctattaaaagcttgtttctataaaactaattgaaagggaaactaattgaaagagaaagccacgctctctaggatatccctctaaaccaaaactctacatgttaggctgggggaatgggggaccagcttaagtgtgcagaacttaaaattgtgatttgtcagcacatggctatctaaatttgataaactaaggagagtaaaaccaataaaagaacttactatcaaacgtggaggaaaagatcatgtgtaattaattggaccatcctccatgaattttacaatgaaggtacttaattggatatctaaaatggaaaaagtacactaaataattacaacaaggccctctcattcttggaaacatatgggaagcttaatccatttctaaactaaagaattattgatcactttccctacagaaactattgtcaagaataaggtacaagtacaatgaccattatgcattgttaaaacaaaatctgccagaaagaattggaaacatgcagcctttaccactgaagaatgagcccggaagcttgataccacagatgcgtctaccagatcccagaagtaaatgaaaccatcctcagatccaccagttacatgtgcatcagtgtttgtaaggcagcaatctagtttgtatgactgttacagaataaaagccacttgaatgatttatcctatttagtaagaaaaaaaacttgagacacaaaagtaacaggatagatgagtaacaaaagagcacgaaggatatcaacttcatatcatagaagcataagatttcaattcaaactcgagcaaaatgatgatctaaatttttgaagaaaaggaatgtcactcgcagtggaatttaatgaaagtagcaatttaatgtatcactaaacagagaaagagtaatctttgtactaaccttacaagtatgacctttatattcctgtagcagttcaccactagacctataacgtaaaataattacaccaaatgtcagtccaaatcttattagattaaattaaagaactatatagatgaagacacaatgatttttacctatccagaagacgtaatttcgaatctaggcagctcgctaataagcaattaccatcatttgacattgatatacagttcacaggctgccccaaatcatcagaaatttctctatataatagagaagaaggtttagaaaaactcattatcacatcccataagaattcaatgcaaaagtttagtgttcaagagagcaaacccaagaaaaggaaattgaattataattcaggtagaaaagaaacttccaaatgttcaaaaacacagactactccaagaacacaaaaatcatgttacttataacaatttcaccatgaacagaacttacctaccaatgcgaatgtcaaaagttcggacagttccgtctacactcccaccaataatttcagttttagttaagcaaacagacatgacactatctgagaatgagtcaataatctgcaaacagcagtaaccaaaaaaattaaatgaatcaaattctaaaaattcaccaataaaaaacaaaccacttcaaaccaatatgttcccaaatgcacaagttcaaagaaacgtaacttgaattggctcggtactatgagacctacagtcccaagcacgcaatgactgatcataacccgccgaaaccaccacggacgagtattcattgaacttcacagcatttacctttaaaacaaaagcaaattgaacaaaattcaactcccttacacaaaacatcacaaagttttcttcaaaataagaaacgaaaaaaaaaagcagacctcgccttcgtggccgcggaactttcgaatgacacggccagtggctacatcccaa

SEQ ID NO: 36974 - DNA, 15933 bp, Cannabis sativa
  modified_base (13120)..(13127): a, c, t, g, unknown or other
ccaacgtaagagttttatatgcctgagtttaattgattttattaaatgtgctcttaatgtgcttttgattgagattttagaatatatagttttattaactattatcatatagtgagttttttttttttttttttttaaaaaaaaagttttgcatgattttttttctttttgcatgattatgggattaatgttatcaaaaaacgattataatgagtaagtgagaaatgtaaaacacattttaataattaagttcctttaattatataataacacttttgatgtaaattaataatttttcagaaatacgatttgacatgtttcgttgttaaagtttaatacgatgttatcttcaaacaattttctctcttgggatttgagagtccatatagaaatattaatctctatctctaccgtattttaaagtatattgtacatatagtagattttaattgagatttttagtatattttttggattttataattaagaaataatgaatcttgataacaggattattgtcaaaatttcccattaggaaattatctaataagattttaaatgtatcaaaatattagcatggataagattaaacttgaatagtttctgaaactgtttattattttgctgttaagattaaacttgaataatatgtgtttgtttttgatgcccttgttattataatgatgagtatcaatgtgggaaatgtgggacataattttcagcataattttcttaaacattactcattctttcatattcttgaatagttgaatcacatttgaactttcaaatgaagtaatactatttgtcttgtgatcccaagtaatactgagcttcaaccacccacatgattctagctagtctaatataaaattacaatgtaaggtaccaaactaccaaataccaatatcaattctgagctagaaaaatgcttacaaagcttggtttgcactaaaagtgttcactaaataaatttgactcagatgaacctcttttttttacttctgcacatgagaagtgtctccctcatatgcatgacatacaccccaaaataaaaagaaaactattaataaaaaaacacaacatttatctttactaatcatgaaattaatgtaaaaaaataaattaattaatgaaattaatgtcaaagtataaaggagagaaaatagagctttgtattttcataaatgaattatgagagtgaacagactgtcattacctggactccttttgagctgtttttttctcattaaattatatacatacatgtcttcttttgaaaaatattatttgcctttttttttttttttatatttaaacttttacattcacggttttgtccatttcttatttgcaacttgcaccaacacatagaaataaatagaaaacgataagacatatgagatgtgttaactgcaaaaatatgaaaggctatcaacccaaagccaaaagtacttattatacatacaatcaaaaaaagggaggcatatatacaatcattatatattaagtaccaacaaagaaaagagcatggtatttacatattattgttatacatatccaacataattatagtattgaatcacttagttggcaaatatgcaaaccttaatcatgattttcactaatcaaaatgctactaacataaaacataaagaaatgatagtctgtaaaactaactaattagacttttactattattaaaaaattatgctaattagtctagtttagtggcaatacgcttgttatttacgaaaagaaattgttttaagtgaaacgattttgttttgaaaatctagaagatgggaaaggaaaaaaagaataagaaagaaatccccacattgtaaacaaagtacagctacaagaaaacaaatttttgtttcaatattagttttaaaaaagtggatcttctttaataagaattacattgttttctttttttactatttcttcaatcatgaatgcagctaactctgggtagagagctcaacagtcaacacaaatctcaacttaatgagaggacttaagagtctcatgcccccacaaatctctcacagctttcaatgttgggaaaaaactaagaaccctttaattgtttgttagcctcaaaatctcatccacaccctctccaacaaatctcaccccccaaaacacccctcaattcccaaaattaagtcctccctaaatatagattcacccaaaattaacattagaattaaaacaaataaataaatacacttccatagacgaaattgaggtataataatagcccccaaattcaaggttttccaaccaatcaaattcatatggtttttttttaataacttacataatataacctttctattaataaacaaaacaaataaacaaaaacaaaaaacagaacttgtcataaaactaaattaaagtcatttcattaattatttattaaaatattatttgtaccttctccattgtcaaaggttaaaaaaaaataaacacttacctttccacacaaacaaacacagagagggatttatacttatagcaatgcctaatcaaaatgaagattgttaatctcttccttttgctttatgtaatacgtactatatagggctataaacacttatactatcaccaccattaccattaccatcaccatccaacaacccaatcctccaagaaaccagaagattcccattacacaaacatgtaaaagagctaaaaaaggaataccaacaaaaataccaaagctcccccactttccttatctttgacacccctctcatcaatatcaatatcaccaccaccaccaccaccacaaaaaaatcttaaatttcaacccacacctcccattttctcaaaccctaaccctagcccagatcaatcaaattgggatttgggactcacattgcaatttctttttcctgattgttttattttttatttttaagggtggaaaaaaagaacaagaaaaaacaagtgaggattggaaatttagggacctgggttctgttcaaagtcgaaaactttcccacatttacagatgaagcaaatgtctcatcttgacaatattccttcaactccggggaagttcaagatggagaaatccccttacattcacagacttcggtggcattcctccctcgctaagctcacattttggtccttggttttcttgggtctgatctttctcttctttttccgatcgccttctaatcctttaccgtctgatccctctcgccgctctcttaggacgtacagttggggcggagccgcctgggaaaaacgggtccggtcatcggctcgggttcggtcccggaatgggatttcggtattggtcacgggagcagctggatttgtcgggactcacgtgtcctcggctctgaaacgccgtggagacggagtgcttggactcgatagctttaacgattactatgatccttcgttgaaacgagctcggcaagcgcttttggagcgaaccggagtgtttatcgtggaaggagatattaatgactcggccctgttgaagaagcttttcgaggttgtggctttcacccatgtgatgcacttggcagctcaagctggtgtgaggtacgccatggaaaatcctggttcttatgttcatagtaatattgctggtctagttaatcttcttgaagtctgtaaatcggtgaacccacaacctgcaattgtttgggcttcctctagttctgtttatggtcttaattctaaggtacccttttctgaaaaagaccgaactgaccagcctgctagtctgtatgccgccactaagaaggctggtgaggaaattgcacacacttataatcatatatatggtctttcccttactgggttaaggttctttacggtttatggtccttggggaagaccagatatggcctatttctttttcacaagggatatattaaagggcaagtcgatttcaatatttgaagctgctaaccatggtacggttgcaagagatttcacctacattgatgatattgtgaaaggttgcttggctgcattggatactgctgagaagagcactggaagtggggggaagaagaagggaccagctcagttgcgggtttttaatttagggaatacttcacctgtgccggtctctgatctggtcagcatattggagaggctcttgaaagtgaaggcaaagagaaatataatgaagttgccacggaatggggatgttcagttcactcatgctaatattagcttggctcagagggaacttggttataagcctactactgatctgcagactggtttgaagaaatttgttagatggtatcttagttactattcaggtgggaagaaggccgctggctaacataattctttctgttgtgtggttacggtatgatccttcgaatttcgttcattacaattcttatatgatttgtttttaaaacatttctctgttcgttgccatatgattactcgattatcatctttcaatatatcgtaatgatgatgacatataaggaccctttgtgtcctagactgaagcaagttttgtggttggtggacattgtttgcggggagctccctccctagctgtattaaaagaaatttgaggacagtttttttaatcctttggaatgtaattgttgtagcttttgttctttctctttttcttcttttttccttttttttttttgtagaattcacgactgatagagcatatgctgattggtggacatgtatcattgccatgcaattcaataaaatagcacacagtagtttgttttctctgttttactattagattaactgaacgaactactgttatagatttttatgtaatggctaatttattcatcataaatggaattatggaatgttgtattacatatgtgtcttccattactttagctgcaattttgtatgtttttatattcaaattccactttctagtctctctcacattcatttcttctcaaaccagtttaatctgttagttacacgcttaacttcagaatctattccagcttacttttttggtttgcttgctagagttgatgagtatcagagcattcctttatgttgctttccctgagaagttttctttatcttatcaattggtcaattggtcagtactgtcattttgtcatatgaaaaaaatgagggaattggattgattgagaattgactgagaactgcgttttgctaataatagaataaacttttaaagtctgcaatcccaagtctttaggttgaaatatcattgctttgcttcatcaggaaaacaaaattatgaaggcccagtctatatttgcacgtttttatagacacaaatacactcacatacatatgcacatatatgaatataaatggataatatttctttgtgtgtagtttaagtttcatcatctttaccccgtctcaattgagatttgtgtaagagacagttaaagaactttactatattggtaagtgttttgtctttgttattattagattaaatgatgtagctctgcctagtgcctagtaatcaagtaagagataattgccaattccctggagaaaaagaattttctatggatacttattagtagtttgaaatgtagaatctaatacataatgatgtacatttgacatttacaaactatggagattcagtatgggcaagaaactgcagtaaaaatcacgaatttattagggaagagagggaattatgattttgtgcccttcagattcttgtcataaaagagaaactgtaactgtaaaacctaatttaataaacatgactgaatgtttaaaaggcaaaatcatggttgacaatgacatgcaataaagaattgaattggcatcgtattttttgaagagccaaaccaaacagattggttgccattgtttccagtaaccaaatgacaagtgtttaaagacagagaaaaggaaaagaggttcaaacaaaagcatatcataattaatgaaggattaatgtgagtagttgtttataataaagtaacactgtaaataaacacaagatatctgagtgattgagtgagagagagagagagttactagaacaacgcttcttttgttgaataaaagacaagggaataatagctttgtctctgcactatacaaccacaatcccatttctctgatttctttattctaaattaagagtcagtctgtctaaatctgataatgaaatccaagtaaagaaatctccctctctcatcatcctaggctttatacttatgagattaataggttgatagcttgatatgtcatagcttgctttctctactgctactgatcccaaacgaagtttagtgtgctggcaacaaaagtcataatattgaaaacaagaacttcaaataaaattgagatgaaacaattggttaattggtagaaggatttcactatggtaaaagtaggataactttcactaaaattggaaaattacaaatgactcattctcttataatagtagaaagaggacactcctactctaactaggcccagcccaagggtggagtgagctgggccattgctcaaggtccctccttatccaaaaaaacttaatttatttttcaaaaatactatatttaaattttttttatcactatttactaaaaacacactatatttctaaaaaatgcacaacttattttttagaaatgctatattttagattttattaagagaaaagacccaattttttttttctttcaaaatagcacattcaaaattttcaatactactacaaaaggtctaattgttttttggtccaagacccgacatactctctctcttataatacataaagaaaacactcttatacaaaggaaagaccggaaaggtaagaaagaaggctttgtaggtcatagtttaccactatgctaccattaataatggtatttaacccaaaagtgcgcttaaaatgaatacataattttgcatgaagtttatctcctttcagtttttctcggactagtactattctgttgatctcgagtcgtggggattttgtgtttctgttatagtgattttgtgctatctagtaaagagtaaagaccccttccaatataaaaaaaaaaaaagaagggaagaaataattttttttttttaaattatttatttattacatattataataaattagtacatatatatacaatttaatctccaactcaatgaaattaatagcaaatcgcttcttcacagacgaatatgtacacaaattaatgtggtggtgataattatgtttcaaaactgttatttaccattgtttggaattttgaaatatgggctattatgtattttaatcattattgttaattactatattagtttgatgtttaaataacatataaatatatgtttttcattttatgtagaatcaacttctcacaaccttccctcgtatgatatttatccaaagaattctttttttcctttatgtgtttggtaatattttatttatgaatcatgaacttttcaaacttctatgtatgctcaaaggagacaaaatatcacatgcacaccaatttgaaatcactttaatacccctcactttaatatcacccattacatcctttattaggcaagtataggaagacatctgtagattcatgcatatacagtgtggaaggaaacatatatatatttactttgaaagaaaaggtcaagaattgagacaccatttctgtcctatatatattgcttattatctgccacacgccacttggttttgtttgtagaataattgcatatcccaaaatcctttttgatttcatttttttttcacacttttcttttttcatagtaaatgaaaataaatgtgtccgctcttaaatgtgagctctgtaccaagaatattatgaatgtactttttagttcataacttgatgatttattcgggaaaaaagatcttactatgcattatactattctatagtcatgtattttttcagaacataaatcgagactaattatttttctttaatatacagattttaattactatacttggatttttgcagactagcggtgaaacaagattcttgctggttaaataataataaaaaaaagattcttgttggtatttttttacactttgtgctaagtttacaaaaacattgtatttttttatatatatttttttgctgagagattcttgtctaaagtttgtggaaagagcttcagaatatttaatcatgtccgaaggaaaaaaaacccataaaatatgtcccttctgtctaatcccctgacaaaataaactcacaagctctacaagaaaactttgggccggttttactaggatttaggtccctagcttttaaataaacgacaatttaatattatagttaaggtcacatggagcttaattacaagatcaaaaagtagttcacatgatgcattagaaatttagaagagtggagaattgtaactttgtttgaagacttttataaagtataatcaaacaaagaaacaatcatgtaaaactgcaattttgttctaattaggatgtgaaagtgaatgaatggaaataagtacaaagtgtaatagatatatatttatgggaaagtctacactacaccctactaaatagtagaggtattttggcaaactctttaattaaattggtattcatcaaaattttttaatataatttttttataattattaagatcgtttatatatttttaaaataattctaataattcaatgtttcaaaaataaaattaacatattttgttgcaccaaactgttcttttgctggtaatattattaacatatcatacattttaactcatgagcataatttcttcaaaaaaaaaaaaaaaaaactcatgagcataaaatattataaaaagtaaaaccacttttttagcccttacttcattgcacgatttgacaagagatgccatattaccatttacagttcatcattattaacaccttttcttttgaaagggatttttgtggaaaacaacctttttttttaattagctgtcaatccttttcttttcttttctttttggtggcaaaataaaggagctaattcttttcttaatcaatatagatgcaacatatatattagtgagataaatatactccatttaaccataaatttcatttatttgttaaattcttatatcgacaagaacttgtgcttatagttcaaaagtatttcagtagccggccttgaggtaatgtcaaaagtttatgacacaagttaataattgctaaaaaaattacgatctcccttttaaaaaaaaaagttcaagatttaatgttgatttttttgttttataagaatttaatgttgatttgttatatagtccatgataaatgtaatgatgattttcatgtacaaatgatagtcttattctatacaatataatgattatcgtacggtccatattatggtgaattgtactaaaggaccccactcttgtaaatatttaatagtcttggatacgctaagtcttacaagattcaaattctatctcgaacctatcaaaccaaaccaaagtaccgaaccaaccacaaacactctcctcgatcttctaaaccttccacattttcctacacacacactcacctcactctttcccattcccactatcaaaaaaccctgaagaacaacatgaaagaagaacacctcttctccttctcttcctcctgcattttccttagaaccaaacaccacctttaatttactagcagatagaacggacaagtaataaaaaaggtccagcctttcattcttcttgtctgtcattttctttcaagggcaaaaaagtaacagacatgcctctaataatcttattattcttcctctttccctcactctctctttcttctctttctgagctccctgctttaatggccttgaaagcctctcttgaccccaaaaaccagtttttgaaatcgtggactcctcactctgatccttgcagtggagcttttgaaggcgtggcttgcaatgaccaaggtcgtgtggctaatatctctctgcaaggaaaaggtctctggggtgaaataccagggactgtggctgagcttcgaagcttgacgggtctttacttgcatttcaattctttgaatgggaatatacccaaggagcttacgactttaagccagctaactgatttgtatctcaatgtcaataatctttctggggaaatcccagttgggtttggaaacatgcctaatcttcaaggtgggtcacttgatttatagtccaaagttcaccttttttattttcttaatacgtagagaaagattatgcattgttatgttattgggacatgtcatttttattgcactgaacactttgcttcataaaccccacattgcagaaaataaaatagaaaagaagaaaacctcaactttgtttagatgtatttcttttatttggtttatattcttcaacaaatatgtttatactaatctttcacttttgccttctgtattctcactaaagcttcctttggacttgctctacgtactaatgtaatgttagcatggttgagcctatatacttttgctgtaatgttacttggtttactttatatgatgattgttaagaaaaaaaatcttccctttattttcttcttggctccaaaaacgtgtaatgagttcttaagtaggacttgtgatttgttgcaaagtaagataaagcttcaattcaagttctctcttgttatatgcagttctgcagctgtgttataatagattgactgggagtataccaattcaacttcgaaatctgaagaagcttagtgttcttgctcttcaatataatcaactaactggtgcaattcctgcaactttgggtgaactgaagacactaacaaggttggatttgagctttaacaaactatttggttctgttcctgcaaaattagttgaggctcccatgttaaaagtccttgacatcaggaacaattctctgtccggtaccattccacaaggtgatgtgttcctgatttttctctttcttattgctctttcttttttcttttatctcttctaaatattaaggatgtagctaaatatatcgacctgatggcctttttgttggtccttgtgaatgaaaatgcagtttttaaaagcctagggggaggattccaatacgaaaacaacccaaacttgtgtggagttgggtttcctgaattgcaagtttgcacagctagtagtgaaggttgggaccccaacaggccagaaccatatcaacctggtaatttttctgccaacagtttcccaaactcaacaagtaaccattccacaaaagacctacccgagtctgtaaatttagagtcgaattgcagtggagctaagtgttcaaagccatctaagtctcctcaaataggtgtagttttgggggtgactggactttttgttgcatttgttgtttctggtcttttctcattctcatggtaccgccgccaaaaacagaaaattggaagtactttcgacccatcagatagtcggcttagcactgatcaggtgaaggaagtttacaggaagagtgcatctcccctcatcagtctggaatactcgaacggatgggatccttttgctaaaggtagtggtggattctctcaggaagtactcgaaagcttcatgttcaatctagaagaagtggaacgcgcaacacagtgcttctctgaagtgaatttgctgggaaaaagcagtttctccgccacctacaggggagtcctgagagatggatcggttgttgccataaaatgcattgcgaagacaagctgtaactcggacgaagctgcattcctgaagggattgaagatgttaacatcattgaaacatgaaaatcttgttaagttgagaggcttttgctgttcaagaggaaggggagagtgttttcttgtctatgatcttgtcccgaaaggaagtctgttgcagtatcttgacattaaggaaggcactggtttggttcttgaatgggcaactagagtatctatcatcactggtgttgccaaaggtcagtcttttataatttcttcaaagctttatcatatcagagtatataatggtgtctgcattagtagtaaatatttttacaataagagtaaattgattgtccaaactgttgattgaatcacaggtattgcatatttgcatggaagtaagggaaaaaagtctgctatagttcaccagaatatctcagcggagaatgtgctcattgacaacaactataagccgatgatctcggattcgggactacacaaactccttgcagatgatatcatcttctctatgctaaaagccagtgctgccatgggatacctggctcctgagtacacaaacaccggtcgcttcactggaaaaagcgatgtatatgcatttggtatgatcatatttcaaattctaactggaaaacagaaaataacccaatcagttcgccaaggcgcagagtcatgcagttttgaagacttcattgatcaaaacctcgctgggaagttttcagaatctgaggcaacgaagcttgctaaactagctctgctttgtacacatgaatctttcaaccacaggccttcaatggaatgtgttattcaagagttaagcgggttagtagtgagttaataatgtaatgttgttagaaagttttttggcctgaattaagatgtattattttactaactatgaatagtttgttgctgaagtagggttttatagctcttctgactacttgtgtatcatgtatctaaggcttatttacttgtttgttgtaactagtataatcgtattagacaggcagatcaatattagttcatttagtttgtgggtaagactattaatagtgtgagttttgttcaatgtgcataattacttgtgtctcaagatattgctatgaaagaagtgggcctttttctagcaactagtaatcaaatcccattatattactaggctacttgttctaggccggcaaaacgggtcagacacgataatacaactcgaaatccgcacgagagttaacgggtttgagtttgctttaaatgtgtttgggtcgtgttcgggttgacacagtttataacacgatattgacccgttaatgacttatttaaatttattttagtgtgtcataaatgggttataaacgtgttgaatacttcataaacatgttattggttgnnnnnnnnaaacaaaatatgcttataaacggattacacgggtcgtgtcgtgttcgggtttcattttttgacacgattatttaacgggtcgtgttcggatcaagcatgaacctattatacatgggtctcgacacgacacaaacgcgacccgcgaacacgagttaccactcctaacttgttcgtattgcttacatgaacttgactctggttttgatattctttactccagtagttaagcaagtttcttggtaaattaaatgaggttttgctttaaaagaaaattgagttttttcgatttatttatttattttttgaataaatttttcgaaattagtaaagtcatgattgactttatttaatttccgaataaagtctgtaataaatttgcacccagacttaaatcgaacagttattcgtaatgttcgcacttcatagtttggaataaatttgaaacaatacaaaatcttgaaaaattcaactcttcactctcccctatcatttatgaaacttaattaacaatcccataaacataattttttcggagtaaaaattgtttgttttgtcatcaccgtcctcatgagatatgagatgtttgaataaaatgattttaattttttttttttttaatattgggagcggggagattcattttcactgaggtcgaactctctgaaaattgattaccacaaaactaatttatgattttatttggttgaaaattaatctttgggagaataataaaaattcataaaaattaatgaaaacaatgagccataaagatatgaattaatcgttttaattactcaattattaatgctattatttattcttcagattaaagtataatctttaattaaagtattcttaatatttacttttcagattttatattaggattatgaatcatattaaaagtgattaatctagaacatgtattaaaacgaatataaacaaatcacgagaataaaaaaaaataacaaatcacattaccttttagaataaactcattcaacatcataatatttacgtatatgaataatcttcaattaaagcattcttaatatttatttttcagattttatattaggatcatgaatcatgttaaaattgatcaatctggaacatgtattaaaacgaatataaataaattacaagaatcaagaaaaaaaataacaaatcatattaacttttagaataaattcattcaatattcatcatatccctaaattggaaagttagttcataatttcaacattcagatctatgtttaaattaaagacaaaatttaacataaataaatttaaagaaagagaaagaaactagagaactcgatcgaatcgtcacgctcgctcgctccaagaatcttctttttttgcttctaaggttcttttctgacttcatgacataaaaattcgaggccccttcttataatgcagtttttcaacttaaaattgagaaaaatataaaaatatccttgtctcgtacggaggcaactgtatagaatcgaaaacattgattccgtacgtctagcacctccctgcgaccgtacagaaactctgtcacagcctcgcagcctccaaaggccctagccgcgactagccttcagaatttcaacacgattttttacctttttccttcttgttttgtcctttcggtagttaatgaattttgtattttaaaaccctggaaacccgaaacataggacgacaagcataaaattgtccaaaaagtaacaacaacaaagaaaattagctctaaaaagtgatccgaaaatagactaaaaatagcctaataatggtccatataaaaaaaatagttgtaatcttataaataacattgcaacacgcacggtctaaaatccatgactgacacttacttttggagattaaagttaatgtagttgaattaatttccttgggaagcctactagaagtaaggaataatttgatcgcttggcacacctctcctcctatgaatttccaatttaatttcctaaaaaaagtagctgataaaactatctggcaccagggctttgttaacaggaattataaaattggtagcttttacctcttcatccgtataatcctcttgtaatatcctgatatgaacatcgaatattagaggaccattccagacaactctcagtagaaattgtcatctattctccattgttgaacccaacaattcacaataaaatctcaaaaaggctgatgtaacttgctcgggctcatgaactagtaccccctccatgtatttaatcgaataaattcaattcaaagacctttctagctcggatacttgcatggaacattttggtatttttgtcaccatctttaagccaatgcaactttgtcttttgcttgagaaaagagacaaacttcttctgtgcatcttcatattgatctcgagttgccatctctttttaaatcaaaccagtatcaaggggattttgttatagttctacttgacaggataataattcttgcaattttaacgcatcaaccacttgtatatctctcactttatctctattatctttttgagatccagtttcaacctctttagagctccaaccacttacatctacccatattcctttagtttctcttgaaatccttgcacattttgccacattctgaaaaatcaaaacggtttcctccatgccttcgactttggaagcacttatcctaaaaaatgactagcagtttggaatttgtctagacaatattgattacccaacactctgtctattttggaatgggaaatttgattttatatacttaaaaaattaaaaaattttattattaaaccaaaa

SEQ ID NO: 36975 - DNA, 8291 bp, Cannabis sativa
aaggtttgagtttcttggtttctccacgagccaattggaggataactcgacgtggatgtttgcttcgagagaagggcttaatgctgaagatatcaggagatggatgggggacttttcgggcattagaaatgtggcgaaatatgctgctagattaggccaatcttttggctcttctagagaaacttatgtagttgaaaagcatgaagtagagttgattttgatattgaagttgaaacagatggaaacaaatactgtttctctgagattgggaaaatatcaaaagaatttgctgatcaagtggcgaaaaaatgtggtcttaacatgtttactccatcagcatttcaaattcgctatggtggatttaaaggtgttgttgctgttgatcccaaatcttcaacaaaattgtcattaagagatagtatgtctaagtacaaatcagagaacaagaagcttgatgttttggcatggagtaagtaccaaccatgttacttaaaccgccaagtgattactcttctatcaactcttggagtgaaagatcatgtttttaagaagatgcaagagaaggctatagaaagactcgactcgattttaattgaccctataagagctcagcacgaactacagctgcttttcccaacagagatcggaaatattttgaaggaaatgcttgtctgtggttataaaccaaatgaagagccttttctttctatgatgctgcaaacattccatgcctcgaaattgctcgaaattcgcacaaaaactaagatatacatcccgaatggaagaaatatgatgggatgtcttgatgagactgggacactagagtatggtcaagtgtttgtgcagtgttctaaccgcgaatccccagggacttttctcgtcgagagagaagttgttgttgccaagaatccttgtctgcatccgggtgatgttcgagtccttcgagctgtggatgtgccagaactacatcacatggtggattgtgttgtctttccacaaaaaggaatgaggtaaaatgctataaacatcagctcacttgacatgtttagatatgtttgacttaataagaattttaatttgcttagaccacacactgatgagtgttctgggagtgacttggatggagatcagtactttgtttgctgggaatctgagcttattcctcctcagcaacatgaagcaatgaattatacctctgcaccaattatacaattggatcatgatgtcacagtagaggtatgatacactattgatccaagttttaatgatacaaagataaaattacaaagttacaaactttttcgagacagattggtatctggttagaagtaataaaatagaatagaatagaatggaaaagaaataatttttattccgttcctttattgggtttcatttctaccattttagtggaagaactattccattttaaaatgtaaagaaaatcattctaatacaagatgagaaaaaatttaataattttttttatgcattttaattttcaattcttatttctatgttttcattccatccaaccaaacgttacttaagtctctcttgactgtattaacaccttaggaatataggacagttaattcaaagccactaagaattcaacaactcagcttctacaattctaactaattatactaatgagactaacattaaggtgtaacaaggtatatttactcattttatcacagaatatacataaatagtatactgaacttagtatgatctcatccatttaatgtcattaatatcttgagaatttctgttatgtctaatgacataactgatagtgcataatttataactgtgttgcaggaagttcaagagcattttgtagattacattatcaattacaacttgggaatcatttcaaatgcacatactgtttttgctgataaagaatcaagaaaggccaagagcaaaaaatgcattgagttagcaaagctattctcaaccgctgtggactttcaaaaaactggtgtgccagctaaacttccaggccatctgagggtcaaatcatatccggacttcatggaaaaaccagacaagaaaatgtacaaatccaaacgtgtaattgggaagctatttcgacaggtgaaagaggcagaagaacactctaactcgataaaagccttcaccagagaagtggcgagacagtgttatgaccccgacatggaagtagatggcttcaagcgttatatagacgatgccctgaatctcaaaactcagtatgactacaagttgggaagcctaatggagtattatggcatcaaaactgaagcagagatacttagtgggaatgtgctttcgaaatcaagacactttaacaagaaaagggacttggaatcagctaactatgctgtgaaagcacttataaaagaagcaaggagctggttcaacaagaatacagcaagtgattcggataatgttggcgatgacttgtctgcaaaagcttcagcttggtactttgtcacttaccatcctagcttatggggctcctgcaatgaggatgatatgactagagaccatttcttgagctttgcttggtgtgtttttgacaaacttgttgtgatcaaaagggataaagctagtctcagaagcactctgaattcaccatcattgctgagccagttcatcagtgaatttgatttggatgaagaaatttgagggcttcttagtgtactaagctcatatgtgtgtcttgaataagttaagaacttttataagttgtgtgtttataattgtaagaatatgtatatttggtgtgttatataattatgtatgtaattacaagtggtgctgaatatgtaagtaatacaactcaagtttgttggtttggtatgtcatattatggtcatttgtaattcttcaaccttatctaatttggtttgttgtaaaatctgtgagttcatccattttagaaaacgtaagcacagcaaatcaatttgatcaataagtaaaactcttatatatttgacacaaagttttgtacaaattagagcattgcaaactaagcatttctttaaccgatcgcaattaaaacttgataattattttaacgtcaaaagttgaatattgtttcgtaatttttttatactttggatgcattttgaaagagcattacacaattaatgaaacaaatactcgattgaaaagtttccctaccattatttgttcctctaaagtctaaattacaaaactaattatgcaacaaaattcatcccaagatgagagaacataatgctaagactcgagttaaatgaacaacatcaggcaacattgaatggaaggaagccttgtagtttataaatagtactcaaatttgtctagtttgaccttctgggatgcatttgaagaaaagacatgttaaacaagaccgaaagctttaactcatctcatgaacgaaactagattatgaaacttcccgattatgtctagctagctagctttgattataacagcaactcagcaatctgaacagcattaagtgcagctcccttgcgtatttgatcaccgcaaacaaagatgtccaacctgtaaacaagtacagaattataagtattaaggttcttacaaacattcaatgtggttatgtttgatagagtagaaaatggcagagcaatttgtgaaatgaagaaattgtgactagttgtagagagaaaataaattttggaaaaaaaaatgaactttagagaaatacttttctttctatcctccaaatttttctctcatatgttcattcctgccattttcttttcctctctaccaaacagtatagataagtcattactccttacccataattcccatcctgagacagatctcgacgaattctgccaaccgcaacatcatctttatttgatacctctagtggtgtagggaagttatttgatgctctgtcatcaataaccaccaccccaggtgcattcttcaggatgtcccttgctgtttcctaaatccatatataaatagcaaagagaaataaataagtccactctgaaatttttccaaagcataaaatattgctacaatatacaaccatgtaaattatatgtattaccatacatttgcaatttaataaattctgaagcaaaataggaaaataaaaacctaatattcaattcaaagcaccaatagctttctgcatagaatcaacaaaatttgaacctataagtcaacacatccttcgaaattaattttttatatactaccaattctaatatttagagctcaatcattcgtagccaacaatgcatatgaatcaagaagagatttcttttttgtacaatccccacccagccctacaatattaggagaccaagatactatagtaattgctatgtaaatacccgggagaatcttaaaaagacaaaacctcagacattgtggacgcaatccacatgtctaacaattcaaagagcttgatcattccttattcggagacccaatagcaagcaaaagaattcctatccttcataatttcgaattaaatctatttatgtcaaatcaagtatgctcacgcagaccctaaaaatccaggagagaactgcaactagatacaactctcccccaatccctttgaatgtttcgaaaggtacatttacattgatggtttctagcagtagcatattaaaccataatattaataataaaaatgtctacgaaatcctaaatcaagacaaaaaaatcacataatggtccatggcatctattcccgcaaagacatttatttacttgatacaaatttcatactatttcgtaaagaaactgaaattgcattttgttttgttacctatatttataaacaataaccctcaatttgttctaataatggaaaaatatgcatgaagggactctaccaaactatcagcatttgataatgacgtaaactaatagattaaggcagtagaatagcattacctcatcaagaggagtctcaaactgaaaattcacactctctgcatgagctctcatcacaggaactcgaatacatgtagcagtcaccttaatatttggatcattctaaaacaaaaatgataagaaaaaaggtaaaaaaaaaattataagaaaccaagcaaatgtacattaccacacaattgaaatgaagttaagttagttacccaaattttccttgtctccttgactaatttcatttcctcttcattgtacccatttggaagaacagacgaattgtgcgaaaacaaattaaacgcatactgcaaaacgtgaaagtacagaaacttgattcagcaaaattttccacgaatcaaaggaacaatctttctctttcttatacatttttgaaaaaggaatacagacctgtctctggaatatgtcacaagtaggttcctttccagccaagaccttattaagatcagaaaacacaaacaaaatcatttttaagaagataataaacgattacagggaatatcaataaaaataacagaatgggattcaaaatcaataatatttgggaacagaatcaaattggccccgtttagctaaattcttttagactcttttttagcttcaaggattaaaaaagtcattttggaagtgtttgaatttaaaaaaaaaaaacagttcttttctaatttaaaagtacttttaggagaatctaagatttgtagcttcacccaaaacgaattttaagaagctattttccggattaaaatcataaaaattcatgatcttttataattaaaatccaaattctttgaaaataacttttgattgaacaaaaaaaaaatctttaactataacttttacttctagttctaaacaaaagcataagcttaaccaattatgctatacctcatgagtttgttgctcaagctctctcatggcggcagctccagcaccactagcagcttgatatgtactaaccaccatacgaagtacctgaatacagataataatacaattcgatattacatcaaagaaaataaataaaataaaataaaaaatagcaaaaattgcagtgattaaccttagaatgtcgatgtagaggagtggcagccatcaagcaaataatggttgagcaattagggtttgcaatcaaagcaccctttccattcccaaccttaatccctttcatggcatccggattaacttccgggatcactagcggcacaccatcatccatccgaaaagcagagctattgtccacgacaatggagccacgttcaacagctaaaggaccgaactccttactgatcgaacctccggcactgaacaaggctatatcaacgccattgaagctatcggcagtgagctcctcaacgacgtagtttttgtcctggaatgagatgttctgtcccgcggagcgtttggaagcgagcattttgattgatcggtaggggaaatctcgatcggataatacggagaggaactcttggccgacggctccggtgacgccaacgacggcgagagatggaccggtttcttggagggccattcggacccgacatggggcgggtctgggcttaggtctgagagtggataatcggcctaataggtgggattggtgatgagggtggtggtgggtggtgaaagccgccatttttgggcggaggttttaggagagagaaagtagggaatgagggttttaggagagagaaagaaggtgaggcggctgagcaacttagccactcacttatacttttagagtgttttaaaacacaaaactggtcacaatctttttcttcaaaagacaagagtggtcacaccaatcatttttatttttctattaatttgtcatataaataattaaatttaaagtgattgactagctatactccataaaaactattatattaaattatatggatttaatacttaatttttttgaagaatggacctaatacttagttaaatcaatagcaatactgacactgcaagacaccactagtgccttgcagtatttctcataagtttaactccagtctcttggtacttgaattttaagtattataagcatctccaatggtaaaactttagagaatgcttagtgaggtagacatattatgtgacaaaatattgagatgttataccattagaaagattatgatgtcattttaaaagtttacatagatgttattttatagcatttgatgttattcattttttttaataaaaaattaaatctaaaaaattattgtagctaaaaattaagatatatattaaataataatgtgtgagatcataattatagtattttaaaaaagtgttatacgttaaagtatttttaaaagtaagagtgtcaaaaatgatgtggaagagataaaataaaatattatatttttagataatatataaatttttaacatccttaaaggataatgctactaggagatgctctaagtaaattgtggtaattcttgattggtacacatcatttcattaagattaaattgacacattaggtgacttaaaaacacagtattaacatccatccttatactattgtgaaaacataaaaatgatccaaataaacaatatttttggggaagatatgttagcctcacagcaagaataaatttttccaagaataaattactctaattgaatgtcataattatcttttctaaacaaatgctaatctatactcaaaatccattaatttcaattcaacactattatttttagattcgaagttaagaactcctcattgtgaagcaaaatggtttacttccacatttaaactaagtgacatttaaaaagagaaatgataaagagtgttcagcaccatcactgagacattttactattataatgaaaaattgttaatcattcagaaaatgctatcttgttgtagtgttgggcaccactgatacctaataacaattctttcctaaaaatagattatcacattaatataaacaaagctattattacttaggtgttgtttgtcttagaagaaaagagtcacttacattggcaagaactatatgaaaaggaaggtactcacatgacaccatataaatcataattataacttttgggggagaaatagcttaaaactatgttatctcagcaatatttttattattaacacctgaccaattgatagcagttggccaacccttttgagtatttttaagttcaatcctccaatggtaccaatttgacctcttgaaggggtcttagttttgctcgtccgccatactcttctggcaaggtttcttctccaacttcttttacgaaatctcttctttcgtcgtcactagtgacaatcacgatctgcattttaaaaaccccgccaaatactatgaaacttc

SEQ ID NO: 36976 - DNA, 4374 bp, Cannabis sativa
aaaaaaggaggacagtataaatgttaattctgccgtgtggtagtaaaattgaaaagtattaccccaaatccagtatttttgtaaaatgccctttatttaacacttaacagctaggtatctacagaagtttcagaattataacttaggtattattatcgccaaaaagtaaacttaagtatttctttataatcagaaactaaatttaaatatttataccataaattactgattattccaagtaagccattcatgttgttaccaaacgaactaatcactcaattttcatatatagcacaaaatgatatatagaccttattgaagaattttttatatctaacatatcgatctatatatatatatatatatatatatatatttatatcaaagcaaataagtcatacatgttatctatcttcaaatactattccatatataatttctagctgaacggaaacttgatgagttacactagctagcttattgtaaaacataataatttgtcaacatcttgtcaaacattatagctgaaagttttctaggtcgaatcgtattataaagcttgatctgaggaacactacaggaaaaaaaaaaattacttttaataaacaatatcttagtcacaacaaaaaaaatttgtgactaaatgtacttttaatcacaataaaaagttacttataactaaaacatagtattcaaatacaagttgtcactaatttaattttattcacaacaagtctaactaaaaatatttttaattacaacaaattgtgatttttatgactaatacatttagccatatatgaaccttttagtgacaatataggaatggtaatttataattagtcacaacactttcacttttagtgacaagttttgttgtgactataaataagatttttgtagtgcaaggcttatgatatgatagaatggaattcatcgaagaaatgttgatggctctcaacttttctaaggtttttcatgaattctcaggaaaaaagttttttcagcaatgttagtggggttggtttatcagatttagtggaattgaaattgtcattggaaccataaaatacaaattattaattcatgtgtatagaccataaaatatattgccaaaaataatttgaaagtgttagaacagggaagattaaactggagatatatatagaatggtttgaagttttataaatgtagttgagataacaatttggactttgagatgcgttgtttaagctgtaaaagtgttttggaggaatatacaaacatagtcgattagttaaaaaaaaaacatatatattaatcctaatcattgatttgaaaaattcattggtgtggggagaatggtctttccccactcattgtagggttcacattcatctaaacattaataattaattgatttgaaatttaaaagaaataaaaattataatgaaagatttgatttgggttttttgtagatataaacattaaataagtagctatttttttgaaagaaaaaagtggtagctaaagctaaacttgtggagttgtttaatttattatttttattatattaattagtatactagatctccatttgagcctatttcccatatctagatatatagagatattcagtataagaagaggtcaaaagcttggaaagaatcaatgtatttgtaattaataatccataaacatccaactccagttgagatctaaaatgggtctgacaaaagttgtgtaaagataggggaaaacgaaagaacaagcagactcaaaatttattaaaaataaaataaaataaataaaagtctaattaaagaaagtaattgaaaggtgaaaactgtgaagaggatatatatagatatatttttttttttaaataggagggcatgaggcttcaattaataacagacatcagagtgtgtggaaatgaaacctctctgtcaaaataatacaaaaacccaacatatataaatataacatcattgcatttatatattattaataattaatgtcccagaaaattaaatccttccacatgtaatcgtataaatatatatatatgtatattatcaatactcttacttcattaccaacaaattaattaattacttcattaataatgaaattttgtacacgaagtggaagattgatcaccaccatatatatatgtccttaaacaattaataataataatgaaaaaaagaaaaagatgttttcattacaataacgtgtgtaatacaatatatagtccatcaatagtaaccccatttgcaatactatatagagtaatttgtagtatgaatacctaagtttaactctcaattgtaaataaataattaagtttaatttttggcggtaatatataatattgttatatttttgaattttataggtacctaaccgttaaaatattatgttattattcatgtgtcattttcttattggtatattttaattaattttttaaaaaataaaaatttaataacttggaccaattaggaattaccacgtggcaatttacttaacaattaaccgtcaggtacctacaaaagtttcagaattataacttaggtattattaccgctaaaaattaaagttaagtatttattaattaaatttaagtatttatgccacaaattattatatacatgatatactatatatttgtaccgtttatatatatatatatatataaatatattcatgcagggtatgtaatcactaattataaaattaattattaaatcttctaaaaaagataattattaatttcttatatcagcaaacatgtcttatatataataataattcaaaaatacaaacttaattatattgcatagattacataccgtgtgtgtatatataaaaccatacaactaattactccaataatgagatagatcggaaaactaaaataatagatctgtgtatatatacataacacaaaaatacattgaattgtgtattataaaaatataaacacctagtacttgtttattaattactaagtaaataaataaacctagctagattgtatttactgttatataataataacaccaacacaattaattcacctatattatacgaattttccatttttttttttaataattgtactcttatcaaataaaattagcataacacatataaaaatagtatatatatatatatgaggagtgttattgtgaacctcctattacaatctcttagtcaacctccacgtttaaaaacacatattagaatttattttttctcacggtgttcgttatgcttaacatcatttttataaatttttgaaaaatttcgaatagtttacaataccaaaaatacgtttgaaatttttttgtacagacatgttaaactgaaatatcaagaactctattttcagcactataaactattcggaattttttaaaaatttacaaggatgatactgtaactataacgaatattactatgaaaaaaaatattctgacatgtgattttgaacgtggaaattaactaagaggttgtaataagaggtaataaatacttaacttttattaaaaacaaaataaaagtagtacttaattaatttagcagaaagtaaaattaagaagatgaaagatacttatcttgtgtatatagaaactttggatgatcagtgtaatgtattgataatcctctcttcatactattgaaatggaaaattaatgcatagtgatcaaactctcaactgtagaataattaaataaattcacaaattagctggttaattaattaatgtaaatacaaatcaaaagaagcaataaaacttaccaatttattattctaaaactcttattaaatgggaatgatcatcatcgtcaccataacgaacaagaacacaagagaaaataatggaaagaagatggaagaagaaaagtggatgatgatgatgatgatgatgatgatggaggatagaattaataaagaggaatatataaataatcaattgtgaaattaattaattataacctgacagatagaatagtgagcacgcaaaagcaataacataatctttatgtaaaagccctctgtgtgctcactctcttctgtcagttcattcttcttccaccaatcaagatcatcatctatccattattattatatatatatatatatataaataacttagactcaaataatttatgagaaaatactacatctaccacaactatatctatatataataatggatatatagtaatttttatgaaattaccaacaaaagaacctctctgagaaaataattatctgctatatgtatagtatatcatatatattatataaaaattaataataatattggacacacacattttactcatcatcaacaataacaaaataaataagataaaaaat

SEQ ID NO: 36977 - DNA, 3329 bp, Cannabis sativa
  modified_base (59)..(61): a, c, t, g, unknown or other
  modified_base (322)..(325): a, c, t, g, unknown or other
  modified_base (2663)..(2663): a, c, t, g, unknown or other
aaatgaaaaacgctggcaaaaatgacttttctcagcgcgtaaatgcgctggtaaaagtnnnattttagccactgcaaatgtacactggttaaactttgacctctttgatagtgcagtttgcaaaatgtgctagtaaaagttacttttaccagtgcaatagtgaattatacttgtaaaagtgacatttcttgtagtgttataacattatgtatatgtgtaccttaaaaaatataggtaggtataaatataactatatagagtaccacgcaagtctcttaatatatagacctaatggaatctcttaataataataataataatnnnnataataataaaaataataaaaataataataataaggtttaaatggccaattgtatgaagttgcgcaaaccatggaaattaacacttattaaatttaaatccaaatctcttatttctcttaagtcttaaatattcgttgacttagtatatataattaatttattaatattataaatttatactcctataatcataaaattaaattaaaaaatattttttttatattttatttataattttacgacttaaaatttttaattataaaaatacattttattcaacaaaaagtaaaaataaaaaaactaaaaaataatgataaattaaactcattacaactataaatcaactataaaacaacttgaaaaacaatctcatgaaaactataaatacaactgtaaataaattataaaacaaccaaaaacaatttattatttttattgaagaggtacttttataaataaaaaaatttaaagagtaaaaaataaaaataaaaaattgtattgatgtattttgtaatttttttttcaaattttcagtctattatatacacttttcattaaactagcttacctcctcatgccatatattttaggcttctttgaagtctaaatggtgtttttaatttctcttgttaaacgactagttatctcgctttttaaattctaattctagtcgaattcacggtaaggagattgtttctgatgatttacaagttatcttttgatagttgattccatttaataattgttagctatgttttcggatgggcgacgcgtgatattttcaaagtataattggtccacataaatctaggctcaagccttcccgcatacaaaaatccagtccaaatcggagatgggcccgtgtccatctaaactctagaaacctcgccaccgaagacaaagcccctctacttctgaaagcccgtccagccttctaggagacaaaacaaacgaagcctttcggacaattgctaacacgtccgaagaggaagtccaaaaggtacctccagaagcctcttgcagggtgatgtggctgccctctgatgcctaatcccaccaaataagattttgtccctatgtcagaacatgatagtgcgcacaccaccaaagggagtatatactatttgtctaacgacgcttatctgacattattgtctattgtagcggcgcctgcttgtgatacctgtgcagaccgcacgagccctatttgtactgacacattcgtccaaggagccaaaatcttgcagtgggtctcaaagccatgaattccatgtatttaccctaataatgagcctattttgcacaaaatcctaaacagattacgggtatgcccgaatttggatctaagcctataaaaattcatttaccccttcttgcaaggggagcaaaaaaagacttttaggatctctctaagctttctttttcaaagagaaacctagagggaaaaacatgatttcaacaattaggattcttcaaattgtaagacccatttgtaatatattaagccttcttaagccaatatattgactcgtagattaaagtttattaatacttgaaccacataaaaaaaaattcaatctcttttattttaacagtcatttaatttcttaattaaattcttatttaatttaatttctataaatctccataaacaataataaaataaaataagctccgtttatgtatatcgaaattgtgttagaaaaaaaacttcatccatttctttttttcattacacatttatttcaattattgtctttagggtttagattgcatatttagtcaagaatccatagaaaagaaaataatttagtcttaaaatcttcattcattggtttataatttttcatcctaatataaaatattgtcaattaaccacaaaagaatacttcacaattttttccaataaagaattttactaaaattaataaaataatataatcatttcaaaaaaaaaaataaataatataataattaattataccaaaagaaaagaagaaaatataattgcatcccaacaaccgatcacttaaaaattgaaaaaataaaatataaataaaccattttttattattaatttatattccctttttcccctttaagatgatttgattgagtcactacaaaaatccaataattctaattaaattcatgtttttttttattaaaattaattaatttatttatttgttataaagattgggggccaagctagtgccaccacattcttttttcttctttaattaaattaaaataaagcaaaccgacaaagacacataatgattttaatacaacaagacatatcttattattaattaattaaaataattttttttnaaaaaatatatatatatttatttacgcgtaaataaaaaaaataatatatggctataattttgaacacgtcatagccttacacgtggcaccaaaacgtcttacgtaacctatttggcaccacgtggcttcgttgtcaaaagtttttgtctttgttcaacttatatattattattaatttaatttttaataacattttcatgttatgtgtttatgatttattttttttaattattgtcgtatgctattattagtaatgagtcattgttaaatttaatttatttaataattaaaatattataatcatacccataatatatgtacaaggcttcttttctttattagttttttagggtacgttttcaaaaatatattttataaaattgtttttaattttttaattaaagattaaaattttaaaaattttaaaattaaaaaaaaaaaatcactttcataatttttttaacaatttttttttcttaattaatattttggattccgactccaacccaaaccttgagacctagactttgtctcgccctagtctaggactcggaccacagccccagactccttaaacctgacttaaataaattcaaaaaataaaaataaaaatgaaaaattataaaacacacttttattttttatttttaaatttaaaaaataaaa

SEQ ID NO: 36978 - DNA, 5481 bp, Cannabis sativa
  modified_base (282)..(290): a, c, t, g, unknown or other
  modified_base (551)..(552): a, c, t, g, unknown or other
  modified_base (2074)..(2079): a, c, t, g, unknown or other
aagggggtttttgtagtagtgctacaagctgagtatggtcagctgtcttgtattgaacttgaacattcatctttctcaccttcttggagaggaattgaattattaaaaatataagccaacttctcttcaaaaaagaaaaaaacagcttcatcgagggcaacaatataatcaacaacaatcaatccaacaacaacaacagtggttgaggagaggttaattgggtgtacttgttgattctaatgtgcactacaaaaaatagttacttttagtgacaactttttnnnnnnnnnataaattttttgtgactaaatgtggcttttagtcataacgaaatgctacttgtgactaaaacatagtatttagttacaagtattcactaagttaattttagtcacaacaaatattgttattaaaaacacatttagccataacaaattataatttttgtgactattatctttagccacggatcaattttagtcacaacataagaatgtttataattagtcacatttttttttttttaacttttagtcacaaattttgttgtnnctaaaagtaaaattttttgtaatggtgatcgagaagatcgtatgtatagccgaaggccctacacaacgttgtacatagttagattgcggaacattgttgtactatgcttttatgtgttgacatcatttgaattggagagttgagatagttatggaattgagatagattataattactcctcaatattatagtaatacatcaaaattaaattttacaaaacacgggaaacaactgacaactaatctatatattcatggagtaataaagataataaataatcttaaaattcttaacactaagtggtatgatttaccactctcacttctgacctcaagctagtaaaatcatacaagattttgtagtaaactatattacatatacataacgcagccaatatccaataatacttatccaaacgactgtcgtttaaggtttccacaaaccaactagtattatctccccatgcagtaatcttaagaaccgataagacactactaacttttccaaaaccgataatggccatagaaaaaatacccatgacatgatctgaaagagtatgagcttgatgattaaagactaggtcaatgcttttctctaaaatcccatcaaaacccccaagaaggaagaactgtggaaccaaccaaaacatactcatgggaattatttcaccatttttcatgtaaggaactttatctaatctgcgcttctcaatgtttgcagcagcaaaacaacatagtattgcgaaaattatcggcactgctattccaacacaaccagcatattttgaagaggccacatcattgtcatttctgccttcattattgaaattgagtagttttttcataattaccaaataaattatgggaaagattatttgggaaaattcatagcatagttgaagtacaccgagaggaactttatatcttccaaccatgttgttcatagtgtttgcttgttcaataaagtaagtttctcctattgaagatacaacacctaacatgaaaaaggtcatgcaaaatgggattttacacaaggcctttttagtttgatcaatgttttcgataatctccattctttgctcctcattgtcatatggtaatgttattattgctctatctaggaacatccaaaaattgttgtataattaaataaatctacgtgctatgtgtgtattgtataaatcattatgagtgctacgtttatcaatagaatgaaaagagggagatatatatatgctattatatctaaagaaatctacaattattgcaatttttttttagtttatagcttagatgataaccttagtttgataattagatgtgactaaaacacttaaactataaatatgagtaatgataaaaacactttggtatcgtttcataatacttttaaatttaataatttaattataaaaataaaagtaaaatttgtatttttaaaattttatttttaaaaatttaaaaaaaaaaaaaatttaaaaaattgaaaatgtgttctataactacttttgttttttaatttnnnnnntaaaaaataaaagtgtgttctatagcttttatttttatttttatttttttaattgtatttaagtcgagtcgaggtttgagtttgggactaagggtgtggtccgagtccaggactggggctgtggtccgactccagggctggagctggcctgggctagcgtccgtgtcttaaggtccaggttgaggttggaatccaaaatattaattaaaaaaaaattgtttaaaaaaattttgaaagtgtttttttttttttttaaaaaaaattttgattcccaattaaaaaattaaaaagtgaagaatatgtttttggaaaatatttttacttttctaattaaaaaaaacaaaactgattaaaaaagtgttaccaaaagtacccttaatttacacaagatgaataatattagttataaattttcttaagtagagatagaatttttttatgctgaaaaaagaaagaaagaagtggaaaactactaaattatgtctattagaccaatacatcaaatttaatgcatggttaatgataattttacacatcatggtgtgtgacaatcattcaaattaaaggtacatgcaacatatatatttcaataaaaaaatttataaaatatataaatattttttattttattatttatattactataaagatgataaaaattgaaaaagtaataaatttactatatgtaggattatatatttgatatgataaaagaaactttttctaattatttttttcatagttgtttatttatatgaacaccattataatagtgattgtttgtttaataaactccaacttcattaataagaatcgtcttccataacaataatacgtaatttaggaaactatcttgctcctgaaacacacgacatgtggaaaattaagaactccatgccaaacaatggtgagtaatcgatctatttgtttacagattgttcaacaaaacaaatcgaaacattactcagactagctaatttatgtttgcaatcctggaccaaaaagccaaatggagaaggcatatgaaattgactctccaacacttgcacacacaccaaactattcgtttcaacaacgacattcacccagatgctcatcaatccaactaagagcctcctttataccaactatctcagctatttcgggttgcacagttgataaactcgataaaccaactagcaaaactcaattcatactctagacagtgagaactaataagaacatgatgcttttgtagctgaacacacataggtagtaccccagacacaggttgtcacaccaaattagtaacctctggtggaatctttagattccataatctcttctagaaattagtggtactatcatccacccaaccatcagtagttccttccaagtacctataaatactctttactggataatgccccaacttctcaaaccttcagaatcaattatcaacactcaccgaagaggcaagctgaataagcagaatttgttattgatctcttagctcgatcaaatcagaaatgatctctgtatcccacaaccgagaatgcagcatcatcaaactactagcttgcttacaaactagagcagggtgagaaaataatacaacaggaggatctccattgattaaccaagagtcagagaggatactgacagttgcacaccaatggacccttgagcccctgctaccaacaaagatttagcttccataagagtcctccatataaatctggggttattaccaatagaagcactgagaaaagtccctcttggataatattgggctttgtaaattctatatactagagcatcttcaactgttaattagtaaccaccaacactattttccaagcaaatctatattaaaatcttgaagatgtcgagtccacatcatcttgttaaatttagcggaaattgttttcccccatggtagtctttctacttgtataaggttggcttattatgaaaatgaccaaccctatcgaatacataactaactacggagaactgcttatttgaacctaccccatcttttacctttggtaaagttcatttgtaaaatggtttttgagcagtaaagacttcacttgctcaattttttttttcatgaaatcccaattcctattgcttatgaataaaagaatcaaaactgttcaagtagaatgttgtttcaattaagttaaattagctccatccactggtaactagatacattgctatccattagtagcgggatgaaccacttctacagaggagtgtgctattgcatgaccaacacaagaagggaaaatgagcctctcatactagcataaaatcaaattatttgttggtataaaataaagccttgttgaagagtagtgtgctagtgcataatcaatacgatagtggacaagcgtgcatctccgattagaaaaaattacatccaatcaatggtagcttgatccaccattattctttggtagcaggatcaaccaacattgaagaggagtgtcttattggacaactagtgcaagaagaaaatacgaatctcttaactcagtatgaatcaaatctgtctactggtagagggataaaccactggtgagtagcagtgtgctatttcatgactaatgttagaaggttaaacaagcctctctgattgaaataaatcaaatttatcttgtggtagcgggataaagcactgctaaagagtactataattttaatagtacttgtgcagatgttcaacgttctaatatcttaatacaaattgggagttgagttgtttgttcttccgagtcaactttcaagtttgaggttgtaacatatgtagccatataggccttgctcatatgaagattgattgccaatcttagcttttctattttcattcacgagagggttctcactattactccctgtgttttgttgcttgaaggagcggagcttacttcagcactttgggcaatacaggtcacaacagtgggtgggtccaacccatctgccctccttttgacttcttccaattcaatgaagtcgactgcttttcctaaaaattcatgggtaaaatgcacacgattttctttttaagttgaataaacgtgataatttaaccttgatttgtgtgtgcagccgctttcatgaaacattgaatatattcctttaaggactcctttagtccttgattaatttccaacaggtcattaggctcgatcaggagagttttggtagcgtagaaggctcttaaaaatgcttcgcatgaggtgatggtcccaaagctattttataaaactactgttcagcagtgttaccaaaggtcactaagaagttttcacactaaacaatatcttcgactccttatagatatgtttggacttcaaaattttgaacatgagataaagggtattccttcctattttatattttccaagtagg

SEQ ID NO: 36979 - DNA, 6916 bp, Cannabis sativa
  modified_base (4613)..(4626): a, c, t, g, unknown or other
  modified_base (4675)..(4678): a, c, t, g, unknown or other
tatattgagagttttttcttttttctaaaaaaaaaaaaaaaaaactgtttttgttttgcaatattttttttttctttcaatctgaatggatatttcgtttgagattattgacgcggtgttcttcttagcattactgatttgggttttggttgacattgtgagagaatggagaaatggcagccaatcttacgtgatgggaaatagaggagttgtaagagaaggtggtggcttttttggtttggttactgttcttctcaatgccgtaatctcagtttcgtatttgggttttggtgtttatgaatattgtaataagggaattgttatttggagagtggggttctcatgtgttacttggattttagctactctagtttctttttactgtaaaaacagaactagtaatgaaggccaaccatggcctttggttctaatcttctggtggttttgttccaccattcttggctttctttctctcaccatttacattatttcccacttgaaatcgatagagcttcttcctccacatgttattccttctccaaatttagttgatatggcatctttgcctttgtcaatcttgttatgtttcaatgctgttagttttgtaaaaagtcatagctattttaaacatccattgcttgagaaagaagaagaaaccccttgtctagatggagattatgctgcttattctaatgctgggatttggagcaaagccactttccaatggctgaatccacttttcaaaacgggtagaactcataagattgagttgtctcatattccttgtatttcagaatcagaaaaggcagagcatgcttccttgttgctagaagaatcacttaggaaacaaaaatttgaagacccttctttggccaaagccatactacgtgctatttggaactcattagccataaatgctgtctttgcaggtaaagctaatcaatatattccttgctgattgagttccatttgtgtctaatctatgttctaatgatgttgctaaacttggtttttctttttttgcaggactaaatacagcagcatcctatactggtccttttctaataacaaattttgtaaactatttgttggaaaagcaagatgattccagcattcgttatggactaattctggctttcatcttcttctttgcaaagacaatggagtcattaactcaaagacaatggtattttggtgctcatagaattggtgttagagtgagagctgcacttacagttcttatatataaaaagtccatatcaatcaagttctccggtccaagcaatggtaagatggtgaatttaatcaatgttgatgtagaaagaattggagactgctgttggtacatccatggagtttggttgcttccacttcaggtgtttttggcactagtcatcctttactggaatcttggtgctgctccctctgctgcagctcttctagccacagttatggttatggtatgcaatacccctttggccaatatgcaagaaaatcttcattctaagataatggaagctaaggattcaagaattaaggtgacttcagagactttaaagagcatgagagttttgaagctccactcatgggaaccaacattcctgaagaaaatccttgagcttaggaaaaatgagagaagttggcttaagaggtacctctatacttgctcagcagtggcttttctcttctgggcttctccaactttagtttctgttgtgacttttagtgtttgcattgcattaaacataccattaactgctggtaaagttttatcagctttggctacatttaggattctacaagagcctatctacaatctacctgagttcatttccatggtggctcaaacaaaggtatctctagatagaatttatgagttcataagagaagattggaagcagcagcatgtatctaatcaaccttcaaatgcaacaaatgttgtaatagagattgagaaaggagaatacagttgggaaacaggtgaacaaatttcaaggaaacccaccattaaaataactgataaattgaagtttttgaaaggttggaaggttgctgtttgtggatcagttgggtctgggaaatcaagcctgctttgcagcatgcttggtgagattcctaagatatctgggtcaggtttcaaggttcatggttccaaggcatttgttccacaaagtgcctggattcaaacaggtaccataagggaaaatgttttgtttggcaagaaaatggataaggattattatgagcgtgttttggaagcttgtgcattggaccgtgatatcaagatgtgggcaggtggtgatttaactgtggttggagaaagagggatgaacttgagtggaggacaaaagcagagaattcaactggctagagctgtttatagtgattcagatgtttatttactggatgatccttttagtgctgttgatgcacatacaggaacccatctcttcaaggtaagacaattatctaaattgtttgtttccttatatatataaatatatatatatatatttatatttatatgtatatatatcacatattaacaaaattgtactttggttttttgcagaaatgtctcttgcaactcttgtctcagaagactgttgtttatgctacacatcagttggaatttctagaagcagctgaccttgtcttggtaaattactgatctgaaactttactgcccatgtctcctgagctgatattaagattcttcccttctctaatttgtcatgttattatgtatatcaggtgatgaaagatggtagaattgctcagtcaggaaggtatcaagatctgattgctgatcttagtggtgaactcattagtcaaatggctgctcatagaaagtcattaacacatgttaacacatgtaaacaagaagattcctctaccagaagaccaagtagaaagaatcagatagaagttgtggaagattggttcagagagcccttagcagataacagccctctggagaaaagccatgaagaagaagcagaaactggtagagtgaaatggagtgtttactcaacctttgttactgctgcttataaaggagcccttgttccagttatccttctctgccaagttctatttcagggtctccaaatggggagtaattactggcttgcttgggccactgagaaagaaggaagagtaactaacaagaagttgattgggatatttgtattactttctggtgggagctccattttcattttgggtagagcagtttttctggcaactatcgccattgaaactgctcagcgcctattccatggaatgattacatcgattttcagggctcccatttcattttttgattccacaccttcaagtagaatactcaacagggttagtgtttttttaattgtttgatactttctcatatttggagcttttatcaagtttctaactaataatcctttttctttctgaaaattgttcattgcagtcttctacagatcaaagcacagttgacacagatattccatacagattagcaggattggcctttgcactaatccagctattgagtataattgtcctcatgtctcaggttgcctggcaagtcttccttctttttgttattgtgctcggaatctccatatggtatcaggcaagaattaaagcctcttgtgcaattatgtttgtatttttaacaaaacttatattactactaccaatatcattaccatcagatgatcagaattgcttagtcctttgatgtttttgtttggataaactttttttggttacttttgtaggcagattacttaacaactactgttatagaagctgaactagtttgattacttatgtaggcatattacattaccactgctagggaactagcaagaatggttggaattcgaaagggtccagtgttgcatcacttctctgaatcaatttcgggggctgcaacaattcgttgctttaatcaggaagaccggtttgtgatgaaaatccttagccttgttgatgacttttctcgtgtagcctttcacaactctgcaacaatggaatggctttcagttcggataaattttctcttcaaccttgtattcttccttgttctgtccattctggtgaccctacctagatcagccattgacccaagtaagcaactctctttcccatctcagtatttaggccaatggtttaacaaaaaatatgagcaccactcagtgtagttaatagagcatgaaatgtcaacaaaattctagataacacctcagggaaattgctggggccatttggtatgaggtaatcttagtatgggaatgggaatcttgaaatattatcttgtttgtacaagttttgaatattcttttgaaaaaagtttaggaaaagattcacttctggtacccacacataattatataaagagttttttgcgactaaaccttcccaattatcgttttacttgcatttaactctccaattccaattttggcggttaaaccctctaaactactaaactagtaacaaatttaaggtgtcattcggttaactgtcactatgggttgttaatgtcctcttggacacataacacatttatattggtacacctaatattttattgaaaaattattttcaaaattcatttnnnnnnnnnnnnnnattataaaaaataaaaataaaatattttaaaaaaataaaaaatattatnnnntttgaaataatttttatatttttaaaataataatattatgtatatgaatttgatacatgaacaaaagtgtacacataagccatctatattggcaattaactctaaaaaatagatgacaccttaaatttgcaagcagttgagtagtttggagaattttaccatcaaatttgagcttagtgggataagtgtaagtggagtgataattgaaaaggtttagccgcaaaaaactcttatataaaaacaataagttacaacatttctgtgtgcaaccaaacatattctcctatctttgtaaatctaacatacgtttctctgtacaaccaaacacaatcatacatgattcaaacaatcatattaccctatttaaattttccaaaagaaaaaaaaaaatacttcaactcctcatatcaattggtgcttaaattcttacgattatataagcaaaaaaaaaaaaggagtccaacgatagttaaagtttgagtaatgatatgtgtatacataaatcacacaaagttgacacaaacctatatggtaactcacttttgtaggatccatcttaaataaaaataaaaataattacttgaaattagttgcaacataagtgtattagtttgtgtgtaagttgtgtgtgcacatatcattactctttaaacatatatggtttcacttctgtgtaaagataactaatggagtgtttgtttcaatctcaggtttggcaggcttagcagccacctatggtttaaacctgaatgttcttcaggcttgggtgatttggaatctatgcaatgttgagaacaaaatgatatcagttgagagaattcttcagttcactaacataccaagtgaggcacctttaataattgaagattgtagaccaaaaccagagtggccaacagaaggaagaattgaacttgagaaccttcatgtcaaatataatccttctctaccagcagttctcaaaggtataacttgtacctttcctggaaataagaaaatcggagttgtgggtcgcacagggagtggaaaatcaactttaattcaagctctatttagagtagtagagccctcaggtggaaggattcttattgatggacttgatattggtaagattggacttcaggatttaaggtcaagattaggaatcattccacaagatccaactcttttccaaggaaccatgaggactaatttggacactttgcaagagcattcagatcaagatatatgggaggttggaaccaaaataatctttgttcataaagatcttatgattgtatcatattgtatcattatttcttactaaatgtaatctttacatttcaggttctaaacaagtgtaggctagctgatatagtaagacaggatcaaaggcttcttgaagcacctggtatgatatgaagatttagttgatagatttttatttgttatccttgttgaaaaacttctttttaatcctaaaatgtataatatctttcagtggctgaagatggcgaaaattggagtgttggacaaaggcagctggtttgcctagctagggtgctcctaaagaggaggagaattcttgtgttggatgaggctacagcctctatagatacagcaacagataatgtgattcaagaaacaataagagaagaaacaaatggatgcacagtcatcactgtggctcatcgaattcccactgttattgataatgacttagttcttgttcttgatgatggtaagccaaaaagtataatcagatagcaaaagctttattttctatttttcctttaaacctttcatgttaaacattttctattcacaggcaaagtgattgagtacgactcgccaactcggttgcttgagaatagttcttcttcattctcaaagttggtagcggaattcttaagaagatcgtccacaagaagctgcgaccgagatctatcttgagatcaggcatgatcccctctctgttcttccatcctagactgaatttcgatttcttgtacatggtgatattcttccatcaatttctctctcaccttctaacatgataacaacatagattttagcaactaggaaacttagtttagaaattattggttctgagataggtaattcaaaattgtaatctttcactttcagtaggtgtttgtgattaggtttgtagcattaaagaagaacaaataaagctgaaataataatggccttaattttttatgattttgtttttgggagctaatacacaaagtctccctc

SEQ ID NO: 36980 - DNA, 3171 bp, Cannabis sativa
tttttgtttattcaaatacagctagggcatctaaatcttcattttgtttctttaaccatatgaaaataattaagcatatcagagtcgagaacacaaactattccccaaagttgaggggcaactataagaacctatttttcctttcttctaccaccaaaacctgttagctcactcgggttttcatcttatgagcctgatgtgtatgtataccgagtctgagctcctataagaagctcaacaattttccctgcacataccaagaagtatcaatttttgaacatataagcaaaattggtgctactataagagatatacaaatggagattgaaaagaagaagataaaggtcacgtacctgtaagaaacccaatagcaggtactggttccaaaaccttctcagttctttccagtctttgcctaatatattgaacaattagtgtcagggaactatatgatttcaagactttacattaaacaagaattgatgtctggaactattggtacctgatatacttggtaaaaaatggatctctcacaaggtaaaatgcccacaacaccttccgtctcttaagctgtatcatcataccatagtattgaaacaaatttagctttactcaatcaataaagaaataattaacaatggacagtgacttcctaaaatagcaagttaagactcatgtatcatgtatggttaatcaaacaggcctacaatgtctaaagagtagcatttaagatcccttacctcttgttgttctggtgctgaaagatgaatcttccattttttaccacccacctgagacgtgacttgagaaagaattcccgaaccaattaagtcaacagagaatgaaagaaaccaaggaatccatgatcgaattccatacttccgaataaataaaacatagataagtggtcttgtgataaataacacttcccctgcaataaacaacaccccgggaagacccttttcagctaatacggtggaaagggttggcctctcaaccactggacctgtggtgaaaaaaaaaattagaggaactttataacaacaaataactttacagcagcaacaatagaaatttgtctgagtttcatttaaagtagttacttgggggctcaattattgcatgttgacgttgcaccctgtgtaaccatgctgggttggagacagtcctcgcattttctccaaatctattcaatgcagatagtgctcttccttctagattccatgggttttgtccatgattattcctcaagtaaccaggtctctggttccccaccggctttgcaaaaccatcaatttcatgaggagcaggaggtgaaggttttaagtgcttatcgtcattaggtgtctctcctccaaggataagcatcttgtatccactactccgaaacaaagctaacttaactatcaccctgtgtagcattataacccgttaaaaaccgtaaaaaaaaaaagtagctaaagcgtaccaatttttgggcgtacaataaatactagattcttcttacttggtagcctccataagagcaataaaattccatttcttcttctcaccaaaataatcttcagctgcaacttcaaccaatgtttccaattctttcaaagcagatatacacaatggatatgggaatgaattaggctctgcaggcccaacatgctttgggggaggagctgtttcaattatgtgttcgttgattgccgtaattatgccaaatatagcagttactgcagtaaatcaccgaagttcaaaatgatatctaaaaaatattttagaatccacaaaaaagaattgaaagtgcctacttaagaaaacacttaatagtgggttcttcagtcagaaaaacaaagttagaaaaaataaagtctactcaaattatctattaagcataaacgaaataacacttcttttcccctttaattgaacataaaactattcttcgtttagaaattaaaaaagcattgagagtttgtttactaagaagccagttctataaagaactatcttttacttttattaggaagaaatttctcaatgcttagaaatcctagttaatcttaatttctaagcacaagaagtagccaaatgttaccaaagtttcacaaaacctgcttccggtcctatctctgaagtagaaaatctttcagggagaagccatgtcaaaccctgtaaaagataagaaaacaatattctcagtaaaagtcagcttctaaatccaatgtgtcctttaatgagttgcagagggttataaagtaagtccacaacaaatagcaaaaggaataaagatcatagaaagaatattcgatacaatatcactctacacatattcacattttcttgaaagagaacttttcagtgtccaaacaacattgtttcttactattaatcattaagttaacaacaaacaaacgaagaaagctaagatgaggttgtaacacatagcaaaataataataaaggagcagataaaattgaaataatgtaaagttgtatgcaaatcttaaatgaataaaaagaaactaataataatagctcaatccaattcaattgaataatactgcatatgggaaacccatataaaatcaaataaaacaaaatcaatggcagttaatgtatttataaaataaaaggaaccgaaaaattgacccctaaaataaaattaaaaaggaatctaaagggactcacgttggccagagactcgagtgattgcacatactccttgttctccctaacccatcttttataagcctccattacttcaacaaaaagaaaaaagtaaaccctaatttgcagaggtaataacaagtctttctcgtagtcttcaaatttggcggtttcggaagagacccagatgtagaaggatccaaaaaagatgcccaattcaggtaattgaagattagagtaggcagaggggttgatgagagaaacgcagtagagatatatacaaggaaggaaggaaggaagagcgggcttgaagaagtgttcggaaatctgaatttccagagagtcagggacagtgcaactcggtggtgatgatggtggttttaaagctttgtcatttatagcaactagcaacccaaacttcaaggcccttttaagaaaaggttttttctttgtttggtcagagtctattttatacatatctcttcagtttattattttttaaatatattta

SEQ ID NO: 36981 - DNA, 2880 bp, Cannabis sativa
ctttcattgcatatattattgatatgatttcattatattttccgcattttcatatcattgtatatgctatattatatacactatatatatatatagtctaacatctttttgatgtgatgtaatactatttaattatatttttacctaattaagtaaactaaaataaaaataaaccttatgaaatttattttaatttaatttttaatatattttatgttttaactttcttctttttgtaatgaaattagtttcaagtttaattttgttttcttctttttaaaaagttcagtttacatatatattttttatattaaaataaaaaatttcattagaaattagtttggaattagattcattatattttaagtctccttttaaaatttaattactttttcttttaattttttaatcacatacgcaattatatggatggacccgtcaatgtattatctaccatgtcatacattttcagctcaatttataaaaagtatagcaaaagtctaaatttatactaattgataaagctaagaggatatttttaacaacgctaatattataagggtacaatcgtataaaaaataaagtttagggagaaactagttttattctttaataaaaatcataatttttactaattgatgaagttaagaaggtatttttgacaacgttaatattacaaagagtacaatcatataagtgacaaagtttagggggcaaaaataaatttttattctataaattataatatttatttataaaaaaaaaagaaaaaaaaataggaaaaaataagaggggagaaatttcctctgtaaaaatttgtatgacatttaattgtgccatcaaaattaattacacatcaatctatatagttgatattttcaattaaagtttgttataattattactgatttaagatcaattacatcatattaattttattaatttattttagacaaagttgcataatattatttaaaggaaagactaaaaggaccacataaagtattttatggctataataaacctttatttttttctttaaacaatatctccataatttttgttaaataatttgcgaataagacgactaattatttaatttgtactgttttttttttttttttcaaatcatcaattcaatgagaaatttgttccggttgatctttatactattttgttaacaaatttgtatgttttttttttttgaaaactagcgtcatcagtcgattaataagataaaatagttagacctcccggtcattacaaaaaaagttccccggaaaagaggagaccggaaaagagccatacatccggtgggtgaacgcccacttagccacattatgggctacatagttacaagttctactaacattcataaaattacaacatataaaagaaggagaggacttaacacaaaaagaggcatagttttcaatagcccaatgagactccttcccattgagagcattgatcacttgtctcgagtcactctctacaataacaaatctagcacctaaatccatcgccgtagttaaagccaaacaacaggccgctgcttctctacaaaccgcatcaacgaaatccaactgagccgtgtggatacgaaccaccgtgcccagatgattccttgctacaacaactatgcacatactctccatacccactctaacatcacagttcaatttaatccaatccagaggtggcggctcccaactctcccacaagattggagtcggactaggcacaagagaagtacgtaactctgcaaaataagtggaaatactaccaatacatttcataacattaggggcggtattattgtgaacaacttcattgtgcatcctccagatgttgtcaactacaatcgatgcataaaggaatacatcctcagtacggagacccctcttgttaagattccacaaaatttcacccagtcccaaacacggattccattatcacagacatggtaaatgccccaaggtgaagagcgccacaagcgtagcgccacatcacacgacagcaacaggtgttccatagattcttccattaatccacataaaggacatcccaaatcctcgatctgaaaccttctaccaatctcagctctaacaggaagcgcctttgacagaatacaccaccaaagaatcttgtgtctctctagaattttactattccatagcttgttccaaagcgacggagccacttcagagtgactagctctttctgtagcctgagcaaggtaagccgatttgcacgagaaacgactattggtaaagtccacacccatctatcctctccccgtcccgaaggggttcctccatgaaggattgccgcaacagtttcctgatcaaacatatttcttaattggtgaacatcccatacgccagagggtgtaaggagatcagccacacagttattgtttgtcaggactccagccattggtttcataatgaaacctttataatgaggtatccaaggatccctccagatgcttgtatttctgccattcgccaccaatttacaggcgccttttctgaggattgcattggctttaaccaaaattttccaaaatcatgagtcagagtctttgtatctatagcagagaagatccttcccttttaaatatttagcctccaaaattttgcagcataaagactggcaacctgttagaatcttccaaccccacttggccagaaaggccaggttcatttctttagttttccggaaaccaaggcctcctagagacttaggaagacagagtttatcccaagctctaaggtaaagtccatgattccccttctcaaatcctcaccaaaagtccctgaccagaccatcaatccggtttacaagtcggtcagagagcttagtagtctgcatggc

SEQ ID NO: 36982 - DNA, 4799 bp, Cannabis sativa
  modified_base (2602)..(2607): a, c, t, g, unknown or other
accaaaaaagtgcggattggatcagatgaacacccctaattcatctaataaatcaagtgcacgttttggtttatgtaaatttactaaaagaaaaaccttacggcacaacctatatatctaacaatttgttttttttatatcaaataacaaataaatatttatatgtacaaacttaaaattaaagtattaatattcatatcgcaattcaataatacgatctattaattatttgaaataaaatatgaattatttgaacaatgattttatagtttataacacatcaaatcaacattattactattattattatttatcaaatctgcaattattttgaaaaataaagactgggaattacgtaattttcacaaagtacaacaaatgcaattaatgttaatcaagggtaattttgtaattttcttggattgtattaaaagtggtacaacaaaacgttgtgcttgacattctagaaagaaattaaacttgggtttgcttttggcttccatttttcattaatgcaaagggacattttggtcaactcctttaattgttagtcttaaacatcaagccacctaaaaaaatacaccaaagaaaactcaattccttatcattttttctttcttgtgcttcttaattagaagaacactctagacatttgacccttttaaaaattcaacctaagccctcatatatattaaaatcccctcaacaccatccttatagtacttattattatatatagctttcttcattttatcacaatcttcactacttaactctctctctctctctttcaaaaaatattattagataggacatatatgggaactcttgtaggacacgtggcaccagggttgggattcctcctcattggattatggcaccttttcaaccatatcaaacttcatgtacttcatccaaattcttacatagctcaaccttggttcccaaccttaaaacctaccaagtacaacgagctaatcctcatcatgattggctcgatggcctcggttgccatggagctcttcataggccccgagcgacaccaaccactcgaccatgatggcaccatccctacaaaccatctccacaatttcgagcactcttttatttctctcaccttttttgcatactctcttatttccattcttctcgatcgtgctgaaatacctaataagacagtgacacaacatggcatgacacaattaatgggagcggttgcctttgcacaacaactcctcctcttccacctccactctgctgatcatatgggaccagagggacaatatcacttgctactccagctcgtgattcttgtctctctggtcacatctctaatgggaatagggctaccgaagagtttcttagtgagttttgttaggtctcttagcattttgtttcaaggggtttggcttatggtgatggggtttatgttatggacaccatccttgatttccaaagggtgtttcatgcactatgaggaaggtcatcatgtggtgagatgctcaggagaagagtctcttcatagagcaaagtctttggtcaaccttcaatttagttggttcttcattgcaatagcaatttttggggtgtcactctacttggttttggcaaaggtttatggccaaaaagttgagtatttttcattgggattcaatgaagaggataaagatgaggatcttgaatctcaaaagaaaaatcagcttgaaattagaaaatccaaaagttttgttgaaatgggaaaagttgatcttgggcctattgacatagaaagatagaaattgaaaagtatttttttaaaataataaaaaaaatactattgttgttccttgaaggattagacatatggttaggtatgtatgtgtaaataaataaattaattagctaggttggtgggttccatcctaggggaaaaaattaattaagccagtaattataaattaattaataattattaaggcttgatctaattttaatcattggagagaaaattggtttcgtgttgtcattattaaattgttatgaattgatttggttttaattatatagttaatagggtatagtttattattttgcttgtgcacatgtacatgtaaagaagagatgagagagtgagttttgaatatattcgaaaaccaccaacttgtaaattatgtaaagaaacttcttgtaatgactataatcattatataattcacttattattatttatatatattatgttcttaatcttttcataatgatttttggcacaccataaaacaatggacattgtctacttatcagcatattaaatttcatctcaaatattaattatatgtacattgccaaaaagtcctcacatggggttttactttttacttatgacaatatttatatggaaaattattattaaacactagtggtatttaatacttttaaacatgtcatattgtgattaactaatgatattctctaaaagttatattatattaaactatatgagatctgatacttaattaaaccaataacaatattaacatatatgatgatactgattacgactgcttcttttagtattttttatttaagctaattagcaatttttccccctgaactttgacannnnnnaaatcatgccccctgaacttttttagccgttaaaaactccccctgaactattgaaattgttaaatttaaggagttttgtctaaaaaataaaattgtttaaaattatgctcatgatcctatttttactattttagaaaatataggatctattttgtcatttaacaaaataaatagtcaaattagtaacttttgtaaaatacagggtccaaaatggtatttacccttttaaatacatgtggtatttttaaaaactgaaaaatatatatttttaaaggaaataccaagtatcattgatatacctaataacaatactcatatatcatacctgtatttttcatatatattcaattatatatgggtaggccttaggaaataaaaattattggaccttttatttaaaatatatatatgtggtattttgaaaaattactgaaaaatatatttttaaagaaaaaatatttttttggtcctgatctgggtaggtgtttaaaggcacgaacctagttagctttagctaaggctctgttaatattgtttcttatttcaattaatttaaatataacgtgcaaagtaacccttggtaacttgggcaatagtgtttggaaaatattggcaatcttacatttaactctaagaactatatttatgtttagaacttatgataaatattgtaagcaatgtactaatgatcactttttatttagtctttgatagtgaccacttggtgtattttatggtttaattttttggaagtaatatttttcatagatattagttgtaacaatattaatatttgtcgctcatacattgattaagtatgtcctatttagaatagatattgatcatattcttttttatggaaaaaccctatttagtgagtgttttactttgtttggtataattaaattatgtttaattatgtcgtaaaagttaatactgattgttttttattttgttaaatgataaaatagattccgtatttttaaaaataataataataagactttgagcttaatttttgacaatttttttcttaatatcatgaagacaatttttagcacgaacagatgcagaaaaatataatcagttttgtcataacacctctagattggattgttattaagttttattttgacaaaaaatcagtacatgattttatgtatactattttagaaaatacatgatcttttttattatttaacaaaataaaaggtcttatcgataaattttgcaaaacataagatctaaaactattattattattattattattattattcagtttttaattttgaatattattagagtaatgagattctttttaccactaattctttaaagaataaataaatattagtttgatattagtgattggttactagcacattactgaaaaccaaaaaccaattctatagtggtaaccggtttctaaagcattacaataacccatctctgaaactcgtaactggttactagtatcaaaatgttagtattcctttttttacaagtttatttgtaaggtggtgacatgtttctactcatcaataagtatggtaattggttatcgagtttcttattatatatatatatatatatatatatttatattaatggccacttattagtactagtctatcaaaatattattactcttttattcacaagtgttgttttgaagggtggtaccatgttatataattattaataactaggttacttactggttacaactccatattaaatctgataatatagcacctcatatagaataatagtggtgggtgatacaatcgaatgagttttgaattttttattaatatggtggatacaatatgtggagaagagcccagatataaaaattaatacaaataaaaaagcaaacattaaatcagtctattatatctatcaaaatatatatataaaggagatgaattatgaggctgtgtcatattattctaaaatctctctaaagttatttttttaaaatcagtctcctctttaacaagattttgtttgtgtagctagtgatttggcctcatataattttgtgagagtatcccatatctcttttactgtccttttcttgggaaattatggtacttgagcacccaattacaactgaggcaaaataataatacttagtttcaattacatacttactttccatttccaaacaccagaaaacctattaa

SEQ ID NO: 36983 - DNA, 3895 bp, Cannabis sativa
aggaaaataacatacaactgtttttagttgagcacccgttgataggataaatgattacttcgactatgaggtgtttggattaagtgaaagcaaatcatgatgaggattagatcttggaatcaaatttaacactgttgctcattggtttaagtctcaaattctcatgggcacctatctatcttacatccagcctccaaagattttagggtgtagggttcagctaagagaagttgtgtcatactattgtgcttatttatggtcaattgtgtttcgtcattgtgtttctatttctagttgtgcagcagtatgtaggataaatttttcttttttgattgttttcttgaactgagaaaaattgtactgcttacttttaaaccaaatatgagaactgtctatactcatagatgccctaattaaagtaaaaaagaaatgcccacaagtatatagttgtatgagtggctgatgtcatatttatttatttttcatttactactgaaataagttttatagtatttcttattattttttaatgtgtcaattgaacagtggacaaggtaggggtggtgccatgggacgcccacgtggcggtggacctggtggcaatggtggaggccgtggtcctagaagggggggccgcggacggggaagaggccgtggtgaaaaagtatcttctgatgaccttgatgctgatcttgagaagtatcacgcagaagccatgcaagaaaactgaaagcagatcttgtgtttattcattgctattatatcttctgtggctgtttaagtattggatgattgagaactccgtctattttgtgtactttaccaaaatccaacttttagagaaaaacagaagaaattaccttaggaacacctgttagaatctttatggagtttgggcatttaatgttgattattccttttaacttgggtgtgtatgaaatatgtgggttactgcactgctgtctgtatgtactcagtaatctgcaccaacacttttttggttatatttcgtcctcttttatttcattcaacgagtcggagtatgggagcggaaacttaattctctgctctcgatgtttcaaaaagagcattgactgcaagttgtgaaaggattgagtcttaaagaatcacacactgctgctatgtcttttggttgcaactgcacttaaaaatctgagggggcgtcactgaggtagatttccttgttccctttgtttacttgcattttgttaagttttgccccatatggttaattggtccagttgattaggctgcttagcattaccatttgttatttattaattctatagtttgtggaaatagtgtatgatgtgttatagtggcacttttagaagtctttgttttgactcaacttcttgacattcatatagatattagatctctgctatgcaacttgtaaacatgtcaatagtaaatttgcgatcggatgatagctatccgaatgctcattactattactcttggaaggaaattgatcaattcctgtcttgacaatgtttgcaaatgtatcagaattttttgcagcttgacactatctcaaagaatagctaacctgctgcttaattccgaatcctgttcatcattttggtttttttgcatattgatatggcttggaactttatgatgtctctacccttgatcgttgaaggatagtaacagcaatatatgctctgcagtctgctgaagatatgtgcatgtccttttggtttacttctttttcataaaaccacaatgttggggtttgaaatggtgatgactgtgatgttaagccactccccactgttactgcatgcagatactatccaaaaattgttctctggaagatgatttgtagctagtctcaaacctattaagcaggaaagggggaaacaggtgttcagaaactgatttgatcctcctgaaaaataattaaagtttaaaactatagcccggataaagtaatcgttatgcatttacttttaacttagtctaactaggctaatattttgtgattgaaagatatctgatggaggatcaacatactttaaaatttatcatccagtctttacgtcaactgttggggccgtatttctatccttgttcagccaaataatttcagagctgttgttttattacggcgttctcttctttttgataaaaagtttggtcgttttgtctagattcccattcgttaaactaccaacaagaaatcggtgcattcttgatgaaaaaggtgactttggttatggttattatgcatttcttgtattttcatttctgttggtgcgcgtgagcctctttaactcttgctgatttatataggataggggaatcgagtagtagcaaagaatctctacccgtttgttgttgtacccatttaattttttaattctgctctacagaataataatatatattttttgaaattaagtactgcattaataacaattcagattaaatatattaataaaaaaatggtggataaagataatcatcatctatttaagccagttctccaactacccaaaagcgggtaacgcccacatgctcccacggtccgcttcaagaaagggggacctggggccaaagcaagttaggttgggttatagacaaacatgaactaagaatagttatggaaaattggagaactagatggcgctagttttatgattggtgcggattaccttctcatgtgtaattgtggtatataagattatttatagcattgcagttgtttcaagaagtatttacgatgtgagatttttacaaattaaaagttagaaacaacaaaagatcttttattttcaaaaacattttttattttgtcaaactttttcttctttttatatattttctcatactcgggtctaaattgagctcaagtctcggtcactctgggttgggttagattaatgttatggtataaataaaaaatattgatttttttttagtgaaaagttctaaaaataattaaattataaaaataataataagagaaaactacatttttttctcttttataaagtggcctttttcgttggcaaattgcttaacgattgtattttcatacatattttaagccgaaagatattacaaacaaatagttaaatataatgttgctgacatatctatcaaaaaaaaaaaaaaatgttgttgacatgaaatgaaagttggaatgtataaaatataaatgttgaatacatcttttggagctgaaattgaaacagagcaaaagtgatatatgtaaagcggcaagtgtgtgatcctttacaggatggtgtatgtaattgaaaattgaagcagcctaggaccttttatgacttatcagcttctcccaactgcaaatgatcaagccgaacagagaatacaatattgctttgatgcaagacgttacgaagttccaacaagaggaaggccagtaccatgggtatagtagtctgaaaaacaagctaatgagatggcgagggtaacgaccaacctgtaaagaagatataagtcagaacttccacccatctcaagttcaacctagtcgatattgcgagtggagaaagaaacaagtactcactggaaaaagaaaatctaatacatcccaagcagcatgacgaacagctctagtgggatacataggacctccgggtgaagtgaagctatacaaacaacttttcaatcttgtactcgtagtcattctcagttccatacctgttaaactcaactcagtcaattgatattgagtgtgtataaaattcagttaagaattggcagaaatgtttttaccttggagaaatttcatttgtgagaagtaatgtagtagaactggttcaacctttagcttttgaagctggtcagcagcataaagtagaacgttattaagaacagtaatttgtgaaaacctttc

SEQ ID NO: 36984 - DNA, 3944 bp, Cannabis sativa
ttgcaaactattgtgtcaattgatctgtctaacttctacttattgatctgtcttaataaatttacagttttttttttctcaaatagctcattcttttcacttaggcccaaattaaataataataatgataaattaataatatattcctcttgaagcacagccatagcataaagtgaaacacgtggccgatcctatgctgaccgttgttttttggaataatactgttaaccgtttttatcaaagtacaaaactgtccttttaattaagattgaaattaattatgcttttttattttctaattcactttaattataaaacataagtttaacaaatttacgtaaaaagaaagaagaagggtataattgtaatttgaattcttctcttcttcttcgtctgcctgcctcacatttcttccatagtttgagctccgatatacacagcaatatgcaccttcttccttcttcaaaccctaattttactctcttcttcacttcacagaaccctacgaacctctccaaatgtacactccatattccgcgttgttcttccagagattcctcttccgctccagtcatcgaccacgcctccgcgcttccttactctgattccacttcttatgccgccgcagccgttgtttcgaccaaggaagtagcttcgaagaggcccaccgactcctcgccggaagactttctcgtggttcgccgaccggcaatggagagctcagttggagactatgatgaagatgggttgaaatctacggcagctatcgacgagggacttgcgaagtttgcaaagaagataccgatttttgagccccgggagagggttgagtcgggctccttgcaggggaagcctctgccggtgaatttggacttggctttgtataaggccaaggttctaaacaggagttaccgatttgccgaagctgaggaaattcttcaaaaggtttaatcttctgccagcccatgttctgtactttaatggtgcttgtttatttgttagttgtttttggaatttgatgatggagaagagagtgattgtgttttgtgtggtttttgcttggaagaacagtgtataagctactggccagaagatgggcgagcttatgtggttttggggaaaactttaagcaagcaatcaaggactgcggaagctcgagctgtttatgagaaaggttgccaagctactcagggagagaacccctttatctggcaggttcgtttaaacatatcacgattttgtttactgaaaaacaaaaagcttactaaactgagcaagtgatatgtgtacattgtactctctttgttcaattgataattaagaaaatcaaatgtagtttaattgagttgtcatagtctttttttcattggtgggttcagtcaaaacagaaccagtcctctttcagtagtcttgaatttcactgttgagaaattcagttgtgggtgttattatttcatttatttgttaggttctattttgactatgttattgtcatcttcaacagtgttgggctgttttagagaaaagtatgggaaatataaggagggcaagagaattatttgatgctgccactgttgctgacaaaaggcatactgctgcctggcatggttgggcagttcttgagctgaaacaggggaatatcaggaaggcaaggagtcttctggctaaagctcttaaattttgtggaggaaatgagtacatataccaaacgcttgcattgctggaagcgaaagcaaatcgctttgagcaggctcgatatctgttcaagcaggccaccaagtgtaatcccaaaagctgtgctagttggctggtaagtattgttttctgcatgcattattctcttggttacagtaactttcttaatgatttattaatattgtttacttttcgggtgcttttgaaacaggcatgggcacaaatggagagtcaacaggaaaataatggagttgctagacgactctttgaggtgaatatttctcatctccaaattatagcattaccattacttccatttccatttcactatagtagaattgaagctactaaacaacttaagaatcacgtcgttacatagaaactagaggttttattaagatgtcccagttactaaaatgtagtatctgtgtctatcacttacctatatattgctgttgaaaattatcttgccgtgcaattagttaaatactttgcttcttttataatgtagaaagctatccaggcaagccccaagaatagatttgcatggcatgtttggggagtttttgaagccaatgttggaaatattgataagggaagaaagcttttaaagataggtcatgcacttaatccaagggatcctgttctacttcaatctcttgctttattggaatataaacactcaactgcaaatctttctcgagtgttgttcaaaagagcatctgaattagacccaactcaccaaccagtatggatggtaagaatctcaaattgcaaacacttaccgatcaaatttattatagctagctatgttgtgcactgaatagtgagaattatgaaataatggtgctctgtatgttatgcatatcacatatgaattaggaataatctgtataaatgagaaaatgtgatttttttaaggcatggggatggatggagtggaaagaaggaaacataaccacagctagggaattataccaaaaggcattgtctattgactcgactagtgatactgctgcgcgatgcctacaggtaactgccatataatttggtgaaattattcatccggatgtggttgaaaaataggaatagacccatttgaagtaatgttcatacatgttgctgtaggcttggggagtcctagaacaaagaattggcaacctatctgcagctcgtagattatttagatcctctctaaatataaattctcagagtttcgtcacatggatgacatgggcagcatttgaggaggatcaaggaaattccattcgtgctgaggaaatccgcaatctctatttccagcaggttatttactaccacaacaaatttctcttgtttatgtcaaagaattgttgtgtataattataagtaaaatagacttacacatacttatttcggttgctgcagcgtactgaagttgtcgatgatgcttcatgggttatgggattcctagatatcatagacccagcaattgatagtgtaaagagactcttaaagttagaccaaaacccatccactgcacctcaagattccttgagaagaatggctgtcattgacgataactacaccgatgaaaactcaattggtgtttactctaatgacaactacaaggaaagtgacagtggcttcgatgtagatgcttttatcactgaaagattgtatttagaccctaataagctggattatttgttggaaaagacaagaacaaacttcgcaaaaagatcaagagggaaattttccagagtgtcttcctaactccgctcacggagcctcatcaagacaacagattatgaagctataagacggctcaacagtgatatattattaatttgatctattacccagtcgttcctcttcactcgcaaaagcacatattttatcttacaatataaaatccttgaaagtctaaatgtaatattgttggttaatctgtaaagcatgaaatcaactttgaacacgactagttatcagttaactgtcataatgtaagggccttgactagataaagttacaattttttaagtctgtaattaattaagaaatccttcattgtttcctcaagagcgtatttttgtggcaacttaatgaacatattaagaaagaaattgacactttacaagaagtttatttatactttatatttattttttgaaaaatttatagggatatatctgtacaactgtattctgtaatctgtatactatccacgccagactaccatgcaaatcgacgaggaaataatagaaaaa

SEQ ID NO: 36985 - DNA, 6326 bp, Cannabis sativa
cttacccaaaaaaaaataagtttttttatattaatatactataatgcattattcaaaaaaaaaaaaaaaggtactataatgcatgtcaatataatactatgataataattgtaccatttctaatgaaaagtaaaagttttgtgatgaaaaaacaatatttttcttaatttttacaaaatacaaattaactcaaaaagtccacaaagtcacttattcatttttattgaataagtaaaaaattaataaaaatctgttcatagaaaacgttaatatattatagtgacaaaatcgataaataaaaaaaaaatatttaggatttttgttacttgaactataatttatgtatattattgtgtcttttaattttttccagcccaataaaaatgaacttcaaactattcatacttttgtaaattgtttcttctgtcatcacacgtggcaaacaaaatgatgatatgtttcgataattgttacaacagtgtcacgtcaatgtcacatgtttaattaatttgaaaaaaataatttaattttacgtaatttttttaattattaaattaatttttagttaaatgatattttaaaaatatatatattgttctttcaattttaaattatatacgtgagtatagtaatttgttaaaaattttagagacacaataataggggtggcaaaattctaaataatcaataaaaaaaaaaaagtaaggtttatattacgtggcaaactgagacacattaatttccaataattagagataaaaaaatgctaactctccattttgagatgctaaatataactgaattttttttcttgccaattgaacaacttatttttcctgctaaatttaatacactgtaaattatattgatgatcaatttcttcttcttcttattttctctaattttcggaattggtgtttttatttttattacgcaagtcacctaaaagaattctggctggagtcaagaaagctatactttgccgacctgaggtacatacaaatttatctttaaatcttaattaattagtgcgagaagattattactatataactatacatgtgcatattaagctttatttatattaattaatgtcaatatcataaactcactaacataactacactattatattatgtataaatatgtgcatgtgaagattgttggaacaaaactctatgcaacagttgatttagataaggccagggtggcgcgtaccagcatggtacaaaaaaataccaaccatccgatttggaacgagtcattttacatttactgtgcccattggacttcagagttgatattcacagtaaaaaatggtgagcttgttggtgcaacattgattggaagagcatatttaccttctgaaagtatgttcactaggcatatggtgaatgaagagcttccaatcttagatgaagaacgaaaaccaacaggttcgaatattcgtgtcacattgcaatttattcgagccaatgatgaaccaaattggtcattaggaattagaaacccccaatttcagggagttcctagaacattctttaatcaaagacaaggttgcaaagtaactctttaccaagatgcccatgttccgagttatttcgattcagatgtggctgcatctttgggaaagttatatcagcctcaaagatgttgggaagacatatttgatgcaatcactaatgccaaacacttgatttacataactggatggtctgtctatactcaaataaccttgataagggacccaagtaggccaagaccaggaggaggagatagtattacacttggggagcttcttaagaggaaagctgatcaaggtgtctctgttcttgtgcttatctgggacgacaggacatctcttatggaatttaaaaaggatggtttaatggcaacacatgatgaagaaactgaggaatactttcgcaacacaaatgtacattgtttcttgtgccctcgaaatcctgataatgaaagaagcatagttcagggatttgagacctctaccatgtttactcaccatcaaaaaactgttgtcgttgacagtgagttacttgatcaaatagggtctcaatctcaacaaaagagaaggattgtgagttttgttggtggtattgatctttgcgatggaagatacgatacattagaccaccctctgttcagttctttagccacaacccaccataatgactttcaccaaccaaactttcccggcgcttccatcaataaaggcggtccgagggagccttggcacgacatccattgcaaactagaagggcctattgcttgggacgtgttgtacaattttgagcagaggtggagaaaacaagttggtaataagttcataattcctatgaataggttggacactattcttgttcccccaacatatggtattacttcatcaaatgatcatgacgctgaaacatggagtgttcaactattccgatccattgatggtggggctgtctctggttttcctgagaattctagtgaagcatcaaaaatggggctcgtatctggaaaaaacaatgttattgaacgcagcattcaggatgcttacatcaatgctattagacgagctaaaaatttcatttacattgaaaatcagtatttcctaggaagttcgtttggatggaaagctaattcagatattagagttgaggatattaatgctttgcatcttatacctaaggagctgtcgttgaaaattattagtaaaattgaagcaggggagagatttgttgtatacgttgttattccaatgtggccagaaggaattcctgaaagcggttctgttcaggctatattagattggcaaagacgtacaatagaaatgatgtattctgatatcatccaagctcttcaaaggaaaggtatacaagcagatcccacagagtatttgacctttttttgtcttgggaatcgagagcaaactggtttggcagagtatatacccccagagagaccagaacctgacactaattacagtagagcccagcactccaggcgtttcatgatttacgttcattcaaagatgatgattggtaagtaaagtaactccctcttcaacaatagtcttttctttatgaataatattgtggcatatatttttagcctttggtccacccccctttttttttacacgtacgtttctctctccaagtatatagtagcaccattcttgtttttgtgtttttttttttttttttttattttctccttaatttgtgttgtctccaaaaaaacatgcaatccgggtgcaccatgcacagttcttttgtgtttttgataggaggataggtgtaattttaatttttatatataatattgtgtattatatatagttatataattaagaaatttttataatataaaatgtagggttcaaatattagtacaaatcattatttaaactttaaagtatgttatatttttctaaatttttaaaagttttaaaaatattttaaataaccccattatatattctcatataaaaaaaatataaaaaaattatgcggaagtagaaaatagaaaggagtgcgcttgagtagtgagtaaacttctataatatataatattttatttattttaaaaaaattaaattaatttactatgtctaaaataggattcaaatactttttttttcatttattatacgtatgcaaataattgactattttgacggagtctcttttttttttatagaaaattattagaatttttagaataaaatataaatacatataaatatcctacaaaaagtaacagcctactataaccttccaatctatatttactaaatttgtaatatgtgatggtagctataaaatacaaagtaacttattcgaaatttttatgacagttgatgacgaatatataatcattggatcagccaacatcaatcaaagatccatggacggcggtagggactcagagatagctatgggggcattccagcctcaccatctactcggccacgaaccacccagaggccaaatatttggttttcgaatggcactgtggatggaacaccttggtttcttggagaaagcttttgaaaatcctgaaacccaagattgtgtccaaaaggttaatgcttatgctcaaaagtattgggaagcttattcaactagtacattcacctatgaggtattgccaggtcatcttcttcgataccccattgaaataagcagtgatggaactattggtgagttaccagggtttaagttcttccctgatactaaggccccagtgttgggccacaaatctgattaccttcctccaattctaaccacctaattaagtaggccacatctctactcaaattgttgaaataatgcaatcatgcaattacaattaatttacataaattatcttacatgtacagtatatataatcatatttgaaaaaaaaaataataataatttgatgtctacgcaaattagttaaacagccaatcaattaaaataagccacatgatgaaattggtcatatcaaatatttacatagtggtaagcttttcttttagagccccaatgatctattggaaagggaattaattattcaaaatgataaaaagagtgttcaaataatttctctaaagtaaacaaaaagattttgggggtagtaatttattgttgtagtttatcaaagagttctgtacttaattttgtttgttttctattgaatgatatcatttaaaaaaaaaacatcaatttgctggttaagattagaaataaattaagcagcattttatttatgcagtgttagtatcagtgtcatacatacaatctcaaaataaaacaccaataaataatgagctaaatatgttaaaatattatttatacaaaaaaaaataattaaaaataaatagaagaacaattttattgatgaggtaaaacctcaaaaactgaaagttcatacagcatacatcttttagtttcttaaaggctcataacatatagatatccccaacctgaaaaataaaatatttggaatcaacatatgtcatgtgaatgagctcctaaagatagtaatatgaaccaattataataaaataactaaaatactatagtattaaaaatagatagagtgagcaacttaaacccataatattttcagaaaaaaaaaaaaaaaacttaaacccataatataatatgaaaaaaaaaaagccatatacggataggattgagagaaacaagagagactaactgatttaaaaatattgtgtgacatttttcaacaacaatcaataaatagaatattattattgttacatataaatcatattgccccaacattaaattttcaagtatactcacccaactagatatttggtggtgttattagcctttatcttataatatactatccttctttgcattcagtatttagtatttaagaataccattattcgtataagaaaggcctcataatatgctactactacagcacattttgtctttgaggttacttacaactgcaatgtgtgactatctggataaattcctccacaattcaaggaagaattatataaatatatattaatttttatacttttcttttgtaacacatgttcttaatatctaagaaagcaaaatatgaggcctccaaatgtgagaaaatgtctatatatttttttatttggaaattgattgggagtgttgtcggttttcgtattttagaaaaataccacttttgccttttacccctttgtgaatgagatctttccacttcatccattttttaaccccaaaattttgtatcaatttatgtgtctgtttgcatgtggaataagggtcagccaagtcatgtggtccaatactctttatatgactatacatatttattttatcaaatataaattcaattcatatatctaatcatataatttaataatgtggtcctcctaactatacacaagagaataatgcttctggttaaatagtcatatcactaccttttgtccaattcacaaacctcaatcaaatggactataaatctattacaatgtaatcacattatcttatttaatatcattcataaatataaatataatatatgtgttttgtttcatacattcttacatttttaccatttgcttttcttttcttctcttattttttttttttacactatcttttttatttatttatttttatttggaatctatccgataaagaaaacaagtttaattaaaaaaataacacggtttttactgttactacaaatcaaaaacattggcttacaagttactataccagaatatatggaagagcagataatatcctctctcatacccctttaagataatccttttgatt

SEQ ID NO: 36986 - DNA, 2848 bp, Cannabis sativa
aaaaaaaaaaaaaactatctacaatgtagttattaaattcttttataaatttagaccaaaaagcaacaaaaaaaaatgtttaaaacttgttttatcagtgaaattgaatgtttacacgaagaatttttttttttttttgaaacacacgaagaatgttaattatttaaaatttatcaaaaaatgataatacgtcttataaaattatacttccatataaaaaaaaattagaaaaaatcttcataccattgagtaagcttcaagattctttgcgcaaagtgtatcattactgtgttgtcctatgtagtgtcctttgcaggtcttcttcaatgactgagaatcaatcaatcaaccaaacttggatttaagaatgtaggttaggtcttatataaacttcttgtgtcacaaaaataaattataatagaaatttaattagttacaagttagtctttagagtcacaataaaattgtaattttttttgtaactaattaataatttaaactataattttttttgagataaaatagttatgattttggccacaaatttttaactaagttaaaaattagtttattgaataaatttacttgagcaagaaagaaataatggaggtgagagagagagatgaagatgaaggatgagaaataatgctccgctgaatacagttggcttgatcttgacatttatatatggagaactaatatagagagaagttgaagaaaaactttaactaactcctaacaacttctaactaactcaagatgtagacagctgagaaaataacaaaccagcaatagtaacaacttgttgcttaatcattttctattctaacagtcatgattcattacaataaaagaaaaatctttagtataacctggtagagctcatcggatataagacccaattggtgagcaaatttaactttgtaattgtcttcaatttttgaatccgtgattggattcccaagcaaataaccctgaagattgagaaattgttcatagatattagctatgattttaatcccaagaaaagaactagtgtttttttcttcctaaaaaagtaccttgaagttaatttttggtatgttgttggcttcaacacctgcaaaatttacctaacttggtaatttgtttcacaactttattaggcttttgtttttacaattttatatgtcatttactctgagcaatttgttcagcaatgattgggatgatcttgccagaaaatgagtccccgcctaaataaaatgagtttgtgttgaacttagggtgagcaagaaaccactgcataccaaaagataaccatataaatataatgtaacaaagttcagatttacagataacattattgtgatgtttggttcattgtaatggtaatagtaatagtaataaataggtccattacattgtatttctttttttaaacttttgtaatctattacaatgtaatgcttattacataacgatgattacatatcaaaaccaatgtgattctcattacaattagactccaatacaaagaaaaaaaataatattatatagtaaaaaagagtcaaagtctatattgccttttttttttttaatattttataattttataataaaagcaataaggtcattttagtcaacacacattttattctattacattcttataccaaattaaacataataattttgattacaatattaattttaactacaaaccaaacattataatcaatttctattaccattcttattccattacattactattactattacattccatcaaaccaaacaccacattgtattttaaatacttgaattaatgcaccaaactcttatttatcaacctttctcataaaattatggcatctattagcatagacaaagtcaccagtttgagacccttcaaggctctttgaataggagaatccagtaccaactggtgcatctagaaatattatactggccacctatgaagtctcatcacaattgttacacaaggatcagatcaattatatttatatttatatacatacacttatataataaatatgcctacctttgtccatgagtacggattcagttccaatgctggtaaacttccattgtactcaacattcttaaactttaaagggcctacacaagaaaaaacaaaatccgaagcattattctaaccaaaaaattatgtaagtgtaatagttaaatttgaaagaacctatctcaaaggcaagtccagagagaacagagcaaccagggcctccactcaaccagagcataagaggattatctcttggatttctctcagattcaataaagtaataaaaataattaacatcttctttttcatctactctaatatatctgcaaacgaagaagataagaaactaaggtgagctgtttacgtaccaaggacccaacttaacttagtgtgcgaatcataaatgtcaagtcaaaacttacccagtttgaagtttgaagggaagagaaccagaaaatcctgggagggttttgacaatgttggtggaaggaatcactggatttgagtaaaacaacaacaaaataacctgaagataatgcaccttcaacattttttcacagtaccatgacaataattagtctctaactgtattcaaagtcgacccttttattttagagacgcattgggataagcaaaatattattttacaatttgaggacataaattaaaccacgtggtctcttacaaaatattattttagagaagtattggataaccaatgtataataatcggttattgttgaagggaaatttgattttctatacttagaaaatcaaaaaatttgatttctaaaccaataatttaaaccctaaaaaaactat

SEQ ID NO: 36987 - DNA, 4136 bp, Cannabis sativa
gtctataaaatcaatgacattgatatactttaaatgtttattatcgatggtatctttcactatcctccaatcctgttctcttaatataaacaatttattgcaaaacaggaatagtcccttgttacctaaaagttccagtcaaattaactaaaaaaaaaaaaaagaaaaatcagaaggcagcgttgtaattgtatcacaatttgtacaagcgaagggcggcattggaatactaataataaactagaaataaaaacgtaaaaagaaaagaatacatagattccacagcatttacattggaaggattatcataagaactctttcaacagtaaagtactataacatcaacacgaatgaaaaccaaccatccacgagtctgatctaggccttcagctacaaaatgccctggaaagtttttctcaaagagttcaacattctcaaatggatagtggatataagcataaggcatggacccactctcaaaccagcaatcaaacacctgggaagaaaaaaaaaaaagcagacaaacatttaaaaattacatgatgtgtggattgctttactaagacaaatgtgagagatttgcaaaccagattcaacaatctcataactacaaccccaaaagaatgattctacaatcttacatcatctatacgtcgaagaacaccaaattcaggaccacgtttggatgggattgtaatatgatcaatcttgtgtcggtgcaggtcagtaacctgaaaatatcaaaaaggcataataagaacatactatagcaaagattcaatttgaaaatttgccaacagaattagaaagacaacaaatttccagaaaaatatcgaataatagtaacatgtagagaaaacccttttttctccaccctagaagacagtaagatgaatgacaaaaatgtagcacaggaaacaaatgcatatggacatgagcataaatacatacatatattatacacttgcaaacatttgtataaataatggacatgagcatatgcttgtctaatttttacatttaataaagttgaaatcaaaaaataagtaaaaatatatcttcgtggtcataggcatagcctaacagttccatacttctcctcacaaagaggaggtcccaagttcaaatcctccctcccccaatatcaaaaacataaaagtaaatatatatgttcatataattgtgcaagagaaagagaggctcaaaccttaacaccagaaagctcttcaagtgtcttgattgagtccatcacaatgatttctacaccatcatcactgatccacactgggagaggagtgccccaaaatctacttcgactgacagcccagtctctagcattttctagccaattgtgaaagcgtttttcctgcatgaaaaagtaacccccacaaatattagccttcaagatatttgcctacttcagaattcttgaaattgaaaaaacttattagctcagcactgttaaaacttcttaaacaaaagttgaaatgaaaaataagaaaatgaagaacagtataaatagtgtattgaaactaattggaaagacttatgacatgcactagaacagtgtaaatgaagaacctgaaaaacttgagccttaacaatgcatacaagtatatccaatttactctacccactcttgagactataatttgtaatagcatttatcattctagtaccaccaaacagatatgcttaatagaattagctcatcattctaacaccaacaaacacctttgtaatttcaagccgaaattctagccaaacttaatgatgaaggaattagaagttcaacacaacaaaatttccaaatgcaggtttcttccatgagaaggagaagctaaaaaattattcatatttgggagcatttatcaaagcctaagcatacttcacaggtaatcccattaaagtggtgacaaaataaacaagattaacagggtaaaaatatcaataaacaccttgataaagtgttctacctttacaaaatcaggaacccagtaagtctccttgttgttttctaacaatttctctttcaacaattccacacgaataaacctagaaagatgcattagaactcaattaggcagcagataatctttaagaagggaccagtgaaaacaaaatacaacgtttacattgtgaatcaaatcaagtagataaagctttaaaacgcaataactaaaatatacttatatatagaacaccattcatatacatgaaactagcttgaagccataccataatgtattcatcaaaatcatgaatatccatgtcattagtaatcaaactttgacaaactaattgaaagcccagtcatgttcctaaatattatctcaactttagtttgtttcttctacatgttatgtcggccactataagctaaattatgcgcaaaaatttcacaaaaaaaaaaaaaaaaacaaaaaaaaaaactgaaaaatttacttaccagcttggaacagctctatagattagaggagttttagatctccaacaaaatggatatgaatgtgtgaatgttccagacttgatgagccttccttttgcctgaaagataaaacaactaaccatttagtttattattattgataataatcattaaaaaggaaatttgtgacaaaattcattaagtaatctgaaaggtcgcatttaagtcactgcgcagttcttttggtggcgaatcaagtagtctaaaatgttgcgcttatgtcatttagtagttttctttgtggtaaaagtctcatattataccaatgtggtgcaacaaaagtgtgcaagtagtctgttagattatatggagggtgatcgatactgactacttactgactttcgtcacaccaaattggtgtaaaatgtaatttttaatgccaaaaatttacttggtgacgtaagtgcattctttcagactacactacttactgactttcgcaacaaattaaaactaatgcacataaacacctaacaaattgatgtgagataatattagcttttaagacattccacgtagaacataactgtggacatcctagggatactaccaaaccttagcaacaactactatgcaaactctccaattatgttttccatataataataccttgactgcttcaattatatccttatctgcatccttgacatagcacccactgaaatctgtaattcttgaagtaaagcagccgtcatcatcaactgctacaatcaaggtctctccctgcaagcccacaagacatagacaaacatcataaacaatggctagttgcaaatgaaaatgaataattacaaatacattaatcaaatatagaaacaattgatggcatagaactccctaaatgaccataaaattaattacacaagaatcttcaatttccgtactaaatgttggaataaagaatcaaaaggaatgttctcaaaagcacaaatacaagaagctaattggaaaaagctagcaatcactcttaaatggggcttgagaattaaaagactagaagaggcacttatgctaaaactgaagtagaaaattttgaaattctgacaaaattaaattagaagaaacaaaaagggcacacaaaagtgaatgtctatgataaaatgcaagcaaagcgtccttatcttgctatttcacctggctggtgtgtttgttgtgaagtgctagtggggagaatgttgaacatctgtttagggattgtagactcttatagattgtggttgaatatttttgaggaatttgatgtatcgtgggtcctaccttgtgcctttcctcatatgatagtgagtaagccagtcagtagcaaacataaagtaagattacggaggacagcggtgatgactactgtttggtcagcttggatggaaacaaataatagattttttgaaggaaaggagagcctagtaagatgacatatgggagaaaataaaatttttggacagtgcatgggtttttaagactaaacattttgaggaactttctttcttagatttatgcagagattggaaaactttactataggtccgatttttgtgtgctcagttttggttgttgtaggtttcagtgtgattatcactaaaacttttgtaaccatggttttctctgtcacaagtgagggaattcagtgcataacaggagaggccagtctatg

SEQ ID NO: 36988 - DNA, 5297 bp, Cannabis sativa
  modified_base (5252)..(5258): a, c, t, g, unknown or other
gaaagaaagaaagaaagaggctgtggacaagaccgagtcacctccgactcaatcgccaattccttttaatggcttagctaagttatagccaacactcaaaaactcatatcaataatttacaaacatacaatacaacacgcacattcaaacaaaaaacacaaaataaaaacttggtaataacatgattctgatcaaacttgagtgatattagcaaggaatgccaaacaaacaaaagaaaaaggattagctttatttttatattattatcattataataaaacaaaatcagtcaaaataggtaataagaggaaagaaaatgaagcagtactcaagttggaggaggaggaagatggagaagagagaagaaggtcttctgcttcatcatcatcatcgtcttcatcggtgttgttgtcatcaacaacgttgataacatcatcatcatcatcaccatcatcaccgccgccgtcgtattcgaagaaaggcgtaaatgggtttgatggggtgtcgattttagagtcggcagagcttcaatatgccccaacaggggtggtggggtcgacggatgatgaggatggagatggagataataaagactaccctgccattaccaacttccatgatgctaagactattttcattgttgaatcctccaagctttggaccattgcatgccctatagccttcaatatatggtgcaattatggcattaattcctttaccaatatttttgttggacatcttggcgatgtggagctctctgctgttgccatttctctctctgttattgccaatttctcttttggcttcttggtaagaaaaaaagaataccttttttttttttcttcatgtttatggtcttgtgagttttgccatattatttaatgcatgatctcaaagaaaaagaccattaaatgtaattacatgaataattatttggttaattgtagcttggcatggggagtgctttagagaccttatgtgggcaagcatttggagctgggcaagtagacatgttaggagtttacatgcaacgttcatggataatcttgttcaccgcttgcttttttctactaccactttacatattctctaccccaatcctcaaactactaggccaagaggatcaaattgcagagcttgctgggaaattcacaatacaaattattcctcagatgttttcacttgctatcaattttcccactcagaagtttttgcaggctcagagcaaagtgacaattctggcatgggttggttttggggctctgatcatgcacactggtattttgtatcttttcatcaaggtctttgactggggtaccactggggccgcggcagcctatgatatctcagcttgggctgtggctatagctcaggtggtttacattgtgggtgggtgccaggatggttggaagggcttgtcatggttggctttcaaggatatgtgggcatttgttaagttatctgtggcttcagctgtgatgctttgtttagagatttggtatttcatgaccataattgttcttactggacaccttgaggatcctatcattgcagttggttctctttcaatatggtgagacatgtttaaaaattatagtaatagaatgaaaaagtttataatgtcttattctatctaccaaattatgtccctcaaagatttgcaattgtattcaatttcatttcagcatgaacataaatgggtgggaaggcatgttgttcattggggtcaatgcagctataaggtaaagagtaacatagctcttttttatgtaatatatatgcacatatcttcaactgtttttgtttatgtgtttttgtatttattttgaactagtgttcgagtctcaaatgagcttggatcagggcatccaagggcagcaaagtacacagtgattgtgacatgcgttgaggcactctgcattggaatattatgtgcaatgctcatcttgcttaccaaagaccattttgctataatctttactgacagcaaagaaatgcaagaagcagtctctcgtttggcttttcttcttggtataaccatggtccttaatagtgttcagccagttatttcaggtaataaaacaaaattggaatattctactctaatgtgcaggaagaataaagccattttaaattttagtaaaggacaaaacagtattatattgtctaaagaacttcatatgaaatgtgttatctatcacacattagagtggccatgtttttcaatacaagtcataatcataatcaatcataagctgtacttgtacaataaatgcgtattaattaaatatgttagtattgtatattttatttcaactttaattaaaataaagcaagtacttctctactattgcagctatagcttaaaggaagaaagaaacctcttaacttatttgtgtgttaatttggcaaagaaaatgtgtacttttcaggtgttgctgtaggaggaggttggcaagctttggtggcttatataaacttgttttgttattatctaattggtttaccacttgggttttttcttggttataggaccaatttaaaagtggaggtaaagtattcttctgttctcaccactcactgaaccatggtttggtttttttaattaatttaaccctattatactataatatggagtatggaccactcattattttaatctaaatgtaaaatgtaatccatcctttcattatttttacacctaaataatatttatttatatattggttgttgggtctaattaatgtttgtgtttgtcaacatttttagctttttcttcttttcattttgaagccgtttgattggctcatgacatagtaagacatttttattgtagggaatctggattggcatgatttgtgggacattcttgcagactttgatacttgtatatatcatttacaagaccaattggaccaaagaggtaatacatataaaataatatatcaaatttcaaagcctattaaaacattggtctttattttagatacttggattggagggaagtaaatggaataggttgtattgtatgtgtgtattaaaaaaatgtatattgatgggttagttattataggtggagagaatcagtcatctttaaatttaaaaacataacaaagtttagaaagttccattttgagacttctttcagatctttttataaatatatataaatttaattttttaacttgtacaggtagaacaagcatctgaaagacttcggggctggacagcgcaggaaaatggctctgacataataaaagtgtaatatgttaaaagtttcgtttttgactgtaaattaatattatgtaaattaattatttttcattccttcaataatttctttatttttttgtacattgatataatgaattttttgagcacggccgtgtagtttgaaaattgtatttagaggtattggaaattggatctactttaattaatgagcaataattctggccagaattatagttgttgagtttgacccatgcatgatttaccaaaactctgcttgtataagtagattaatacaactatagcggtaaatagtgtttgtcgggccggcatggattcatattttgaaaaatttataattatatgagtattttcttgtcaatattttataaagtaagtctgtaacggtttgtaagtttatatttttgtatcgtgtttgaacttgtatcatattttgtttagggcgcttgtttttcataaataagttatcatgttttcttatataggcattggactccattttctattattttttattaattgattactatattatatatatttatactttgaattgtttttatataactttagaatttaaatatttattaggaaatatatatgtattagtattatcattattaaactttaagaatgtttaacatgttgtaatttggattagtctatttatttttacaggttctacttttgggtttgtcgtgtcgtatcgtatttaagtttattttttttgtattgtatttcgtgctaatttaaagtatcgtgtcatgtcgtgtttaagcctatattttttttcatcaagtagtgctcgtaccgccaagctcgtatcaatttcgagccatgtcaaaaagtctaacccttatttatgataatatacaatacaacttaattaacatatatatatgtatcctaatattaaataaatgaaaaacgaaaaggaaaaaattaactcaaagaggtgaacttgaaaaatagaacaattgtcgacaccaaaacataaatagaatatataaagtacttttattgaaggaaaaaaataatttaagtaattttgttacaataaaactatcttaaaatataagtttgaactaaattatgagtgtgatagagtattgttatgagacaacaaggtatttatatacttttatgatatagtattttataattagttaacagttttttataaattttattaaattaaataagtacaacctgttgaattgcattacaattttataatgagcattgctattagataccaggcaccttcttgacatgtcgcgttgcgattgactagcgatactccctaaaaactattatattaagttatgtaagactcgatacttaattaccaaccaatagcaatattgacacataggagggtattaggcaccactggtgccctttagcatttctcttttatcagtagccctatgattctttataacggtggtggttgaccatttaatgtagccataaaattttaattaaatcttcaaacgggtgaaacaaacaaacacacatggcttttaatagtttaataggcaaagcacattcatgccagtattttagtttgattttaaaaaaaaatatatatgtatattttattctctctctttgaaacaattgaattattattattattttttaataattgttggaggtaggacaacaaaatccgtaggaattgtagtatttatcgtaagttttggaccgttttgataatagagaaaggaggccaatagcttttgaatattatgatttagaccccgacgacatctgtgcgaaattacatctttacccttcctcatatctctttaaatttgcaccctcgtagttttgttaattgtaattctgagctttcttttgtggttttcttgttatatcagcaaaaagagagctagccccaacctcaactagccaaaaagaaaaaactaaaatctttcattttttttttgagaaaaaaaattacttttaattattaaggtgccgtttggtaacannnnnnntttttaattttttaatcacaaagtgaaagtaaaattttt

SEQ ID NO: 36989 - DNA, 1962 bp, Cannabis sativa
ctttattttaaattattcaaaattttataaaacattttaaattttaccttttatataaaaaatttaaaattaaaattatataaatataaaaagaaaaagtgcactggtacccttggtgcaccataaaaaaacatattatatatgaaaaatagtctagtttctaagacatatatactataggatgtatacatatatagctcattattgatcaagtcacgagttgaaattaatgatgaagagctagctaagctaagctatagctatagcattgcaagaagaaagtgtagttaatgagggtgagagatttttgttataaatatacatgtatatatatttatatttatatatttataatatatgattcaaaattgatggaataatatatatatatagggtaaggaaaaatgattattattattattgtaaatatgggattgggattgggatggggcaagcctcattaatggctggctaacacctctcgtgacctataaggattgccagagatcctttggggctaactctctatctcatatatatctcattctcacacactctcttcatcacttgatcccaccacatttattatcactctatactatatatgtagtttttgaattgaactcttctatctctatcacttgtttttttttttttttttactttttactttttaatctttttagtaataataaggatatctgtttttatatatataaattcagaaatgcatgtattatctttatattgttttgcaacatcttctaaattttttaatttaaccaattaaaatataaataaattgttggttttgctatatatattcactctacatttacacacttatgtgaggtatggttgcgagaaataaaaatatgaaaatgagaatggtgataagaataagaatgaaatgtaataaaaattaaaatgtataaaaaatattgataaaaaaatcattaaatttgttttcatgttatattagagtggtattttcttctattttaaaatggagtagtcattctaccaaaataatagaaaagatatttcattaaaatgatattctaatactttaaaatacaactaaagaaatgaatgaaatgaaaattatttctttttaattttattccatttcattaccttcaaccaactttagtgttcgttaaattgtattctataatattatattaaattgtattttatacaataattttatataaactatatgtattattactattgacttttatgtacacttaaatatatataatattttaggatacattaaaattaaaatttaacctaatattatataaaaataagatatataacataatttaatgtaatacaatacaatctatctaatatagtgcataccaaattagcctttaaattgtaattgattttaataatgaatacttttcaaatgtatatcaagtcatattaaataatgatcaattgagagagtatttttttaatgattaaaaaataagaatttctataaaaaaaaatactagattttagttaaaagtttataattttactgttatatagaatttttttacaaaaatattgtcttttctaaaacaaccgtaaaacaactaaaaaataaccagaaaaactaaatacagtacactgtataaaatttacacaatatttttaaaaaaaacttctatctacaataaaaaaataaaaaaaattataaatttcagggtaaaaacccataaaaaataatcatacattgggcaactatatatttttattatgtgtcgacttttatgtataattggatataataaaatgtaaaataacacataattatttaaaagtaacttaatgatattttatattttgagaattatctctgttagataaaattaacaattaacccaagatctatttgtatataacatagaacacaatagtagtatatgataattgagtatgtgtacctgattgatccat

SEQ ID NO: 36990 - DNA, 3609 bp, Cannabis sativa
tgcagattaagccttgttgaatttctcacgaaaaaaataacaatcattctcaacgtgcttagctcgctcatggaacacgagatttgaggcaatttgaaagaccacttgattttttgcaggaactaatgtcttaaacccgacttcagtcaaaagctgataaatccacactatctcacagacagattgtgccatagctctatattttgattttgtattggatctagacacaacattttgttttttgctcttccaagagatcaaattgcccccaacaaagatacaacaacctgaagtggatcttctattaccttggaacctgcccaatcttcctcagaaaaaaaactttatctaggtgtgtccattgtaaacaatacctcgtcctagtgctcttttcaagtagcacaaaatttactctaatattgcccaatgatgaattgttagagatgacataaactgacaaacaacactaactaagaatgcaacactaactaagaatgaaatgtctattcattggctattctagcacgcagaaaaagagcaataaagttactctctagttacaaaaaaagtgtactaacactatggatgtctttttttttttttttccttttgaacaccagtctttttttcccaactcttgatattcagagggaacattcgagggaatatcatctttggaaaacttttcaagataatcaagttgcattcccaaagcctcctatcatgatatctcaacatccaactgttcaaactcaacctgttttatcaaaatcagctgattctcctctatccaatcaacccaatttgagtcttgatatcacaattccattctctttctgtaaacagtctaccagccaacaatccattagccagtcttccttcagaaagtacacacacgcttcctacgtcatcacctcttcaaataccagcataggaaacaaataacttcgtgtttataaaaggagaaaagctgggaatatagaggtcaacatgaaaagcctggactacttgggcaccctcctcttttaagttagttttttggaagtaagttatacttaagttgttgtaaaaatgatatcaaaaccatgcaccctcaagtgagaccaacatcgcagtggaaggggcaacctctagaaaagtccagagtgggccatcaccaaatgggccactgtggacgtcaattataagggggtgtattgttagaatgccacatcaactaagtatggattggttagtggtttataacttcttgagcaccctcttctcttcggctagttttttaggaatgagttctgctaagtagttgtaacacaaccatgtttttcattataccatacaatatccaaattataaagtcttctcaaacacaagaacttcaaataaataacatttacataccagtactatttaaagattcattcgtaaaaatacttacaaagcagatcatacacagctacgaggtaacttgagcaaatgattaaaatagaatgggaaacaattacaaacctttagtccattgattccaccaaaagatgcacggcattcaactaaaaatgttaaatgacgttccattgctaccccataatcaacctaagaaagatagaggaaaccatctcagatcattgcaatccaaatataaaatttcagtatgcagctgaaatacataaataaatcaaaagtgaataattaaattagttaccatgttaacaaaacgggaaatcaaacgtgctggttggttatctgcatccttcacatttgcaaattcaataccatcatacaaagcctgagatatttcgaaaagtagttgtatggtcgttggatcacatatataaccatccctgtgcatgaaattatcctcaatagataaatttgtcaaagacatcaaacatcatttaccggattcacatcaaaaaagaaaacagaaaaaaaatatgagcaggaagatgctggttcaatgaaagttaagtggtatgaatatgagtagtttttcagtataacagcattcaactaagtggagtataaatacaaagctacaaattgtgaaataccttgttgccatgttaaggatatgcatattgacaatggtttgtgagctcccatacattacgtccaaaatatcaagaaaatggttctagaaaacacaatgtacgacaaaattttatcaaaaagttaagcacatattattaaatagtttactatataagggggcggtggggaaagcaaatagaattaaagtaataagggaatataccaaagcaaacatatcttctacatggttgtgatgatctagaagcttcaccaggatggactgcaagcttgtttgttcactttcggtagttcctttactgctcccttgctttgacataccttctaaaatggtattcaaatggttatcctgaaataaattattaggtccgctgaaaattatattagtataagttcatgctaatacactcacatgatgcattaacttcaataccaaagggaacaacaagaaggctattccaaaataggcaaaataagaaaatcatttaatcaaggcaaacgtaaggtagcgtttagttgggaagaatgaaaatataagaataggaatgaaatagaatcaaatttaaaatgcataaaaaattgataaaaaaattattaaaatttttctcatcctacattgaaatggtcattccttctatttcaaaatagattagtcattccaccaaaatgatgaaaaaatcattccaatagaataacattccaatacttcaaaatggcaccaaacaaaagaatggaataaaaattatttcctttccatttcattacctctaaccaaacgctacctaagttctaagaaaagtcaatgttcactgtccaaccttttgttagaaatatctgtgtacttaaatcattcaagtcaatcattcttactgtggaaagatcacattaaaatttcaaactttgtttttttatccttttttagtttctgtaatcaactataattaatcaagcatctctgttgtgtacgcagaaaaccaaaaaaaattaacttcattctgtgtggcagaacttgcactggtacacaaggaatacagtgtaacacgtgactgatatagttatatttaaaaggaaaaaaaatactacttggattattatgcattaaaatccaattaaaagagaaaaaaaaaaccatcagcacaagcaaaatcaactctaatctctcaaccaggccgagaaaggagcatttattaaattgtcttcattatgtagctgtcaacaaagtaaacgtgggcttcttcgctagaagaacttttgttgtcttgatcccacaatctattcactctctcctcttcttcaaagattcttttgttgctttccaaccatagtacccagaaaacagcagcaactgctgtttgccagagcttttgcttttaatgtcttcacttaatctgaaattataagacttccatacactgaactgggacacaccatattaattctaaatccttcagtagtgtataccaaatctgtatcaatattgaacgatgtagaaaaagatgctttgcagatttgttctcttttctagaaagtgcacaccaactgggagaggagacagcaacatat

SEQ ID NO: 36991 - DNA, 3999 bp, Cannabis sativa
  modified_base (1565)..(1577): a, c, t, g, unknown or other
  modified_base (1795)..(1816): a, c, t, g, unknown or other
  modified_base (2647)..(2649): a, c, t, g, unknown or other
acaagcccactgtgttagccatttgaaagattggaataggattcataatcatctttttaaatctagaattcagcaattaactcaggaaatagagaatcttcaaaaccaagatgtgcttactcaagctgatagacttcaactgagtagattgaattcaatgctggacgctcttctctacaaagaagaagtctattagaaacaaagggctcgggtgaggtggcttaaagctggagataaaaacgctaaattttttcataaacaagccactcttaggaagaaaatataaataatattagacaacttgtatacatcaaaatattaatttttttaatcacttaaaattttggtgtgaataaaaatttatcactatagaataatttatttttagtatatatccaatttaatttcttttaattaagaaaagtaaacttaatttatctccattaatttgagaaaatataaagtatgaatatttatatatatcaaatgttaattagacacacatatgcattcttcataaaaaaaaggcacacttgctaaatatatttttatattattattagaaatggtcaattcacgaccactcgctagacccaaactaatcaatggattggcccacaagtagagttagacagaggttctgggtttaactgtaatcttaattaccttagcaaaattagacattttagttctgaaatgatgactctcgttcaaagaagtgaagactcaaaaaaggaaatcaaatactctaaaaaataaattgcaaaatagtatagttgatgagacatccaagaatagaaaggtgtccaagagaaatactacatggcacccctctgacaccaaatcacgaagaatcaagagcatgtcccctgtgttagacttggaaaaggcacacggcaaaaagcaaatcacatttttctcaacacccattactcatgatcggcggagcacactcaagtgaagagggaagcgactcatttagctgaccgtcaggctaacttgggtttaggcttagatcctctttgagatgaaatgcggaactcggatgagtattcttgtttatatcgcaagtcaggggaaagctttcatcatcactcttagtcttagcggcactcgttggttcaacaaaaagagtagagtcaacctcgagaagaataagcgtggatgccactatcaatgtcaggcaatacgatcccatatagacaacaaaaacctgccaaattgggtctcaatatcaatattataatatattttacctcatcaatgtgcttatttcacatgcaaaaccctagcaggtctggatttacccaaaaccccgataaataagggtaacccttcatgccaagggttacgatttctggcagaaaataatggttaaaattttggcaagaacactcttgtgaaaaatacaacataaccgaagagtttaatgatattaacttatggactaagagcatctccaatagtgacattctttaagagtgtcaaaaacttctacatcacttaaaaatatatttgcggtataacctccttaagtggtcaagtttttgcaactaacccccaannnnnnnnnnnnngtggtaaaacctcctaaactcaacatctgttagcaattagccctttccgtccatttttgggtgttaactgccaggttggcatgtctacgtgtacacagtatacacgtggtacagtttaattagtccacgtaataaatatttaaaattataataaaattaattattttaaaaataaaaaattttaaaaaaataatttttttttctttaaaaattaaaannnnnnnnnnnnnnnnnnnnnnattaaaaaaaaaacctaaattccttaattactctttctcttccgctcctttcttcttcttcttcctctatcttcatttgcagacaagaccaccaccaccacccatggcaactcaccaccgcaccacccatggcaactcaccaccatcgcaacctagtaccaccatctcaacccagcagcaccaccgcataaacccagcgaagacccaaaaaccccgaccctctctctccgcacccctctccttagatctgtctctttctccctcactgctctcggctcaacgtcgatgagccacctccagtgacgctgaccaaaatagagaccactacgagcctccctaactatttaaaccccattgccttagacaacaatgacgtcgatgcagacgaatccgattcttgcaaccccaactggccaacctatctctaaaccatatgttcttacaccaccttcaaggcctttcgtgtttcaaaacacatcaaatgtttccatttctccactgcagttgccaccaatttctagctcagtggacaatgaagaagacaccccaaaaccaaagttgaagcctttacattgggagaaagttagacctaactctgatcgtgaaatggtgcgggatcaactaagatcaagcccatttaagtaagatatatatatgtatatataacttggtagattttcttttatttggtttccatttttgcttcaattttcttatttggttttaggttgaatgaagaaatgattgagacattgtttgctgtgaacacccctaattcaagaccaaaggagggaagcttgagattgattcgaagaagaagaagaagaagannnagaagaagaagaagaagaaggcttgacagagagagaatgagaagaagagtgggaatgggttagggttattagggtttttttttaatttttatttttttaaaattgttttttaatttttaaagaaattttttttattatttttaaaataataaatttttttatttttttaaatatttatttacgtgtaccaataaaattgtgccacgtgtacactgtgtacacgtggacattccaccatggcagttaacagctaaaaatggatggaagtgttaattttctaacagaacacaagtttaggaggttttacccccaaaattttagaattgggggttagttgtaaaaacctggccacttaaaaaggttatgccgcaaattactcattattttattttatctatcttctacattatttttggtactttttattttaaaataatccaatggtaagcatttctaaaaattgttaaaataatattatattattatttaataaatattaaataaataatttttcttattttataataaaataataaaaaaaaaataagaaagagaagatataaaggatgctatagtatgatatttttttttcatttcaatagtaagcatcaattaaaaaatactaaaaatatattcatatcatcgagtatttttaatagcatctttattggagatgttctaaggctcattaacaccccacgtaaaaaaatttgtcttctctatcttctaatcattttttagcttaatctatttcttaatcggttctaaaaaaaattggtaaacacaatttttttaaaatagtgaagaaaagaaatatcaacagtacaatttacaaagtaacatgaaaaggaaaaaaatttacaagatagactaaaagtttaaaaataaattacaaaaatacttcaatacgaaaaaaatttaatttttactctgtgaactttttcatttacaaaaatacatattcagtaaaaataataaattattttttatatatataattgtattatagttgtcataataaagttatttttctgattgttttatagttgatttatagttgtcgtggggttaatttttaattttttttagttgttttcttattttttaccgagcaaattgtatttttgtaattttaaaactttaaaaatatatttttgtgaataaaaagttcagatcgtgaaattgtaaatataatataaaaagaaagtatttttgaaaatttccaaaaaattaatgtaaatgtttgaaagtaaaaaaaaaatcacaaaattttaagaaaaaattgcatctaacaactaaaatttgaaatttattgccataatattgttattcaattaatttgtacatata

SEQ ID NO: 36992 - DNA, 4065 bp, Cannabis sativa
  modified_base (3415)..(3415): a, c, t, g, unknown or other
ggtgtaaggacccaatggaggcttgaagcggggacgttacagttgtaaacacatagcctgtatacagtgatattcttgtgtcaagatcaagctagcaagtctgagtcaacaaatcttgcaacttcacactcatttttgcttcaacatttgcaaacaagtcccaatttaaagaacattttacataccttatgtctttgtcaaaggctattatgatacatgtttgtatctcaaaggagatgacatcatatcacataccatactgataagcaagagaaggcaaagtttgaaaatcagaagaatctgttgatgacagaatttgagatgaaggacttgggagctgcaaccgaaattcttggaatgaacatcaaaagaaatagagaaaagggggaactcatactgcatgagacagattacattgaaaactcattgataaattctctacgagagatgtaaagcctaccaagcagccaatcaccagtcaacgcagactatccaagctacaatgtcaacgcagactatccaagctacaatgttccaagttagagagggaaactgagcaaatgagtaatgtcccttactcgaatgcaattggaatatcagtcatgtatttataatggtatgcgcaagatctgagttggcacatgccatgagagttttgagcaaatagtgatagctagagttgcatacacctatgcaaaagagaactcttacagtgtatttagatagccagagttgcataatgcaaaaatcctgtgttttatgataggataaaacatgtggagataaagtgtcacttttatttgagagaagattactcaggaattggtgaaaattgagatggtgtctattgaagaaaactcaattgatatgaaaactaaaaattgtcactcttaacaagttcaaacattgaatgagcttattaggaattgacaaaggagggtaagttcgaagcacctatcgagctaagacccacaaggactaagaggatatctaatcgggtttgcaagagtgaattcaagtggaatattgtttgtaaactcactatatgccaatctgtcaaagaaataactcaatcaacttaaaagtcaaccatccaagatttctcaacaaaccaaaactgtcgaaccgttatgacagttacatttcctttttcagatgctataaagctcgagctagtgagatcattctagagagagagggtatgatcttgagagttgacattgattacctgcttggttttagcaagaatcaaagatcattgttgtaattccgatttatggaataagattgactgagcaattcttgtggcgagcttgaaataatatggaattagctatgggttgggttggtggcacatccaacacactgctaccacaatgcatgcattacacttgaagaatattttgttcacatactcaaacctattattaaatattttgttaagaatcatcgggttctatctcaaaactaagtgataagtagagtaactcatgttattatatatggctcaatactttactatttattcaatgtgggacaatatctacattaatagtggtgactaagagcatctccaagatgttgcgaaagatgtttgatgacatggatacttttttaacattttttaattaatgcaaaaagaatgctacaaaagaatgacataccatagcatcttttacattttctcttctttattttttttattattttatcgtaaagtaaaaaaatttgtttatttatatattaaataataatacatttttattttaataatttttagagatgcttattattggattattttataagaaaaaatgttaaaaataatgtggaagataaataaaatataataatataattttaaatagtgtgaaagttttgacacttttaaaaaacactactattggagatactctaatacgtatcaatttcactatgaccaagtataaggtggtacttctctagacactactagtagctaatattagctatgttctataataaagagcattgttattaggcaatagtggtggtgcccaacaccttatatagaatattttttaaaagttatttttttaagttatatgatactcaatacttaattataccaatagcagtatgacaccgaaagggtgctaggcaccaatagtacttttagcaattttctataataaacaactattaatagttgatgtggcataatttgattggaataaaaaaagactctttagggagtctatatacaagaaaattcccactatttatgtacatatatttatgatcatatataatgcaactttgaaatccataccatacatgtaggtgtacctaccacacaatgaatctaatcattatattcttttatgcattttgattataaagggcctagttagttataaatctagctgaatttgagaaataatttaattaattaattaattctcatgagaaaataggtagagctatggtatagcaatcatttgagatcatcatattcatctcattatcatcatcatcatcaccatgtctccagtttcatggttgaagaagaagcttattaggcgtaaactaagaaaacctagaatcaataataacactcttctcaaccaatctcattatgttgacacattgtccctccctctggttctttctcttttttctctctatactctctttattttaatataaaacactttgtatttctcctatatatatgtatattaaaaactatatacattaatatttataggttgatgatagtgatgatcaagaactcgatcgtatagcggtgtcagatctacgacgtgcttattggaaaaactccgaggatatcatttcagacgatcacggttcgtttttcaatactacttgtatgaaaattttatggtaggagtattttaaattttttataacatagtatgttttgttttgtaattattttagatatggattttattattttttttttaataaaattttgaattatttatagtgccgaaaatagatttgaaataatttatttcatataaaatagattcaaaaaatattcttttgatatttttgacacatagatatacaacaatcgaattattttaaaataattgtgttctttttgtggttatttaatttggaaccattcacaaatgtatacatttatattgacctctaggttttataagaatttaggataaattaatttaaaataattagtatttttgtcaccgaattcataacattaaaaaagttttctaaaatgatattattacgtaattgttatcactacaaaaaaaaattactttaatttagtcacaacaaaatatgtgactaaaagtaaaaaagttttgagtaattattaattattatccatatgttgtgaccaaaaggtccgtagctaaaggtattagtcacaaaaatnacaatttgttgtgactaaatgtggttttagtcacaatacttattgtgactaaaagtaaactagtgataacttgtgtttaaatactatattttagtcacaagtagttctttgttgtgaccaaaagtcacatttagtcacaaaaattttatgttgtaactaaaaaattgtcactaaaaatagctgttttttatatatttttcagcctatagtttataggatataatctgataatactataacaaagaaaaatattaaatttacatatatttatgtgatgttggggatgtagaattggagtccatagtggtacatttaatggagaagaaggtgacagtaactcgtaaatcatcatcatcagggctcaaaagaaaagggtcttcaagactaattagaagatcatcatcagcagtgcctgccttatgcagaaaactatctcatagagcttctagggtttcatggttgtcttcccttacttgtatgggcatttacaagggaccaatattatcacaagctaaatatgcatactaattaaattagtaaccactagctattatatataatatatgtgtgtgtgtgaatgaattatatttatgcttattttaattaattaattagtaaaatatatatttgtaatatatatgtatgtaaaa

SEQ ID NO: 36993 - DNA, 5154 bp, Cannabis sativa
ttattagctttccctcctcctcaaccaaattatcggtggttccaaacatagccttaatctctcaatctctacgactctacttcctctctatctccattttatctcccaaaatcaggtaactccaccatctctgattttccattttgctttgaatcgcagctaaatgtaaatggtattgctttactaatgttggtttttgctttcagccgccgtctgccgatcgtcgtcgactgctccatccatccatccatccatctctttcaaggttattgttctttgattttataattgattcaaccatggaatgatgagtagttctaatttcttgtattttgttacggattttatttactgagtttatgtattctgttttggggctgaaattagggtttatatttatattttattgtatgtcttgccttgacagaattactactattacttggcggtttaccttttgttctcttgaacttttttttgttttgggatttaaaatcggttatatgtgatcggaggtttctaattctctttgaatttgaaaaactttcagaacaaacttttttccaccacgagtcttaggcatagataatcattaattcccatgatagaggaagctgataaacacaacttggaagtgtttaactgtgataagagaaaaatgtcacctttgaagatactgcattatttgattaattcatcatgttgattcaccagcacagccacttcatagttttttgttatgtacgcaatgagaatgatgaaatggtttcaccaattcattgcaagataattagaaaaagagaaattgtctacgagctcggatgctacctaacacatttaacccaaggaactattaaaagatgaataagatggtcttggacataaaaggaagtatttgatattcctgtagctgttcttttcggatagcagatttcaagaagatgaattggaaatatatatagaatttctttttttaatccatgtaacatgattatttacttatttaatttatgcccaaatattttcatttgcttgatcagagggtgttgttcctaatattagtttaggagtactactgttagctgtagtaactgaaaaatagctaatttgaaatatccatcattgattcttccttgtttaaatagttttgcttttggcaattgtaactgaaaacctattctatatttgcgaaacaggattaaagaaaatagataattaaattcggatactgattttttttggtgtccaaggaatatacaaagtttgactatagagcttaggcatttgcatcatttgtcattgtgaatgcgggtaatcctttactttcattcctattatgtaactagttggtgctatagtattggatattgatgaatagatttctttacatatcaggaccttaggatgatcttctatgctttaatttaatttatgttctgcttatacttttcagggttttttttttccttcttcaaaaattagtttctaagtaattttacatagtttctaaatattttccctcgttctctctttttcctttttagtgaagaatggtttcgggtttgatcaatgccaatcctgtggtctatgaaaagaaagagcgccgggtccgaggtgctataagtgatgtagatgagtatgcagtggaaccaattgaccagcaagaaatttttgatatccttcccaataactattaacaacccagaagatataggatgtttagattttcagatacatgtatttgatgtatatgtgtgcgtagccaaagaatgacttagcacttgttcaatatggaattcatgctgttttagtaatatgtagctagttataacaaggtatataattaattaaatttaaaattaaactcagtgggcctctaatcatgtcgatattttatttgaattttcttaacaattcataaatcatattagagatataaaagatcctgagcatccttattctttggaagaactcaaagtaatagcagaagacgcaattgaagtggatgaccatcgtagtcatgttaggtacttgttgaatcttttctctatatatacatagattcttattatttatatataattattatggaagttagggtttaaagtcttttgaatggaaaatggcattctttcagggtcacttttactcccacagttgaacattgtagtatggcgacaataattggtctttgcttaagggtgaaactcataagaagcctaccttctcgttacaaggtatgaacttccataaattttgttgacgaagttcattttttttttttataattaatctatttatcttgacctgaactgtctttgttattatttaatgctgaattgtgtgctctgtactttctattaatttgagtaaatttttgctgtatgctggtgttgaaagtcttacttatatcttatcaactgtcatgggataagtagcatcctagctcagccctttgcttcatacagtatctttctgttgttctggttgtgaatgccatcgtgaattagcccctgaagttgggtctccatctttattgagagattagaaacaaacagttttccaattggacaggaaagagaatattgtaaactgatgtttgttgtgtcttctgattatttgtttcatatatttttttcttggattttttaatattatgttctcttttatcattgttattattagaatcataacaaataaataaaacattatcaaccaatgtaagctgtataaatcttttggagccaattgatcccttttttcttctctttctagatttatgtagctaggtaatgcatttaaaattggctattagcatctgttatttcattttcaatgtaaaaatagcatggacagtccccacttatttactgatttcatttgaataatttctggaattaggtggatattcgagttgcacctggatcacatgcaactgaagcagctggtactctcttgttcatcctttgttatttccgctatttctgtatagaaatttcaatatgggattggtttgccttaaaattttatgtaccctaagattggaatagcctcttgttgcagtcaatatgttaacatggtattgctgaatcataaattattttctcttacctttattcccacctctacaagatttcattacctatatgatgattgacaagcagagcatgtgaactcgatatggtcgtccatatcaaataatttagataaaaataaataaataaaatctggccaacttggctcaggaaatgaagccttctttggtagaacacattatttatgtcaatctgtttctgctgtatgtgcagttaataagcagctgaatgacaaggaaagggttgcagcagcattagaaaatccaagccttgtggatatggttgacgaatgtttagctcccacctttggttcttgaactaaagcatgtatgtcacgagtgaagctcgcaacaacgctacaagtttttcactatgtgatgaaattttggcctcttctccgttttgtatatgattcattcatcaagttttgaagagtctatttgttgtggaaagcaagccagagctatagtttttatctcaataatcacagtttccctatgcctttgcttaatcttgcttttagcttttagttttttctacaatgaatttatttagttagcatgttaaattcatacaaacactagttgtcatattatcacaaaaaaacgtaatatttgtcatagaatatagataaaggtttagccccattatgagtaacactacactagctagtttccgggtatgtatcaaattactttattgataaccaattcttgaaaagtgcttaaaataattaaataagaatcagtaagagagtcatttggcaaaataataattatgtaaatttttattagcaaaacaatttttcaatcaccttttcaaattaacttaataattaatttaatgaacccaattgacattaaatttaaattcctttatcattaaaaaaacaaaaaacaaaaatagaacaaagtaagaggagagtgatgtttgtagtaagccgtactaaatttactaaatatttttttttacaattttctactatatgagtatagcggtaaatagtagtcgaatccacgaaactctgttcagtttattattcaataattaacactaaaacttaagaaggggcttttgatttcaagctcacttaaataacataaattaaaaaataaataaagataaataaagataaacattacgatattaaaaaatagttaagagttaatctctgtcatcaacaatcattcaagatcaataatcaatttttttttttttaattttttttttatatataagtagctaaattaaacataaaaatttaatatccgtctgctccgagtcttgtggaaacccttcaggggtgacaatccgccttcaacttcccgttcttgtccttcgctcgtcggccgacgtcgtccttctgcaagtcttcttcttttgtgacatggtgtgattgattccgatttgttttgtttgatgttttctgggttatttggattcgatttggttcctgggttcgattggttcggtgtgttctgggattttttggtttgtttgcttttccgtttgtctggtttgttatttctggttcagttggtgttcgtggggtgcgacggggtaccgtgggtgggtgaaggagtgaggttggtgtgtagggggtgtaggttaggtcatcggggtgtgggtttagtcaaaggattattgttctttgtttggtaggggttgtacagtcgggtcagcataaaaaaaaagcattatatatatagaaaacagtaatcgaaaaaagaaaaaaggagtgttctcatttattttttatatttatattacatttattaggtgttttgatgtgtgtgtcttgtggtatagttggttcgtgattatggcttcgtcgagtgtggctatgcgtgatcttgaggacagatgtgcatatattagtattgaaggtgaagatgatggtgatttgggtgttgacttccttgtgctggatgatcaagatggccacgatcatctctgtattgttggtcggtttcttactgcccagccaattgattttgaagccatgagacatgttatggcgtccttgtggcagcccgggagaggagtctatgttaaagaa

SEQ ID NO: 36994 - DNA, 5873 bp, Cannabis sativa
aaggttcttgatcactgtgagaaagctggtcgccgccatatcagattccgtgaactcgccgccgacgttctaggtaacgacgtcgttttaaatgcttgctctgtttttttctttataaagtagttgcgttcaagaaacctagaaaacgacgtcgttttcttgttttgtcagaattagaaaggtaaaagggtcattttcatggacatttgggaagaatgtggtgatattataagactagaccttatgattttgccacgtgtatgttattgggtggatttgatctgttttaattatttatttttttgtttggttgccaagaaaattagcattttgcagttctagaaaatctacttgtttagaagaaagtgccacaaaaataaaattgtttggatagggttgagattaaattgtggtaaaatctctaatagttttactttgttaataagtaattcccaaaatctaaattttagagcaaaacttttaaaattctgtgtttctattatttttggtgttaagtgtcatattaaactgtttacgagtagatattattgttcacatggacactatttacttatggaacaattttattagtctacataataattgtgtatattgggagttttgtcaaatgcaaatagtgattttgtatttttttagtagtcttttttttctcttttcttccctaaactagaataccaagttaatgattggttaattttattgggtagttttatagtacaccatgttctcgtaggtttttagttcaattttttgctgttgtttttattcgtctatattgtagttattcagaatcatttgtaaacttttaaaaaattccaaatagttttataattgtgtatgtggtaattatttaaaaccaccaaacattttaaaaaattccgaatagtttagacttttttattctaattttaatcaccaagtatgaaagagtggcagtgagttttagtgttttttttttcctttcctaaactacaatatcaagttcatgatgggttaatcttatttttgctatataagacataaaaatttgttttttttattttcttttcatttacaggttcaggttggatgttttactttgtaatatttattcaaacagctataaatactggggttggaataggagcaattttacttgcagggcaatgcattcaggtatataattttgctttttatctgatataactgactatgaagttatgtatattcagatttttaggtatagttttgagtttggcataaatatggtttcctgccattgccatgtgattttgtataaattgaattagattttgtgtcagtgatttctgtctatttttgtcaaaacacttattatgtgaaactaaaaaaagtcttacctatttttatcaagattatggtcctacaatgccaaaagatcttttgtataaaatattattcttagcttatgatgggtcccctaaaaatggtgaccattgctttattgaaactaagttggtatttggtaagaactaacaaatgaattttacttaaaaaacaacaatttaagggttgtcctgagctgatgtagcatcttccaattgatcgataacctgcaaatgttgattgcttagcaatttttgcaggttaccgaccaattagaagatgtcacgcatttgcatgtgttgttgctcgtcttgtctttgggacaagtagcaagctcataattctatgaatgcaacttggacaccatttagccacagtctgacttttcggtatttagattgtcagaatgttatttaaagttgaattaaattcatcttaccctgctcccctttcgaaattcatcatcaatttattgcttgtctcagcagcagtagacttttggcagctaaaataataattgatcaactgtttagtaaagtacaatttttttcctaatcttcattgtatattatgatgagttttgccaaatgagtctaattattctgcataaggccccacatcaatggatgatcatgatctttcagactattgctgtgaaaactattctaattttccacacatgattattattgaagtactttggttttttcatgttttggttggttagataatgtatgatgagctttcccccaatggatcactgaaattgtaccacttcatagcaatggtgactgtggttatgatattcctgtctcaacttcctaccttccattcactcagacacatcaacttgggttcactacttctcagcttagggtactcatttcttgtggttggtgcttgtattaatgcaggtaccaaatctttaaatcttcattactaataatgtaagcccatatgaatgttttaccaagtagcaagtttatgtctctatgtcttttggaaagtggaaaccatttgagaaatgtccccaaaatttgacatttgctagtaagcaaaattgactttttgtttgcttaatgagtcttattatgatttacttaagactgccatttaatatttaagattagtggattgaaatggctgaggttcttggcgttaaggaggctttgagttggttgaaggagcaccctggtgttcacgctatagtagaaacatattttcaagtaattgttgttttgaacttttctcttttgaaaatgtttctctttgctttgttaagcagtttgttgctcattggctcacccgagcatcgtgttctattcctgaccgtgttattagagtggacaattgtccttctgacttgttgcctttgttagctttcgattgcatttatcaatgaagttcaatctttctttcaagaataatttacagtgtaaatatttgagtttaacttccggctacaaattaatacctaggtttaatttttgacagtatatacctaaactatattgctgaaactttcgtagatacttgaccgttaagtgtcaagtcaatgatcacatgacagtcctgattagtccaggtcattaaatttttatttttttatttaaaaattcatttaaatataccaataagaaaatgacacgtgaatattgaattgacacttaagtatttatttgtaaccgggagttaaacttaagtatttacgatccaaattactctttaatttttttttaaagaacggagaaagatttaagactagcttttaagtgtttggtgagtccatgtgagtagttgggggctcaagtcttgtatttattgtattaacaaatttatgcttcttttactatggtgttcaggtacttcaggaactgccccaccaaaggactattccttagaatcatccaagtcagcaagagttttcagtgccttcagttccatctccatactagcagccattttcgggaacggaatattgcctgaaatacaagtaaagacagattctttggagcatttcattagttgtaaaacccctgctgaaaaatgcaggtttgaatttgatctcatctaatttttgtgtatgtatgaaacataacaaacatctaaccacaaaacagtttatcctaaatgatttgtagccatattgattacttactttttcttcattttaacttctcaacatgcccatcaatatcaatacaggctactctggctccacctgctactggaaagatggtaaaaggacttgtcatgtgttacaccgtgattttcattactttctactcggttgcagtgtctggttattgggttttcggaaataaatccaactcgaacattttcgagagcttaatgccagatgaaggacctgctttggctccaacttgggttcttggactctctgttgtctttgttcttcttcagcttcttgccattggcttggtaaaatttacattaagttattcaaaattttatgttacatctattaataatttctctgcaatatattgcaggtttactcacaagttgcttatgagatcatggaaaagaaatcagctgacaccaagcaagggattttcgcgaaaagaaacttaattcctcgattagttcttcgaacaatttatatgatactttgcgggttttttgcagccatgcttccatttttcggtgacattagtagtgtagttggagctgtcgggttcatccctttggatttcgtcctcccgatgctcctctacaacaaaacctacaagcctccgagatcatccctcacttatttgatcaacatttccatcatcgtcgtcttcacttgcacgggattaatgggcacgttttcttctactcgaaaacttgttatggatgccaagaagttcaagctctttagcagtgaagtagttaactaggctttgtatgttcaccctgtaacttaaggctctcaaaattggtctttgtatctgaaaaaaaaaaaaatggaaattccacattttatggtttttatacaatgtgtgtagaaggttaaagaaatatgggaaagggtaactggttacctattgttttcaaaaaagttattttatagaaaccttgatattaattttaatcatagcattcaaacaatcataatgtgtgtagaagttagttagtaacaattgacggggtgtgcataaatcgattcaatgacgtctacatccaatgactctgaatagtatcatactcaaaagagatgtattgaattaaagtgtttcgaatagctaaaacttcaacaatttcaagaacaaaacaaccatccaaatattaatttgccaagactctatctactctgaaatcatcacgaatcattatactcaaacagctatatttgtctgtcgaattaaatattatagcgtttgtattcaccttgaaaaaatcaaaaggggaggagcccattttagaattggttgtattcactatgttattattagcaagattattatagaaatgatattgtcaacttcttatatttcaatcttttctatattttcctatccaaaatttatatggaagatttttgtttttttttttttttttgagtaatggtgttcgtttagttatggcatcctttctataaattttagaaaaaatatgaataaagcttatgatatttttatttactatatttgttcaataaaaaaaattgtcactataaaatttttttaaagtaaagttacatgtttgagtagctagttccaagtttcatagtatctacaattgaggtaaaatgaattttttataatttaaaatattaatattaggttattaatataaacgtgtcacgtgtataagagtgtatacaatacatacatatagttcattatggcagttaaccggatgacatcttaaatttactaacagttcagtagtttgaaagattttatcgctaaaatttaaacttaataaaaggtcaagtataaatgaaatgatagttaaaagaatttagccgttaaatttatacctaacattattataatattctactaaattaatctacactttgattgcgtgcccaatgccaaattgttataatgaatcccaaatttataatataataataataactaattaattgcttatgacttggtgaccactaattaatacaacctgacaaaactataatacaactaaaaaaaatattaaagaaatgctaaaaggaattagtagtgcctagcacttcttatgtgtcaatatcactattaatcaaactaagtatcggatcccatataagttaatataatagcttttagggagtatagctaaccaatcttacatgtaataatttataagaagtattgctaatcagatataaagtgacacatttagaaggtgctaggtagacactaataatagtaggataccctgatctacaaaataactctctttcattatataatttaaagcattgctatgagacacttatgatgactagtactacgataaagtgttataatattattggctaacgattttttataata

SEQ ID NO: 36995 - DNA, 4067 bp, Cannabis sativa
gcttccctaaacaccaaaacaaagttcaacaaattcactcactccttatcataaatggtcatctttttctctccaaaaccaatcatcacttcaactcaaaatggaaaattactcttctttacaatgctttgatcagagcccatttgagttttgggcaaactcacaactccttaatcctctttacccaaatgcttttccaccaaactcaacccaatagtcacactttcccttctcttgttaaagctgcttctttatgttccttgccttgtatgggaaaagtcctccatgcccaagcttacaagcgtgggactatgtatgatccatttgtgccaacatcgtttgtgagtttttatgcagattatggtgaactaagttatgcactcaaggtgtttgaagaaatgtctgaaccgtgcattgttgggtgcaatgctatgattgatgcttattgcaagaatggggatatgggttctgctagttccctctttgaacgcatgtctgaaagggatgtggtttcgtggacgagtgttgttaacgggtttagaattaatcagcagtttcatggggggattcaatttttcaagaagatgattagttgctcggtgaaaccgaatgaagccacgtatgttagtttgttttctttgtgttcaaccttgaatggttggggagctctttatctgggaaaggaaatacatggtcatgtaataaggaatgagattgagttgactgtgttcatgggcacttcactgatagatttttatggcaagtgtggtttacttaatgctgcaactaatgtatttaatcaaatgacagttaagaagatttgcacttggaatgcaatgatttctgctctttctacaaatggtcaggtgaaacaagctttggacttgtttcagaatttggagaaggaaggatttacaccaaattgtgtaacttttgttacgattctcgctgcttgtgctcggggtaaatttgtggagtatggcttgaaggtgtttcaatcaatgtcagctgactttggagttgtgccacttatggaacactatggatgcattgttgatctcttgggtaaagcaggacttttgagggaggcaactatgtttgtaaaaaatatgccttttgaaccagatacttctgttttgggggctctttttggagcttatgctattcatggaatcagtgagttggaaaatgatgtacaaaaaagattgctttgtatgcagccacaacaacattctgaaccatacataaatttgtcaaatataaatgctaatatgcagaaatgggatcatgctgctggttttagaagaatgatgttacatgctagtattcaaaaaaatccagcagttagtgtgattgtttgaaattgattcttttttagttagattgtgttaaatatgtgatatgtttcatgcaatttcaagctcaggattttgttgttgagcttcattgtattttttatatatgaaaaaaaaaaaaaaaattgagaaattgttttgttttctttggttatctcaatgtagagggtccttttatggccatggcaaaaaagttgcagatctctattgataaatgatggcagaaggacttgagccaaatgaaacctcatttcgtagcatggaaagagaccacaaactcaggcctattgataaccactatgccagcttcgtcgatcttctaagccgagccaagccgttcgttttgaagaagctgagacattggttaaacaagtggtttttgaacctgtaagttatttttattaccaataatcaatacgactggctattgcatttgggcttttaagcacaacaggagctggaagttcaactaggattaccaagaactgattgtcaatgggaattgctcttgtaatgattatttattgggatattgttttctgttgacttgtcttatcataaaaatccaacaaagcttatatacatgtagataatcattagcccataatttagttacctgtatagaaataagacaaatgtcaaatatttctactaactgactttcaatactcctatttttgtcttttcattggtcaaagatgttcaagtcaatttaacaagtcaatctcaaaactttctttagagctaaaaagagtgattatagtcaatcttaagtttatattacaaaaagaaaaaccagactcagtagacttggtttttcctaaagtccatactcgattccaaactgctcaacaaatagataaactagctagaatctacactccaatctccatatgatgttcaacaatctgtaagatcatataatcatatgatatttgttttctatgctagaaaagagtctatcatagttaatggccataaaatcacatggaacacacgtatgagcagttaccatgttctatactcgcttgagtatccacaatcactgtcatcattgaaacccaagacgggattggaacaagcaaaggataaagcatggccttccccgagaaacccgtgatcaggatcaacaataaatccacacccttcaagtgaatcttgaggtagccgtataactttaatctgctcagtacacctttttgccaactttcctttgaaattgatattgagacattgacgcaggtcaagtgattcgagatgaggacagccatcaagaatggcttctaagcctttgttggtcatggagtttccgatgagctgaaggtggcgtaattttgggaagttttcgccaatgatgaacacatcccagttaacatcttcctcttcatcaggatctatgtctgtgagtctataagcttgagtgttcaatttcaaagttttgaaatgagggcaacagcgccccaatactttaagaggattttctgaaaatgagcatagagtcagatcaagctcctccaacaatggaagcttttcaatagcatcaatcaagccctcatctgaaacattataacaagaagcaagtcgaaggcgtttgatctgacttgagctgttgaaaagttgtaaagggaataaaagtaagcactaatcaaaattcagaaaaatggaaacttctgcactaaatttcattatttgctattcaaatatagaaatgaaagcttcaatgctcatcaaggacaacacaaaaatcaaaacactccagaaactttttctaagattcttgattgaactaatcaagtggagaatcatcaccaaattgatttcctaaatatcatgaattgacagaaaagggaatacctagcagtgatatagtgaagaagctcatcagttccaaagtactcgatgttaatatcaaggagttggccatagctgcgatcaacaacatcgcaacacatctgttcgaggtccaaatccgaatcaggatcgccgtcgttacgcatatcgatggttcgccacatgagagggtctttacagatatcaagccacgatttgcagaccatctgaacactggtcatgatttcgatcgcgcccagccgaaaaagaatcgacgcagtcaaatcccgcggcaacttcagccagttgggcgagcgtagttttttgggtgagcaaggcattgtgattgtggttgaggaagaagacgccattggcgatggagaagaaaatttgaattggaaatgagttttttttgattacagagagaagaagaagaagaagagaacagtgatagtaaaaaggtacaaacttttggacgatcaacgtatcatatactggtaggtccacgtgtcaagcttttttacttgtccaactttccacgtgttctactgttgtttttctgtctgatccacgtgttggattatcattggcagaaaaattgagaaagaagcctcaaaattttgaaaattagaaaatgtggattttatgagttttgactcttttctaaaaaaaaaaataaatttatggcatgttaggaagacatgtttggatatcaatcacaattatatttgaatttttaatgttttggtttagcaaaataattagggtgtgtttaaaaatgagcattgttatattaggcactagtggtgcctagcactttcttgacatgttacgttgcaattggctagcgatactccctaaaagttatcatattaaattata

SEQ ID NO: 36996 - DNA, 5004 bp, Cannabis sativa
aaaaagaatttagtgttgcaataggcccaggcccataattgttggtacagattgggcccagtccaaaaatccgtacaatatttatgcaaaaaagttcgaatttggcgctaaattcagaaaatttcagacgaactaaagaagaagataattcatgtattgtagctaagcacaaaaaactggaagaaatttttacatagaaatgaaatcaaagcaaactcctttcagagctgttggtcaaagatccatcgtttcttcattgctcaatccttcttctaaaccgtaagattaactcacttctttcttaattttgttattgtttttcaatttgatgtgtatggttatggaatttctagttctagggttccgaaagagggttgtaagaatttagagaacgggtctcgtatttctctctcggactttctccaacggaagctcaacgacgattccggactccccaagactgtcaaagtactatcttttcacttcatctttcgttggagtattgaatttttgaatttgaatagatttagtttgaaattgttgatgaatttgattgaagttcgatttgttgatgttggagttaattggtgtgatttttgacagggtaaagctaagcctttttcttctttgttgggactcagagatgggtctgttgatgaaaaaattggggcttcgaatgttgttgagaaagtggttcttgaacaattcaagcatatagaaactgtaacaaaagatgatttggttggttcaagtagtgatattggcaataatggtgaagttgaaaatatagcttctgcagcagaatcaagaaagaggaaaagctttgaaggtttgtaaattgtaatctttttcctgttatttaatgttttccttctattgagcgtttttcttttctagcattagaaatagtttaaagacctaagtacctaaccaatacaactctttaacctcaattgattgacactgctgaagtttagaggagaagattgtaacaagccttattgagatagtatatatatatatgagagttttagaagggttttggaagaagaatttgtaatagagctaccgctcttggcttgggagagcaccgggtttctcgaatacccagtaacactgttatcaccaccatttagatcaatatatcatccactattttcctgtattgctaggagattcctatcacgagccttatgttacaaaagaaaaactcagtaaacctatggcattactttgttttgattgattggtgataatctggctgtgtaattcattttagctttgggagaaaacaaaccagctacgaaataatgaagctcaaaagggtgttgaatgtaattgctccgagtcttgcatgattttgtgttgaattatcatgcttgttaatggtagataccatatcaagataacaaaggttgaccagatcaaaccgtgtctgttatcgtacaatgtcatgtgtccattagaatggtagcaaaaggtaggtgtgagagtttgctacttgagctaggcttagtggttgggtgcaggagtatgtttgcatgttatttggagttcaaatcttgtaatttttcttgcattgtgttccctatctgaatagaaggacaccctgtgatgatttctaacttagcaaatgatgcatgagacagaagtaaatgttatgtaagaggtggaccttagtacatatcacatttgctatttagtttgtttcgttgagcttaccatagaagtttttcggtgaagctacttgttatcatttttcgtcctactttttacctgcaatgctgtgctactttggcctttaatctgaatttactggtgggaatttactatgctggatggatggttttctgatagaacattaaagttttagccttagtacgaataacggtagcaatggtcaaacaccgacgaattatgatagggacaactccatgtaactccctccacatgatccaatttccactacatttagctacagatatttcttttcttgctctctaattttatctgctcttttgaatctgaactcacaggtaggaatgagaagcacattcctcgaaaacaggtggtagttctaggaggaaattcaaaagccaagcagcaaagaagggataagtatatcaggaatgagaaccaagttcctacttataatcactgttagtattcacagccactaaattaaactcttcacatcacttgttttctctttatggtgaataagagtgtaatttggttcttgcaactttttcgggttgttttgcagatgcaaatggtggtggctggtgggactccaacatggagggggttgacaatgaagaagttggctttagtgaggtatgggaaggagttggttccacaacttttggagggagtctagattggcattgatcttcaacccttgatcttgaaatgtccctttactaccatatcatcaccatgtttgaactttgaagctcaaagtgattgactatcagacttttccaatggtgctggtgctttcattagagccttagcctgtacataactgctttatgtaacaatatcgtcttagtttgttcatggttgaacactaatcagttctccattttagaaggaaaaatgatgtaaaatgcactttttttccccaaaactgtcatcaccttatgaattagtaatttatttatttgtttttttctaataaatcttgcaattttatgaatagcaattagctagaataataacatgcaatctaatcgggacatctccccgttggaaacaggattaggattaaaattaaaaaataagttaaataatcagccgcgtaattcttgaattgtttgacaaaaaaaaactaaaaataaaataagataaaaaaagttatagcatcacagttaattttaaaaacacttataatcacaggaaacttattattttcaacgactaacaatggtttgatgacaagttattaaaggaaaaagaagaaacaacaatgaaacaaacaaaacaaaatcatattacacaaacaagaccaaaacactcaaaattatgtcatagaggcaagactaaaatacttaaaatcatgatacaaagacaagactaattgcagtagtaaaaatacaattgcaattgtaaaacacaactccaactaagtcacacgagaaggatggcgagcctgaccatgaattagttatttttagttcaatgtgaatcttaattcaagtaaaaccattgtaaaaataaaaataatatatggtttaaaagtttaaaatatggtgatatgtgaatgttaacccaagcaaaaatctcaatagaatataaatagcccaaaagaaagaacatgaaaaatattgacttgaagaaaaagactgtttggggtgagagaggctcgaactctcgacctcaggatcactcaatgtagctatgagacctacgcgctagccaactgcgccaccacccctatgtgatatttcatttcacataatgatatctatttttaaagtttaaaattagttttagatatttatcattttgggaaacaaatcatttgttaaatttccccttcattcaaattagattttcaaatatttaaaataaatgttttaacatgaaaaaagaacacaaattagacaattttgaaaaggaaaaaaatgttgcaattctttatttttgttgttcataaaatattattatgtgtgattcatgagaatataatagctagactcaataaaaagaaagacaatacaattttttcttattaatagggttgaccttgaggtgagacgagcaagacgtgcgccttgagccccgaacgctcaggccccgtaattgaaaaaaaaatatcagtattatttaatgttattttaagttaagaggttatgagatcaattcttaacctgtaaaacaatgaaggatttttgcaattttttcaaaaatatttaatgtataactataaaggattcttgaaacttttaaaactaattttaaatttttttaccactataataaaatacttgaattattattttaaaaataattaaacggacttcaaaattaaattttgtcaaagaccacataccattgccctaattgattaaaaaaaaaaatactctctgttttttctcttcaatattaccaagatgaacaaattgctttcaaaaaatatataaaataattaaaaaaaaaaaaaaacaaattgattagagcaaagataaattttgaagaatattttttaaaaaaaaaatgtcaacgtacatttttgttgacaaagggttcaaagagattctctacaaataataaataatttaattaatcaaagtaataaaaagaagcttgtaaaaattatggattaaactatctattttgttaaataaataataattcgaatcttgtattttttaaaatagtacaaaatagattatgagttaaattttcattaattatttttcttaatataatcaacttgaaactaatttttagcacaaacatatgaaaaaaatataattattcatgtcataacactttcaaatttggttattattaagttttaatttgaccaaaattaagctcaagatctattttgtatcattttaaaaaacacatgatctaaattgtcatttaagaagagaaaagtgttatcgtcaattgtgaacctcctattacaagctattagtcaatctccctgttctaaaacacataccgtaataattttttcaattttttatagccgtgtttgctatagttaattatttttatttttgaaaattttcaaataatttacaatgtcctaaaattgtttaaagtcgtttgaacacatgtggtaaattagaatttgtggaactttgtaaactatttgaaattttttaaaaatttacaatgataatattgtaatcataactgttgcccctgtttttgcccaaaatacgtggaccaatgcgaccacgacacgtagatctgaggagtatggcttcggtataatttgactaagtcttttaaaccaagaggatcagctaaagagatacctcc

SEQ ID NO: 36997 - DNA, 5867 bp, Cannabis sativa
  modified_base (5268)..(5297): a, c, t, g, unknown or other
accccgaatctgttggttattagacggtgatggggcagggatgggggtataaataggtagcggggatgggggcgggaattgcattccccgtacattaatcgcccaatgtccatctctagtagtgagcttgagaccaatactctatatttatataggtgagacattttattaaaatttctgccacaattaattatcaaaatatttttgacaattattaagtaaattaaattgagtaataaatttaatgattatgataatgatgaccatagaatattaaatcaattaattaagaataaaaaacagttataattaatataattactaattataatattacaaaatatataagttatgaactatcttcattttagagatactatatgtaggaatcagtcaaagatagcaaagatagcagtaaccaaaacttaggataccgtcttaatagtaaagctactaatgatagtttagattccagttcaaaaaagtatgacaaattttgtaccaaatacatgcagttgttcatggcccaataaccacacaaggtcattgtctcccatttattcatgaatgatatgaatccagtttgtatataatgctccatgattcaactccttggtcccagctcacaccagttatttacactatttcaagctctgataatggcccatggagcctccggagtacgaaatttattatgagattcaaggcatcatcatataataaaatcatcaggaaagagaggttcatattccaaaattcttctacagtgaatccacatacaatattatgcctgacaaaactcaccagaatatacacgcatgccaattcttatgcagactgccaattttttttatcgtgctataacagatgtttatgaatattcaaatttgctcaattatgataataattgcctatgagtctgacatgataatctgaccttcaaaaacacaccaaatacatcacttaagtggcagaataagcacttatttctcatcataaaacatataattcaatcgctaaacttaagtcgcaaacaaaaaaaaaccaaaacaaaagggcaatgtcttttagtgggaaggctgtccagacatgcatggacacagtaatgaaaatccacaccccaagcaatgatctagtcctctgcttcttctcatgttcatctctgtacctgaacatggacttgaccgaggaggagctatgcagccatcaatgaaaagtgtgtttgtttcagctgttgactgagccatggcaagctcgtctggtccataaaaactagtttgcctttggtcactcctacattcgttcgcagtttttctctcaactgcaagaaaatggcctagagatggtggtgcagcatcattggaattctcagcaatatcagaagtgtcacttgatgaacatatagaaaaacaccatatcctcctggtcctggtgttgctgctcttattttccttagatggctcactttttcttcctctgattgatcttctggacagctctagaatgctattaactccaataagactcccaagtgtgatactcttgtcatggaagaaagaaccagtggactgaaaaatcaaccaaatcccttgttttcagtactaagtatcaatttggacagagttcattcattctttatccaagttttggtaaaaggaaaactctggattaattagtaagtcatgaacttattatgtacttttcattatttagcttctttttctttctaaaagtgaattatttagagcagaaaatttttcatccctgcacatgctaatctgatcagggtgcacattctctactttattttaccagtaatatcacagcattgtttgggcatcttatacaattaccatgcataacaaatttctgacaacacaaaaagaagaggttaatgaaagaagaaaaaggttcctattgccaaatttaacgtaaggtatctttcacatgcctctaaaacatcatgtcagacacatggtgcgcaacactgaaaaagtcagtatgtgatagctttgattactgaacatagcttaacaagacacaaaatctaatacaatactatggtgtgatcacaacttgcttatattaataaatgactgtatatgaatacacacgcccacacacaccttatatgcattattctggtcacatggagcgtaggaaatggtggactccagtcctatcattgttaatctcaatttggataaggcttgattatctacattttttaattatatgtcactatataagaggacaaagctacagtttccaagttaagcttcgaaatcatcaagcattgtttttgtatttttcttctactattttcattttcatcttgcaagatgcatattatatgtaagaaaagaacaaactagtaagaaacaaaatgatgagaaaagtacactcttttttactactattattattgttaagatatgtactagcttgtagctagcacaaaccagtgtaacatttactaacctcagtatctaaatctgaggaagaatctgtagaacatgttggagaaccagtaattaaagtgttgaatgatattgatcctgaaaaatctctgtttctagctaaaccaactcttgcattaagtggctgcagaccaagtggccacccttcctcctgtaattagtgataatatcaataattataatacacttgattacatttacatggacaaaaattcaaacagggttcatactattagctataaagaaacaagaacaacgtaatgtagtgactattgactaatgaggtaaagccagacccacttcccagataaattataggaaaaaaaccacatacattagacccacctttgaaatcccagaatgaaaaacaaaaaacttggtgagaaaaccagaaaagaaaatccaaatgaatgggatagaagacaaaagatacctgctgagccatgtgtttggacggtgatgaaagtacttttctttctgttctaattgagaagcctcactgaaccaagtccaatgaggtcacctcatctcatctttcactatctcaggtacaaggtgagtgaaaaacaagtgtcatatgtttagtgttatagctaaatatataaatatgtatatatatatatatatattatgtgaatgtgatctatctatatagtaaggatggaactattacagttctacgagagaatggagttaataagcagtggctaatgaagtgcgaaagttataaatattgacttggtcagagcacaatgagagtaaaaaagaaaaacaagtagaggttgaggaagaagaagatacaagtggaaaataacaacaaaaacttgactagttagtgagaagggtcatcatcatatgtgaggattgtttttctactttctttctctttggttttgttgactataaaggtgaaaggaaatcattttgttaccaagaaaaaatacaaacaataatatgataggaaaaacaagaaaagttcaaataagtttgcagaagctgtccccccaaatgacaaatgtagcctattgacggaatagttaacacattcatattttatccctccatccttctcattttttttattctttggaaaccatttctttatttatttattttttctttttttacgaagaaaagaaaaatgtttgtgtgatttcatgatgagtgtggagaagaggatccaataaagtgtttatacaaactggaaaaagttaataagtaattttgctttgttgctttgcctttgataagtcttaaaacattgattagattagccttgatgttgggcccaaaactcttttaactgtgttaccaaacccaaacttttatcaagtaggcccacaccatatgacctagatgacttacttttctttgacatcaatgtcattgtcaatgttttttttttctttttttccttctaattcttcctcaaaaccttcctttttccagctgttcctaacaaaatacttttcctttaatattatcattgcagtgcatcccttcaaatttacaataaaattaaaagaaaaactagatgttgaaaaataaaataaagaaatcttattacacatgattagaaaattaggtgcttccactttgcagtgtgggtgtctagtttgaatctcttttgtaaataataataataataatatcaatcagtacatgggtctttttcttggagaaaaaatctcattatgtataatttacatccaagatttttttctgactcataaatggtgttaaagaatttcgttagctcgttaaaacatgttataaaaaacttaaggatttgtcaacaagagtttatagttaagttgtttgaactttgaactagctactcattattttggaggtaaatcaaagaatatgttatgtggagctttaaagtaaatatacttcatctcaaacaaattttgagttatttttttggttgcatatattatgtatgaaggggtaacattattaatttttatataattttttaaaataatatgagaagttaggtgtacaaacaggtcagcttaacatgtaactacaaaattttttatgttttttataatgaaagtttgacatggttcatataacatttttccatataccttgattcttcaaaaatgttttcatcattatatgtcacatgttgtcatctttgtatcactaactcgctatcattttggcttaccaaaaaacaaatcaagcaatgagttaacattattaactatttatacaatttttctttgaataatatggtaagttaggtgttcgagaaatagtttaagatatatatatacatacatatatagagagtttaattagtaagtgattgaaaaaaatgtgtaagttatcatttttaaattgtatcatatttgaaaaaaagaattagctaataaagaaaaagaaaattgtgcgtttttttttttttttgaaaaaagaaaagaagtgattttagggttatcattctttaaatatttgaattttttttttttttaaaaaaaaaattgaataaaaaatgtgagttatcatatttgaaaaaaaaaatagctaataaagaaaaaaaaattgtttggtttcaaaaaataaaaagttgattttagagatattttttaaattatgtgatatttgcgttttaaaaaaatttaaataaaaaatgatgtacgacacatatataattaatatattaaaaaaaagttaaaaaagttgtgatagatttggagttattatttttttaaaaaaaaataaaataaaaagtagtgataaatatattgatgattaataataataataatannnnnnnnnnnnnnnnnnnnnnnnnnnnnnataataataataacaataacgtatagtatggtattatatatagtaaatttttaaaaaaaaattactattttatgctaaatatttttatggaaaatttattaaaataatagtaatatatgaatttgcagatttatactctaataaaatattaaaaataagagaattaaggaaagaaaagaaaaataactttaaagagattttaaagtgcaatatcttcgcctcatatagatatatagatatgttaatgattgataataataataacgtatagtatggtattatatatagtggtttttttttttaaaaaaaaaaatagctattttatgctagatatttttatgaaaatatttttaaaataatagtaatatgaatttgtagatttatgctttaataaaatattaaaaataaaagaattaagaaaaaaaatagatttagagagattttagagagtcatgtcacccctcatttctctcctttatatatattgattttaggtgcataatgaactttaaaaatttatcataaatttgtggtcgggttacctaggaccacgggtttgtttgattccat

SEQ ID NO: 36998 - DNA, 9803 bp, Cannabis sativa
  modified_base (3319)..(3328): a, c, t, g, unknown or other
  modified_base (7299)..(7317): a, c, t, g, unknown or other
ttacatggtcagacaaacatgccaaattgtgtaattacctccaattacacacaaatccaattacaatgtgactttccaaacgcacgctaagtgttttataaatgctaacagtctattccacatatagaaaaaggccaatgattgcatcaatttgaagtcattcgatggagctctcgggatgtttaaaaatctttggccacgatgataatcagttctttatttatttactaagaacgaattaaagagaacctcttagtaaagaactcaaccaaaatttgatattttcgttcatcttttacttcccgaagcaacaatatattattattaattaatcatgccgtgttgtttcatccagctaaaacacaatttatatttcgacacctctagtttttaattagtttgtacacttcatgacaagagtaattaagctgtcgcgccttaataagaagtatactgttacaaatgtagaatttagttaatactagtacgggtattgttaaaggagaatactgtccatcgacatgatattgttactgccgacaactgatatatacagaacaatatatctgtaccactgattttccacaaggccagtatgtgtttttggtttattgtggtatatatcctcgaattaatgtacaaggaatagaagaatatacatctatacatgtcatttttaatggaaattaaacacgatattgagtacaaagttaggaagaacactgtattagaacttatctgttcatgtatgtgcccctgcttataatatgtgaaactcttattctctaatcaaatttttgcattatcatctgcatttaaacattttttcacagtgatatatatcgatgtatgaatgtataagcattttttttaggaaatgtaaagtatgcattgaagaaatcgcatatataactccaagatacaaaaaagaggatatgggtcatcctcaatccaaactgcttcccaaactaaacctaaagggtgagcctttaatattggtaacgtattcttgcaaatatatgcttctgcatttaatagcatttaaaatagtaattaattgtgtgtgtgagagtcgagagagagagggaggcagttcaggaaaaatgcaaatagacaatttttttgcaaaaatacatgtatgtacaattaagtttgattatattattccttggccaaattctctttgtttgtcttctgcttttcatcattagaaccaaacaaagttagcttttggctcaacaaatcgaggctaattgtacggtataccacttaattaataatgtagatgaaaagtgtatatatatttatatataggtagagcaggtatggcccacataaatttccgggaaagttcaaggaggtttcccatgtaggtaaaaagaagcctagctaagtagcgatatatatatatatacacacatatatgtttgtgtacattagtcaccttcaaattatatctcaagtattgtttattaagtgtatatataaacaaatgcaattatcaatcggaatatatttttcgaaacattctgactttatcttaatacataatataatgttaactgtgtctagttctagcttgaattttcatggtccggtcccgcctcatgtcacttttgagtggacactagatttttactctacgtactgctactagctagtttagttaccttaatattaatattatttgtttttctgttttttttttttggcttattcgcttgccaaagctcttaattattagtggcattgtcaagttctccatcatgatagaaaccaaacatattaaaagtatgctcatttatactagtgatgatatatatttcagatttattgtacttttgattaattagacatttatttgcatgcattcgctaatctatccaaaaaacaaaaaaaaaaaactcacagtgcaacaaaaactgaaaaataacgcacttattggtcttttattatgtgcttcaatctttcattagtcggtggtcttattttttaatttttattgaatgattattgattgataatcaggtttctgtgataagataaattgatttgaaaacttagtgtatttcacatttctttaatgtttgattgctggtggtaaatggcttgtatgtctattttcaataattttctctttggactataattttaacttttgtccaatttatttgttaatagatattgtaattttctccaataataataataataataataataatagaaaactcatgagtcggaaaaaaaaatgaattataatacatttttaggataatatatatactaggatatatcattaatctttttatcattataaaagtgacttgaaaatgtacattcaaaattatactgagttacaacatatgaggtggccgtgataataaatataaataaacgcgaatgatatataatggaaactagtatcattttaaattttaataagattaatttaccaaaaaaatatttaagtttatttttcagttattagttatacatttcaataaaaaaaaatcggttgttaataaattcttacgtttaatttttagccgcaataatatttaaattataattttagaatttatgtaagtaactagctggtcaaggggcaatccctaattggtgctgattaaaaaaaattaatttaaacttatcaataaaaaaataacacttagataattacaataaatttaggtatttatttaaaataaaaaatcaaatttaactatttatatcacaaattattttttaataataaagaaattaagtttgtttattcaaattatctaaagtctaaattgtgaaaaaaaaaagaactaattaattattccctaaaaaaattaaaaaaaaaattgtcgaattaattattaaatgttcttttaatcatgatcatgataataaaacaagtgaacgggtaatgttgatagctatttgtgacaatttattgcgaaataaattcttcattgcttctgagggttaaccctcctaaaatagaaacaaggaaaaaaaaaaccttcttggatccagctggctgctgatgtatactctctttttggtagcagatggtactgtcaaaacaattagctgaattgaaacaatagccacacacaatatccatatgataatacgaaagaaaaagagaggagttttgggacaatcttagtgattttattttatgttattttattttattttgaaagaatcagtgattttattttgagagcgcaattataacattggctaagacagcttccattcaggagacagctttcagggtaacgccctatgttcatctcttcattctttttttttttttttnnnnnnnnnntattattattattattaacaatgaaatatagtataccacgtgcttaatttttatcttttctatatgtgttaactgcattttccaggaaaattccagctccggacaaaaggtaaataatgcagagatgcccaaagtgaaagtagaccttgaaccacccgtgccttccacaattttctctgaaaccaaacagatccttacattggaaaacttccaatttttccaatacattaataacattttcacgcctctccaatttttttttccaacatacattgatcataggtgagcggaaaagggcaattcggaatttcattccatctcaaggaaaaaaaacacaaaaaggaaaaaaagagaaagacttcataattaagctccattagactcaaacttaaattcaccgaaaactaagactagatatgacttaaaacagatgttatttggctaaaatcctccataaaagttggaacctactttaagcccatacgtacgtacgtagatatacttgatccggtcccttgtttttatttattctttttttctacccacttgagaaaaagagtgagcttgatgatcctgaagaagctgtagtcgtctggtatgatctttgccgaaaacaatcaagagaaattcgaggaggcgacagtgtcacagtaactgacgacgtagattgagctccagaatccggcggggatcctacaaaattcaaacttagctcagtaaccaaatcccatgtgattatgtatcattgtcagtatgcaatgttattataaaatatgtagttgtaattttgataattaaaaactttaaagagtgcctatgttcatgtgcaaaaatataagcttacttgaaacgttatctaaagatggatgtcgggtatttgaatcgggttgtgaagactggttgggattttcttgattaattggctgctgagtttttcgccggcgacgattgtgatctgccaatctcttccggcaactgcgtttcccattatcaaactcagaaaggatatggaatctgcaagagtaattaacagaaattaagttaaattatagttaaaagataatgtatttaattaattagtaatattaattccttatcgactgttctaacattaccatatgaagtaaaataagattataaacagtacgtaaacggaaagttgtaattataaaaggtttacggacacaaatgccctcgggatttccacatgtacgggggaaaccaatcattaggacgatgattcatctgcggggacattctcgtcattctaacagttcaactatctccggaaaacaaacagcgacagccgctggcttttttcgtaacataacaataacatttaggagttctaagcttatgagaatgaattacgagcaaacacgtgggtgtttttgtcatttcataaaaactgactgagtagcttagaaagcaaatcagacgttttattaaaattaatatgcttaacaaaaataattaaatataagtactgaaaaggcttccgactacgagaaagaagcagaagaacacagagtaccgtaaaaacggaaaacgtaggacaattttacggaaggcccatcgggattataacctcctaaaagcaatcattggcaacggctagaggacattttagtaattttataatcgtcattctcagggttttgggaaagtgtgggagatgggtatttctgtttcagtgatttcaaaacaacaacctgctgcactgctggcaaaatcgctgagtcaacccagctgcaatgacggtagaagctttggagtggaactcgcagaccttgtggcggcggtggtagtgcttggcgtgggaaagatcagcattgcatccctcggcctggcacctaggtgagtgggcggagcctggatcaagcggcctgggcctccggtacagcctgctcatgaagtcgtcctccgaagagaaataagttcgtccacccaaattcagtccaattcttgatgagaaatccaccggcggacggcacatgtcctcgctcttgggcaccaacatgaacccacccgatccaccgtgcccgccgcctcctcctcctcctcccccaccgagtacggtgtcgagggaaagcatcgacgggtgttgcggcgcgtaggaagacgcgctagggtaggagcgtgggtcgtacaacgatgggtggacgtggtgggtagagtggacttggtgttgggaatcgtgatgatggtggtgattctgattatgcgtagctgtagtgttgaagtggtggttagcgaaggtggagccgtttgttccgagctgaggagccaagaggttgtcgctgaaagctgtctgagcagcggcggcgttagcgtagttgtcgagaatgtggtgtcggttagggtcggatccaggagggtgttcctgctcttcgcccgtgagcatcatcgcagacactcttccccattcatagtctaacatcctattttaatttctttctataaatatatatatatatatatatttaactcttcccgcagcacgagctagcctcaactgtgtacgacgtggtttcaacctacagcgaaacaaaatgaacaaagacatatccataaaatgaactaagttaccaaatatagatatttaatttacgaatatgcacataatttccattttatatagcttcgtagttgtatttgttgtgtacaggaacagctcaaagtagactcaccaatatataaccaagttaagtagaaacagtgacagtgagatgataataggaagaccggcgccttaaactttgtgctgactgtattctaatacgagagtacgtttagacaatgcctttcacattcttctctttttctccctaaaaactgcccctttttttttcttctctctcttcttttcttactttcggaatggttatgaggaagctagtttaactcaaactgggttatgaggcagctatagcctatagctgtgggtggaagagggtattggtatcgaaaattaagaaattgtgaaatgacaaatttgcccatgtgactggtcagagttttacctgagaaaaccactagagtaatacgagtggaatttgagggaaagagagtttccattctaagtccgactggttaggaggaggaagagtgagaaagtcctcgtcaagtccttctctctatctctgttgcccacgcggttggggttatttaaaatatgggccccactagctgttttgcctggtctagtttcatcaaccttgtgcagctaaccagatcatgatcatcacagatggttttttatttttttctttttacttttattttctcttacaactgttttcacagtttcattcaatttatttctgagatttttttttctcatttactttgaaaatgaccgttgtagaataaatattattaggtttcacttatattgatagccaaaaataaaagccggcccaaactaggctggattgcgaatttacaattacgagtgagagtgaaagtgttatagttagtcaatttaggaagtgaaaatttcccaactgttcaaattagacacttgtttggtataattcttcatcacaataatatcttttctaattttatatacataattgattggaacataaatttatacgtgttagaaaagatatactctgtttatcacccatttcagattgcaataaatctaatgtgtacggaatctgtctgccccttaattttactttttttttaggctaattagtaattttgcccctaaactttgacatgtaccaaatcgtgtctctgaatttttttggccgttaaaaattccccccgaactattgagattgttaaacttaaggacttttctttaatttcattcaatgttactgtttcagtgattgtttatatactaaaccatattccccagactattatatctaccaaatcatgtccctcaaattttaatatttactaaatcatgtcccttgaattttcaatcatgttagaatttttttactaannnnnnnnnnnnnnnnnnnaatttaacaatctcaattgttcaaagggaatttttaacggccaaaaaagttcagggagcatgatttggtacatgtcaaaatttagggagaaaaattactaattagccattttttataggaaaattcattttgtttggggtgagaaattatcaatttcagtttaaactgattttgattaggagattaaggctcaaagttaaatatttgctgagtaagaaaggactagtctccaacgttaaaatgtaacaatatatttatgcacatgtataatcttctagaatgttcaagagtacggtctgtgttcccctttctggtacccaaaatgggtttctagtcaccggcattgtgtggtggattctggtgcctcttactttccttctcttgtaatcattataataccatgtgcattaaatgtacatttaatgcttttgatcttctaaatcccttaatctcaatgttttcttctttcccttactgcatcaaatgcaaacttattcatttagatcatttgcagccaccaatttctcctcctccgctctttcaactcttattttttcctcactatcaaatcacaaacctccctaaagatcccatttatctcacactaatggcggcaaggcgaaaagacagtcatcgtgaagctcaaagatctcactccatcatgagatctacctcttgcgaagagaaggctactatgaccaattattgcagaagagatattattaggagtctctggttttttctatttaaagcacatcctaagcttcacatccaggtctcttcttcttcaacccctattttctttttctttattctaggaaattttcttaaaatggataacatgcatatcttgccttctaattttatgtcccttactcaagaagaaaatgatgtctttactcttcaagaaatccctgatgattctaattctaccattaatctcatgttacgattgttcactattcgtcattttagtcgcccctctctcatgaaaactcttttccaaatcaggacttcccaatgtctgtgattgtctttgagcattctgagggtttgttcctcgtcaccttttgttgtgagggtgacaaaaggaggattcttgatggatagccttggcattttgcccaaagcttaactgtctttgcctccccagatcattccttccccataactgctaatcaccttcattacattcccttttgggtccaagtgtatggaattccttttcattgtaaatcttatgagcttgctaagctcacagcttcgggtttaggtgatcttatccaagttgatgaagacactatcaaagaacgtattggaccttatctacgaggtcgatttcttcttgatgttaataagcctcttatgaggggtattaacatctgttttctcaagatgggtagggaattcactaagtggttggattttaaatatgagaggctccaagatttttatttctacagtggtaagcttgatcatacccgaaagtattgtcaggcctatttatagaaatgtgatgagagccttgtttcacccctagtccttacaccatcctccttaagggaaaagaaaaattgatggataagcttggacctttcgattacccccatccaccagccatcaccatcactgaattaccacaacatcctcccccacatgatcaaagaatgatgaacctttttttagcccaagcttttacttttactgcccttctgaaatctaccatagggccttcatttttagggacccccccccaacttctaatgttgtcatggttcctactcctattgactcgaattttactggacccgtttcttctcactttaccgactgcaccatttctccttcttccaggcccaatcctttctatatgaacaccatccaacggactctataattgtctctgataccttagaatttcataattctgaacttttgttggctacaaggtctcttgttgatgccataccttcccttgatgtaaagaccgcttagctttaatttgaaaattagcagacaattaaggtttaattatgaaacttgcatatttgaattattaatcgacggagatttatttgaattcagaatgcattttgtatgtcatatatgtaattttataattttgcatgttttctgcccgacaacattagaatgcggtgtttggctattaaaatcacaatctagtatttttagtatagcggggcatatagctagacattgggaatgtcagaaatatttgagattttagagttgacaaaaatacccctaagtgacctttatgacttttagtgtgggaagggaaaaatgatctttttgcctatttgtatttttgtccttttgtggatttaagttaagtttatataatctgatttttttttaattatatttggctgagattattttgataaaacatttattagttattcatttttttaaaaaaaaaataaaaaattatcaaaaaaacacatttctctctctctctctct

SEQ ID NO: 36999 - DNA, 1846 bp, Cannabis sativa
  modified_base (1667)..(1667): a, c, t, g, unknown or other
tgttaattttgaacagatgagatgcaagaaccctgctctttgtaccaaagaagggactatagtaacagtgactgatctcaatcctaataacagaacagattttgttgttagcagtagagctttctcggccatggctcgcaagggtatgggccaagatattttgaaacttgggcttgtagacgttgaatacaagaggtaagtaaacaaacaaacaacatctatatttatttctgtgccttttaaatatctctactttaataaataaacacaaacaaaagttgccgtttgactttttttaaaaacctttttatggtaatagtttccttgcaaccactacataactcattaatgcagtaacggtccaaaatcattattaacatatattttatttccatgtggagcagagtaccttgtgtttacaagaacaaaaatttggctgtgagagtagaagaatcaagccaaaagccacactacttagcaatcaagttcttatatcaagggggtcagactgaaatagtgggcgttgatatcgctcaggtatcggtacgttattacactacaataactgctctcaatctcaaatgtagacattatttttgtttgttttttaataaagttttggtaatgtgacacgcacaaacagattggttcggctaattggggtttcatgagtagaaaccacggtgcagtgtgggacacaagtaaagtgcctgccggtgcaatccaactccggctggtggtgacttcgggatacgacggaagatgggtttgggccaaaagtgttctcccttctgattggaagacaggaggtgtttatgactcgggaattcaaatcgatgatattgctcaagagggttgctctccctgtgatgatgggacttggaggaattgagtcaccacctctgtatagtggagaaagagatcatttttataacataataataatattataaattgatatttttagctttaggaataagggcaaatctactattatatagatatcgtgtgactgtcacatatatagttttcttttttgtttggttctcagtgtaatcttcgttgctctcctctctcttttatctctattattattactgcattgtagtatatatacaagaaagccataattgagagattttacttattaacctatttttatacgcttttttataaggttcgtgctttgagctgttttaatcattttgtaaatttatataaaaacaaattaaatttttaattaattatgaatagaattattacataaaaaaatataagttcacactttatttacaaaaatatcttcgtaaagtgtggacaacatttatactttttatttaattttgattaccaaaataccttttacactatcactcacacaattagacaataggtgtagggtggttgtgcagtggttgcattagaagaaggtttaaatcagacgatagttgcaaggtggtggctggccgaatgttgcatcagacgatggtttcaatctgacgaaagtttctaggtggttggccgaaggttgcatcagacgaaagtttcaaaaagacgaattaacaattagcaaaatatttatgcaactataatgcaatcgtaatgcaactattatgaaacattaaaaatcaaaacagtctttccacgtacgtaactctatctacatntctctttatgatttaatatgaacaaattcaccaggataaatattttactatagtattcatgtatttttttatggataattaagattttttttccccaaactttgacatgtaccaaatcatgccccatgaacttttaaggtcgttaaaaataccccctaaactattgagattattgaatt

SEQ ID NO: 37000 - DNA, 3524 bp, Cannabis sativa
gaataataatgatgcctttaagacctttaaagaatggaaaactttgaagagccctggtttagatggatttggatcagagttctttaaagatttagggactgagattggggatgatgtttcacaagcagttcttgaatttttccataaaggttgcaccttcagccttaaatgaaacggtgatctctctaatccccaaagttgaagatccataaggggcaatagattatagactgatagcgtgctgcaatacccttttataagtgtatttcaaaattgatatgcccaagaatgtcagaggttctcccaagtttgataaatagcaaccaaagagcttttgtcaaaaacagattgcttgcgcataatatccttatcttccaagatcttcttaaggggtatacaaggaaaaatattttagcaagatgtatcatgaagattgatttaagcaaagcatatgatactgttgattagaattttattgaggatcttctcaaacacctttgcttcccttctcgatttatccattagattatggtgtgcctaaaaggcacgagatacaatcttttaatgaatggaagaatttaagggtcttttaagggagaaaaaggtcttcgacaaggagattcgatgtcacctcttctgtttgtcttaatcatggattatttatctaggttgctggctcaaatcttggagaagaaagcgttcggattccatcctctttgtaagcagcttaagttggtcaatttatgttttgtagatgatttgctcatttttgtaaaggtaacatttaattcggtgaaggatgtttttagagccttccgaaacttttgtgatgcaacaggtttggttgctaataactccaaatcccaaatatttttttggaggagttaaagaggattgtaagaagagaattttggaagaggtgcaaatgactgaggggtccttcctgctgaagtatttgggggttaatctgaggccaactaagtggaaagcggctgactgtggtatgatcttagataaactgaataagaaacttaattgttgggcaagtaggaatctttcctttgttgggcgtgctcaacttatccatccagtgttgttcaaaattagaaatttctggatgagtttatttatcttaccttaaaaagtgacagtagcaattgaaaaatgttgtcgtgaatttttgtggggagtgaagggcaacaaaagtaaatttcatctccattcataggagaaggtgtgtctgcccaaaaagcttagtgggattggttttcgtgaagggaaaaatggaacttggctttgatggaaaaatttatgtgggctagtttcagtaaacaagataacatttgggttagatggattaatgcaatctatctcaaaggatcaaacttttggaatatccatattaaaaacgacatgagttagtactttaagaaattattgagactccgagagagaataagtgatcaaaatctgaagcttgctgtcaaaaaaggtagattttaggctaaacttttttacaaaaatttattgaatgctcaagaagttgattatgcagggattgtttggcatagattgattatgcccaaacatagattcatttattggtaggtgtacaataatcaacttctaaccagagataacctgagaaagcttctgcctattgcaactgacttgtgccctatttgcgagaaagagattgagactcatgcccacttattcgtggactgcattttcacaaaaaaaaatagctactgctattggttgatggtttggtattaatttgagaaatcaactatagaatgttgttatagcatcaatgatctattttgtgtggagaaataggaacctttgtgtttttgaatctaagtgtttgacagttagtagaattagtaaagagattcagaggtcatgtatagagtgatgggattgatctgtaaaagagttaaaaaaaaagatgttaattatatactttcgattatcgagagttggtgattttctgttgagtttgagcagcatttttgtgggctttggattgtatttgcttcaattgtgaataaaatattcgtctgtttaaaaaaaaaaagaatggaaaacttttattaaaactcaaactggtaggaagataaaaaagattgacaactaataatggattggagttttgtgctgatgtgtttaagaactattgtaaacaagttggtatagctaggcatttaattgtgaaaaacataccacaacaaaatgggttagatgaaaggatgtatagaacaatccttgaaagggtaaggtgcatgttgatttattctggtttcccaagaaatttttgagcagaagttgttctatctgcatgttacttgataaatcattgtccttcctcaccaatcaactttaaaaatccaatttagatgtggtcacggaagcttgcatggtatgatcacctaaggacttttggatgcattgcatatgctcacctaagacaagataagttggaacctagggctagaaagtgtgttttgttgggtatccactaggggttaagggatataaactatggagcactaaaccaagaaataatcaaaaatattttatcagtagagatgtgatctttgaggaagaaaaagtgtacaaagacactctcaagaaccaatatgatccacaacagaatgaaggaagtggtaagatacaatttgaggtggagagtcaaagaggtactagtacagatcaagtaggggaagaacaagctactggagtacaagaagaggactcaagtgacgagattcaagaagtgcatggtggtagtgaagccattatgtaaaactagcttgtaagagatagggaaaatatgagctcaagggcacctgagagatttggttaggcatatttgattcatcatgccttgaatgtatcaaatctcaatcatgaggaaccaaagacctataccgaagccatccatgaggtgtgatggcagctggaatagaataaagtaatggatgatgaaatattaattgaaaaagaatggtacttggatctcggtaagaaaataaggtgttataaggctgacagggtgcaagtgggtttatatgcataaggaagggataccaggagtagaaaatggcaagtttaaggctagattagtggcaaagaggtacacatagagggagggtattgattataatgaaatattctctcatgttgcctagcatacatcaattcgagctttattgacattaattactatgaaggatttagaacttgaccagcttgatgtgaaaacaacctttctaaatggtgatctcaatgagaaaatccatacgaaacaaccatatagttttgttaaaaaagaaaaggaagaccatgtttgcttgctgaaaagatctctatatggtctaaagcatttccctagacaatggtacaagagatttgatgactttgggtctaagaggagtggttatgattgttgtttttatgtcaagacagtaggggtgagatcaattgtatacttgctactgtatgtggatgatatgttc

SEQ ID NO: 37001 - DNA, 9880 bp, Cannabis sativa
  modified_base (99)..(101): a, c, t, g, unknown or other
tttaattccgtttataattaaagtttaatttctgcgctaattttattagtaattccaattaggggattagggtttcataagtatcttgggtagcgtgcnnnattatttagggcgttacaatgcaccaccctaggcacccaagttgacattttccctaaggcttagtgtttttttttccatcaaacgatagtttagtcttgggaatcaatcttattttgccactaacataagatttggatgcttctgcaagtcaatatctcatgtacatgtgttatgcgcaagtccatcgacacttacgagcactagtgatcatgtaatgactgcatacttagaatatagattagtggacatttagcattaaaaaattatattatgtgattaaatgagatgtgggttctattttcaagaagtaggcacttgagttataatttctcaattatggggattttattaagttttagatgaattatatatgataaacatgtattttaatattttttttgtatttcttgctcggtaacgatggaaatacaacaatttggccattagagtcacacaagtatggtttagaacctttcttttagcggggcaagtatatttaatatttgaactatcgagattagcagggttatggtatttaactattttactcttagaccttaaggttacttaagcatgaagaagagtaaaattggattctttgcctaaggttaggctttgtcttttagtggaatagtaggattttcctaagttttatttctaattattaactaaggataaaaccaatttataatgaaataaggataagttagaaaaagttaataaaatcttttctattgctctctctctctctctctctctacttcaaccttaaggaaactagaagaatgagagcttttcttctttatttctcagggaattcaacttgaattcaagaagaattggaagattaaaccagaggtaagccctagaacctattttcttagatttttgaaagttaaaggttggtttcagcatgcaatctttgagaataggttttgtccgaaccctagatgtttgtgggtttctttctaagttagattagactgttttgagcttactttggccagagaaggtgttgagcaagtttgagtttgagaactcaaatttggctcaataatggtgatttttaaattcttgtgttttagttgttgctatattgcttgaaatatgtttgttgggatgttattaggtgctctggagagttatatgaagtttggggtataattgagttgagaatcaaagtttttttaggatttctgcagaaaaatagtccatcgttttactagaaacagtgaactatttccccaggtaggattcttagaaaacagtccatcgttttggaaatccagttcaccgatttgggcagttttggaagcctcaatttttatattttctcgatacttagggaatttccacactatttaacgatagggaaactttcaattttggatttaagtttcgaaagtgtttagagtaaaccttacttattttacgttaatgtgacatagggcctttgttcatcaatcgatatttcccgtcatattggtcggcacaacttgaatctagaaacgaggtaagattagtataagatgtatatatatgtgtgcatgtgatatacatgttaaaatatgtgtttggcaattctaagaagtatgaattggtatcatagcagtacaatcatagtttcaagttaatagtacaagcatagtactggtttttactgatattcaattccattaagtataaattgatgctatcgtagcagtactctcatagtatgggtcgaaagtacaagcatagtactagttaagagtgatagtatggtcaattgtacttttaggtatagattgatgctatcatagcagtacaatcatagtttcaggtccgtagtacgatcatagtgttggttgagactgatattatggtcaatcgtaccaaatgtaggaacattcttaattcatctattaagccttgtaggtagtgtatggcacctagttgcaagtcagtaatatgtttatatgtttttatacttttcttacttagtctatcgacgcataaatatggtttcatgtgtaggtaaaggaaagacgaaggttgagctacagtgagtctaaagcttgcgggtgattgtacatatcaagatagttaggcttggagtgttcggttttcaaaaagacatggactcatattttgtagtcgccaagcaacaccttttgtagaaaacatattttgaatactattgtaaacttttaacgggatcccaaacttttataaatatatgtatttattaaaatttaagttaactgaaaaagttttaatttatcatgtttttcgataaaccctttatttagcaaaggtgtctacagtaattagaaaattaatgtagtgtgcctaatcaagtagggcattgtaatttttgttggtggtattattagagccaccaggttgttattcaccaaagaccgtcaagatatgtacagttatcattagagacaatctcgactaacgtttcagtaagcctttacttgtttagtaatttatatatgattaattaaaaaagtatgattggaagcatattagcaatatgttagttgaataattcattgtctaataagtttctatgtatgcattagtaaatacaaatagaaccatcacccaacctacatatttaccaagatttttcggaaactaattaaataagagctaaagaaataataaatgcaaagaagataaaattttttacgtggttcaggcattaatgagtcttagtccacgagtcaatgtattttcctgaagaggcttgtatggtattttatagtagtggttacaagaaaaccctgaatctgccctcttattttctcttgatggagaagaaagcttagagaaaattaggcaaagcttcgactatcaattttttgatcccccctttgcatgaaaatcaatgagtatttctaggctaaattgtgggtatggacatgcccatgatctgcctagaatttttgtaaaaaggcgactattgggataaaatacatgtaaagaactgatttttgggaccccaagaaggttcttgctcgtgtggagaagcagctggataatagggaccatcgttggtactagacgcgtgttgcccaagagtttcaccttgtaaaggagatgcctagacaaactgtcaggcgaaaaggtatatccagaggtggggtgtgcgcactaccatgttttgacaggggacaagatttgatgctctgtcaaaagagtgttggttttacgatactaaatcagatatgcagcgaaaaggtttcgtattatctaattatcattgtaccatagcccaaatgatctctagatgtgtacattaaatcaaaacaataaatagtaagtttagaataaatacctctttatgactatcagggtatccttgaaacttttcgtatgttgtatcccttaatctagatgatgagaaaatttcaattagattcacactagtatcttccaaatcattctatcacacacaagggatagcgtgaactattaggttaaagtgtagaactttgtttttgttgagttctcaacacttgagcaagaacagatgagagaaaaatcaatttcctttttctctctataattttgaaaattatggttcaaagtaatgttctgatttctcaaaccagacttctatttataatagttaataaccctttaatttaaatatctataaccgaattcggttactgatatttatgagggaatctatcaactacttgagagaatatctcaataatcttgaaatatctataaccacttttttaaattagatatttacctaattgaattaattaaataattaattaacccaaaaagacaaactccatagtgacaggacatatgcttaggcacctaacttgttgtttaggacaagattggtatcttttgtcctcacaacttttgtctcaacaaatcttatcttgccaaattttatcttaacaaattttatcttttcgctttttaagtaatttgaaaattatttatttattataaaaaataaataattactattttgtcaattcaaaatagattttctgaataattttatacaactctttatccctactcttgacagtatttcatagtggcaattcggagaccataggcctataattctaagctctaataaactagattatttattaagtatcatcaactaaataattcttgtttattaactccaccattacttcactataaatgtagaattgaacatttagtaattataaaattatatttactgagtttaactgcagtgtccattgatataattaattctagtgattagccattcatgtggtggttcgtaattagttttggtcaaattacaattttacccttttaactacttctttattctttagtactattaattcactagtgaaagtatgatttagatcccatctaaatttgtgcacaatattccagttctagaattaatactcaaagggaaccagcatttgattcgttaggaaagtcatgatttcataagtgtaaatcatgttcccaaccatacacatcattagattcccaaaacaaaagttgtaagaatcatattttctaagaaactttaatgagtgaatcaaagaaactaataacatgaacatgagttcatgataactcaagatttaggctgaactactattgatcatcgttatgatatgaattaggtctttatgataaacaacatgttaataaagataatattattcatatcggttatcatcatatataatatctattatatacaataccttaactttgatgtcatactacatccgtaatctaaaccaaaattacttgcaccgaagaacgggtatcagtgaatcatgctagcaaccgttgattaaagattcccaaactttaatatgttgttggctttttattcatagctaagtggttttagttctctgtacagctataagccacatcctcatatatgaataaagaattttttgatatttaatataaattatcaataataatattaacaacttaatatccatgcatatatcaaatgttcaactcttaattaataattaaaaaatatctttataggcttttcaaagcataaacgctaacaaagagatataattgttgctggagcgatttgaatctatcttcatggtagacgtcttacttcctctaggtggttggtgtttgtgttcaactcttcgagtgtcctccaggtgtcttctgaacatatgttgagcttagtcctctctggatcctagagagatgataaggcttcttggtcttagatggaggtatgcttttggacaagactctaaaaataataataggaggcaaaaaagttattatcctactcctagtatataagtatatacttaggtgattttttatttcttcaagtaaaagtgttttggtaactaagaatattattgcaaacaaccaataaattacaacttatcacaatttcaacaaaaggtacactaaactaactagttatactcaaattgtgcaaccaaactctatctgatctatacttgtttcctctctttaaaagtgagaaaacctaatacaaatctctcttttgattttatttacgaaaaaatttgcattatacacataggcattccaaagaacttgattccgggcctcccaatattgtaaaccaatggattcagtacaacagtataaactcccctcttgtatttagactttttgaatccttttatccatttcaaaactttcattaggtccccctattgagagctaatcccacactaattgcaaatggccatttgaagttgtttactgtacctacaattaaaaaataagtgttgatgtgtttctaatttcaggttacaaaataagcaattcatctcagaaatacatccaaatctgaaaagcccatctctcatatgaagcctattctaacatgccaataaagaaataaatttgtatcttggatagctttgtctactccaaataagagagaaccatttcggattctatttgtccctcggccagataattgtgtgttgaatatcagaaaaaaaaaaaaactctttaaatgtcgtttagttaatataccaaaaaaattgtacgtgtcattttcacatgtacactctagagccaggtatgaaattaactacatgtcgtttttaaatattctcttaaacagcacattacattatcctttcaataataatgacgagcctttgttataaaataggcctttggcattaattgtgcaatatacgttatacaaaagctacttatatataaagtttgggaaaaaaaaaggttcctctaattaactttaactaatgattctagactcatttctttaacattttgatccaaatgagtcaactttttttttttcactccgatcaataaattaagaattggccttcttaattaatcgcatatatatagaaataaaaaacttggtgaattcaaacaatcgcaactttgatgcatatttgctttaaacttcctccatgagtttaatttatatatatgtgtagaagagagtctggtcaaacgttccacgtggagtcagctgattcgtctttgagtgtaccttctggtttagaggtatgaagcatatagttgcaggctccaacagcctccccaacagttagataaatccattcttgtccaatcttgctaataagctctgacttgtttagtttcttcataacctcacttccagggttggccaatacaagctataattaacacaattaatccacacaaattaattactaaacataaaattaagaagctagctagtacaattatatatgtacacaattatagttatagtaattgaataccttaagtcctcttctttcaatggtcttcttgacctcatcaatcatacttattccactcgtgtcaatgttacctacagctgtaattaattacccaaaaataaaatataatcagtactgtactgatgaataagttaaataatgcattttattggaaatgcgttcatataaatatatataccagtcaaattcaaaatgacatattgtaagctggtttctcctgaagatttaattctgtcttcctcttcatcaatccatcttgtgatcctttaataatacatataatttgtcagattaagtatattgtaatttaattactataaataatatgaataaatatatatacctttctcttaagtagttggaattggcaaaataaataggagcatcaatctcaagtataagaactccaggcacattgcaggtgttggtgtattgttcgacgtttctgtatatcctagaatctggaatgttccctagaacaaaagtcttaggccttgccacgaacaatagtactctcaacaaagatattgcaacctgatcacattaactacattaattagcttttattaatattgaatacataggataggatttacaattgttaattaagttaagtactaaccgctatgacaagtccaacttcgacgctgctgaaaacgacaccaatataagcactcatgcaaacgatgaaatcaaatttgtcgaccttccagagatgaatggcggcgtcgtaatcgattaagccgagcatggctgagattataatggccgatagcaccacaagcggagtgtaatggaacaatggtgttaggaacaacagtgtcatcattaccgctaatgccatcactatgttagacactgccgttttgcatcctgcgttgtagtttacagctgatcttgaaaatggccctgaaaaattaaattaaatgaattatatgcaaaattaatttcaaatgacgaaaatataattattattattattattacctgtggtgagatagcaagaagtacaagaaccaacaatattcatcattccaatagcaatcatttctttgtttccatcgatatggtaatgcttgaacatggaaaagcttcttcctactgctatcccttcctgtataatatattaattataaatcaataattatatatattacaagtaataatattcacgggatctataacactttaccccctaattaatgattttgttcaattgtctagtctagtagtcaacaaataacaaattatgtcaaaaggtgtactattattgaaaacagagagagagagacagaaattacttacagctagtgctatgacaccagtaactatgccagttttgatagcaatagccatgtgaggaggcactaagacaagatccgtgatggacagtggattcagccccttctttaaattaccaatctgattaaatattatgcaccaacatacagggaatcagaagcgaattcatagtaaccgaccagtcaaacagtatccaaataaggaaaagaaaagaaaataaaaaaataaaaaaaaaaaaagtagttaaaagacgttaaggaaaggaacaacattgccacgggtaattttataaactgggaccctcacacccaaaacagtggtattattggtgggggcccaataactctggtcgtgacgtgcgacagtgagtgagtgagtgagtggtgaggccacttttattggactggcccattaagatagacacaaaacacatcccataaatatatttatggtattaattttgacgtggtctgtaggtcggtcatcttgtcttcgtcaaagtcagtccacaacaagtataattggactgtgctctatcagtgggtcacggttattaatgacttaatagggaaaaagaaatctaattaagtactgctttgcttgcttaccacttgaacgccgtgtttttcagcgtgagtcagataaacaagaatgctacccaagataacggaggttaacggcgccattgctgaaatccaaaaaaactttggccgtttcttactctgcatgtaaaagtatttcatacttacattaattaataataatatacttcttttctttttattaactataatatttaaatatatttgctaaggtatgttgttattattttattggtggttgaacgttgaagtatataacatggaacaaggttcacactacgcagaatggtaggagtcaatcacctttgaacgttttgatttgcttttagtagttaattaatatataaagcaggtagatcaaaaagttgtggttgaatatcaagacttttgaactattttattaatttattatttattttttttttttttgaggaaaagactttattagaatttttctacatgcacttcaaaaaaataaaatgaaaagaaagaaagacagaagctgattccaactcgttgagaaggtgaagaattttagatcaatatatatatatatatgctaatcaaaattaatttagatctatagcattttttatattctaaactataaaaatttattatattctttcgctcgcttaaattttaagaattatatataatactgatttggatattcgaggattaatgcttcagaatatagtatttaattttgcctaactttttattatataaacaaataataagtcggttatagttggtttttaaagaatacgacaaatttattattaccagtaattatgcggtgacatggtaaaaataaggatatactattgcatttttataattggtttggtgaacttacgaagtatttggttattatgaggaagaaaaggaaacaacatcccaagactccactttcccatttccactgcaacaaccataaccaaaatataatagttagttattataatccaaaccaagtatatatttataatcaatttaacaagatactttatacattttattattaattagaataattagcttttttagtccctgtacttatgacactatactatgatg

SEQ ID NO: 37002 - DNA, 4536 bp, Cannabis sativa
aattcttcaatatgatcatacattgataaatgtctccttctccatttgtagatcaacaaaatacacacacatatagtccctaatatgacccttcctacaatgaaacctcctgcattgagaaatggcaatagtattttaactcaataaatcaaagcaagtatctctaactaaaagtgcttataattaagtgtctttgttcatcatataactttattagaaaatctcaattattctaaatagaacttcaataaaaaaatgatatttaaaccaccaaaactacttaattaaaaaaaggaagcaaaatgtgcaaaactactagcacaaaataacaagtataattaaaaccaggatatttttctcttcttgcaaaactttgaagaagatttttgtttttgtttttgtttttttgttttttattgttttttattttttattttgaatgaatggaacttaatggaacttctccttaggcctaagccaaaacaaatccaaaaatttacatcaactctggcaattttgaccactaaactctcccatcatcaagagaaagagtctgtttagaaaaatgctgagcgattacaaaacaaaaatttaaatacattcataggccaccaaacaccactctttgttgagattattaagaagatttttgtttcttaatccagattcttgggatttaaaataagagctttctactttgatatttagaaaataaaaaagtgagatgaataatcttaaaattagtgctcttaccaattattattaatgccaaaatacagtaagctgcaagacaaataattcttgatgatcaataagatgattctgaaataaattttttttttgaaataaagaatgaataaaatatatacttactactaaggatgctcaaaaattcttgccacaaacctgcattcatccaaaaaaaaaaaacagataattaattttcccataaaaacaaaagtagttgttagaataagccaagttaaaagactaagcaatatatttttactcaatccagtttgaagttggaatctggtagatatagtccatgaaagctcaaatccaaaggccatttcattgtgaatatccatgaatgaaagagcatttccattgttgtttatttgatcagatactaaagtggttaatacaacaacacatgattcatccaaatccctaacagtaattaattccccagacactattacataagaataattataatatctactaattttaaagcaagaagatgtgtctatataaagatgggattttgctggtctttcacagctaaggaaaatcatagtgtttgataaaaaatatgattcgggttcgtgtcctgaaaatcttgtgtatggatcattccaaaatgtgaagttgtaattggaaagagaataatgtgggagagtggagcaatttcccttctgaaggcctgaatcaactattcttattgtttctttagtgtaattgattgcttcaactgtgtattttccatgaaagagttttagtattgttacatttttgtggcaagagagaatgtagttcttgtgtccgcagttgcttggatctgaatttagccgaaaagggtagcttatgttttggattttgccacaagaggaaggtgaacatgatacattgttgatttgggctctgcaagtgatgagaagagtgagagaaataagaatcattgtaaagaatctaataagagtcattttagagaggctttgcaaagtgtgatgaaattgtttatataggacccttgtgttttaatgtttagacacttaatcccttgctttttttttagtacccccttaattttatttttgtttgctaatttaaggaactagttgaattctgctgttgaatgttgggattgtttttgtgtatgtatacatgtgacattaaaactttgaaactaaggaaaacatgttacgtctacagtctacacaagtgtatacagtactaatctagttggtatttaaattagatttaactggctcctcaatttgcaaacaaaagtaaaattaaagagtattgaccaaaaaaaataaaaagaaaagaaaagacaagattaagagtattaaaatggaggtccttattagtttgcttttattttgattgttaaaatttacattccaactattcaaaatattgtaattgatagatttgaaactattgatttttttatatatatatataagattattgtattctctctattattaaaagagaaatgatgaaaggtattttggtaccacaattattatgatattaatagaattaagtataatgttatatatattttaatttaataattattataaaaaattactaaccatttaccatgaatagttgagaccactattaattttaccttaaactatcacttatatattattatgtttttaatattatcaaccattaaatatcagaattattaaaagtcatattgtaccatagatttttcttaagatttgtcttattaaactaacaaaatgataatgtgattcttttctttatttttttttttaaactgaaaatgtacatagataaaataaaattagacgtcgcggtcattattgtggacattatctcacataaaataaatggtaaagtattgaaacatatataagaacatgagctactctacttatcatcaattaattttaagatagaacctcatgattctcaacatggtataagagctatatctatatagatagcgaccatgtttattctgatactgttcaaaattggtgagcaaaaaatagccaccataaaaatatgagctactccacttatcactaattagttttaagatgaaaccccataattctcaacatttactataaataatgttcttgaatatggaggacacatccaacataccataatagttgtgggttaaagcacacttaaccacattatgagcaacaaaattacaatatcttataattttttaaaacaaacaaccaaatagacatatattctcccccgaccctgatgtcacagttgagcttgatccaaatccaaaggaggaggggaccacctagatgccaacgcagaagtaggttagggaagaatggaggctctgtaatctgtagaacagtaataaatagaattaatataatgttttatgctacccaaattattattgtgtaccttgtcgttttgagctcgtcagacggtacagtgtccaccacaattaaagcaaatacgaaaacttgatcaatgttgattccttgtctacttaaaccttaagtgaatttaacccaatcccacaaccgagttccaacattcgagatggggtaaattccccatgggaaagagcgccagagacggtaggccaaattacaatgaagaaacaaatgttccattgtttcattatctccaccacaaattgggcaagttgtctcttcaatgttcatttgctgctttagaatagatagaatggggagtgtgttagagaggatgctctaccaaaggatcttacatggcgttccaaaattttgctaatccaaagcttgttccacatagtaggggaaacaacgcaaggaggtgctctttggaaagcttgaattaaatacgctgaattacaagagaaaggaccatttgtctccttagtccagatccaataatcttgaccccttccagaacgtctaccccctttcagaattgcccccacagtcttctagtcgaaaaggtagaccaacttttgaaaatcccactcaccattctccattaaaagatctgctaccttttgcaagtcaagatcgggcaccccattagattttgggtagaagctattttcatgagccacccaatggtcatcccaaatattagtgtttttgccatcaatcaccattttacaagccccttttcgaagaatatcagtagcttcgacaatatcttttcaaaactaagaatatgagcttttgtattgatactcaagaaatctcatacctctcaaatatttcagtttcagcaccttgattgcaacaaagagattgattgttgtttaaaaggttccaaccccatttagcaagaaaaacttgatttatctgtcgggttactcatgtgtcattaccacagttagatatgtaatttaaattaaaaaataacataatttattttcttttcttattaaaaattagtattaaatggaatatataactatttctcgattaaaataattgttttaactataaaattaattttcacattaatgtctagcaaagttcctttatgatagtgttaactaatattctagattataatgatgccataatcaagaaaaacactttgaatgaaatttcaactcacaaattatgaccaaaaaaatcaactcacaaatgcacaagttcatcgacgtagagctatataagcatggacacattaagggaaactagacaaataaggacaaaacaactcacatggctcctaaaaaatttagagctttatatataaatattatgtaatatcaaagtcctaatcttagaggtgcataggcgatgtccatgtccatttcaactttaatca

SEQ ID NO: 37003 - DNA, 3499 bp, Cannabis sativa
gattattcttggatctgggaaggtgaataaagaactctgtcagaagattatatcaaaaattaaccatgatgaaatgtggatggcatggaagtcattctttggccttctaggcagggttaggggatcacgtgttattttttctaatcatttcgaatcagaaatccttcttcttcattggttcagagatgctctacaaatgatatactttaccaatttcaagaaaggtaaggactgcgtatcccctagttgttttttgtatcttttggagcatcttgttatctggctctcttccttacatggttattttttatccaccaaatccacatttgttgaatggctcatgctccataaagagttctccatcttcttcagagtgactaatgtatcagatctctcagaattgttatgcgatcttatcctagaacttttttataatgagaagtatacacttgactggataaggaaatctcccagagcagtgaactactctccgattgttactaggctggttgtgctgttatgcttggtttgtgtcaacatgagtagggatactgattcacttatcgatgtgttgaagaagagccatataactgaacaactaccgccctcatttcgtattgctctcgagcgagtaaagagaagcaacagtcgaagtatcaatgtgaatttgattgctgaagctcttgagaagatcgacaatcctatggtgattgtgaatttaactaaatgttgtccattcaagtcatgtccatatgctgtgtatgtaagtatgatttcgaatccctccatggatgaaatattaagaacattgtttccagatcaagttgaggcctcaaagagctcagttggagctgctgtggaagctagttttgagggtcagttggtttttaaggatgaggagctatcgtcggtttgtcaagcaagtattgctgcagcagcatcaagtagcagtcaaaattttgagagcgaaaacaaagaaagtaacaagtccaagtcttctaaggacgaggagctgttgtcaccaaaggcatctgaggacgaggctctgtcatccaaggcttctcaagctacaacggcaccagcagcagcaccaagtagcagtcaaaatgtggaaagcaaaaagcagggaggtaacaaatccaagaaaaacaagaacaaatcaaaaggaaagaagagataggctaagtaagtaagtttctaatgcaatggtagttccaaattcttgtgatgaaactctattgtattatgtactacataccttgtgaatatgaatatgttaggccttaagtctttagtggctgtgttcagtgtttttaagtttgtgtcttctaattcggtttgatagttaggatcatttgttcgtttagcctataaatacagggaattttgtgtgaaatatttagagtaaaatattcttcagtaagtttaccaagtttcgagaataacttgccaattttgtaattgtctctcttatcaataaactacatttctttcaagaactgaattgtgcacaagtgtgtattagaatactattgtgaaacattttgtaattgaaaatgaaagagacttgtgcttggttatcttaggaaattgatataattaatttggattcagtatataacattcagtactgaaatgtaatattttaatttataatcatcattacactaatatttggttactggttttaatatattaaatactaataacgtatattattgttacgagaatataagaattttcactcttttcgtattttaactaaaggaaaatctactgttaatatttatttaattaaaaattaataattattattatttttatatgtaattactactcatttgtaaaatactagattatacttcctagattatactggattcagtgaccgtttggatgaaggaatggaaagtgattccggagttttgaaatttgttctcaaggattttaagtctacttttgagggaataacttcgttggtggattttggagggaatactggatcaatgtgtaagatgctatcatgctcattgctgaatttcctcacttgaaatgctcagtttttgacctaccttatgcagttgaagtcaattcccataatagtactccaaacttgaagtttattgagggtgacatgtttcaaactattcctcaagctgatgcaattctattcaaggtaatgttattatattacatatgcatgtacaaataaaagccttcttaatcgagtattaaaaagttggtgtattgctatattttagcacatttaagaaaaattatattctaatagtgttctaaaaattatgctaaatttgggacatattataagttgtgcaaaatttaacataagatatattattgtgtcaaatttagttcacaataaatgttattttttttatttactataatactattaattattatgatttattgatttttacttaacttaaaattttttatttaccatattactattatttaaataataaaagagtaaaaaataataatttttgtatattctcaataaaatagaaaatgactatcaatataatcaattattttttttttattattttacatcatgtgcattaaagcaccataataaataatgggccaaatataacacaaatttatttttttgcgccaaatttaacacaaattttaaatattccattgaagatagtctaaagtattattgtttatttttctttagcaaggaaataaaaaaccaaatcataactatttttcttctttttctatagtctgttttatcaggttgtagtgatgagaaatgcatgaagattttgaagaattgtaaagaagcaatttcaaagaatggtggaggaaaggttctcataatagacaataatgtaatagatagcaaaaaagatgaacatcaagaaatggaagctaagctctactttgatatgttaatgatgagtgctctgactgggagagagagaactaaaaaagattgggaaaaaatcttctttgaagctggtttcactcattgtaaaattacacacatgtttggtttaaagtcactaattgaggtttttccttaattaatgatggaataattaaacaaaatgagtatgtgtgtcacccttgaaataaacatatgatgattactattgtgactacaattgaacacaagaaaatcatcaatatgcaaatgtatcaccaagggaaataaatatctactagttctttatttatttatttattttgtgggcttgggattaaaattgaatgtctcaatattttcatattattgctattattggaattaccattgttattgagcatcagtgatataattcttaaaagttattacattaaattatatgaggctagatatttagttggatcaatagcgatattaacacataaaaaatgctaaataccactaatactttttagtatttttttattaaaatttgtgtcatcaactatataattaattgtgttattaattaattaacattatttatggagc

SEQ ID NO: 37004 - DNA, 5175 bp, Cannabis sativa
aaattctcaacactatctaaaagtcagaacttcaaagaaaactccagaagaaaataagtactgacagattctagtgcaagacatcccacatgcatgctgttccagctctcaatatatttctatccgcttagacagcctaatgtcatacttaccttgttttagtaaaaagctagactagtttaattaagaatcgaaaagtcaactcaaaaacctgattgaaaaaaatattatctctaaagtcatgagagaatgcttcaaaacttaatgaaactataacagaccacgcaaacatctccgttattatgaaaaaatgcattatttagtgtttctgaacagttagcatagataataaaatatatcatgtgccctgtatgaagttaagatattagctttactagacaaacaattagaaaaagcattaactgtaaaagactcgatatgtacatgtctttcaccatccatattcaagccacattaacataacaattataaaaataataataaataaataaaagaaggcattaattaatgcaagttctcacagcaaagagacaatgtgtacatgtttttcaatttccatattcaagccacttcaaaacaaatatattaataaaattgatgcttccctattcaagtcttctgtatcattgtgcctgatcaaaaaaatgaaaacattaaacattgtgcatagctcttagagcatccaagtcacactggaaaccatcaatgcaggtaattactgtcaataagaagcaatggttggcctaaatatagaaagaaatgtgaaaaggtgttcgttcacatcttttttccttttgtgatttgaactaagaagaagaaaactacaaccgaaactcaatacaaacacaataatggagatgatgccacgccatttccccgaaccgacatatatattgctttaagattaagtcacaaaacagatcagcaagtcaaacactatagctttcttatttgaaccatgtcgtgtgtctcaatcatatgcagaaaacgtgtgtcaatgacacagaaaataaccgttaggtggttcctaccacatgttgattctcaattacaaaagcaagcaacaaaaccaatactacatccgaaagagaaaaaggaaactttcaatagcttatacacacacaatactttaaaactacaactgaaactcaatacaaacacaataatgacgataatgtcactccattttcccaatttaaatccaaccagtgtaattgagttaagattggaacatgcatgcacaaaaaccttaacactagctctcattctaactaacagttggtagttgcaacggaactcctccaaatcactaattgatttctaacagcctaataagtataatgatcagtaaagtctaaatatagaacttgctgataacaacttccaacatcatatcaacaattatttcaatacatgctatgaaacattccatagtaagaactatctcccaaagaaaattccctttacatatatagaatctaccgtcaacttactaatttagacaatttattaagcattaattgttcatccacaaagatttccactaatacaaaaagaccaccaattgtataaaacaaaggcaattgcaaaacatgtcataaacaaaatttgattacaaacattttaaatccctttagcattctcagcttcagatgacagttgtcagaaaaaaggctaaaaaaattcaactctttagtcaaatattccactagacataagctaaagttatagacctcttacctgatcatgggcagcatcatcatccctatccacaattgaggaggccacagacgccgcagatttggcaacggtggaggccccagaagaaacaatcctcaagtaactggatatagctcggaacgagctgggaatgaaaccattagtccggccaccaccctgctgcttttggccaccatcattcctcatcgccagaaggaaagatttgaaaataaccgaagaaacccacaagagaaacaccaatggttcttcaaaatatgtcttaatcataacaccccaccaggctgtttctaagtgaaaccgaagaaaagggattataaaatctaaccccaaaagacaacttcaaaatcatcaaagtcaagtaccaagtgtcttcatctccttctaccacaccacaaccatccaaaatagaaagaaaaaagaaatagccaaaaacaaaatccaaccgaaatcacaataagtgaaaagaaaaacgccccttctcttctgatttttcacgccgtcttgctataaatacgaagaagacaataatccagacggtgaaaagaaacccctcaaaaagaaaaaacggattatgagtttcaaggcccttacacccttatgaacatttacaaacaatcaaaaaaactatttgtttttttttatttgacaccaaacaaaattaaatcaaaaaaatgtataatagaaatcaaatattaaaaataatatatgaaacaaataatttatggcagatgattttattttggagtgttgctttctcgacgaaaaaacgcccgagaaccagcaaacgatctgaggagatagagagattttctttttggagagagaaagatattggataatggaagttttttgttttttgtttttttttctttctctctttttcttttttcaaataaaaaattaaaaacataagaaagagactcaaccgagtagattacgtctctatctgtctctcctcctaaacctttctattattatattatatatcaacaaaaaaataaaataaaatcttgtattattattttcaaaaacatttaattaactttttttttttttctataaggttatttaattaaaatttcgatataataaagagaccatatttgattttttttaataaataatattaatggcaatcaactaaaataatagtttaaaattcaattgaagcatcctatcgttagagacacgactagattagaattaaaaaaactagtcaaataatcagttgtctaattctcagatcgtttgaccaaaaaactaaaataaaatcagattaaagagattgcagcatcacaattaattttaagaatacctatattatgtttcatcaccgcttagaagacacaataatagaaattgttacagcaagtttattcagcattgtagcttgagcactcaacattctcagatcgtttgaccaaaaaattaaaataaaatcagattaaagagattgcagcatcacagttaaccttaagaatacctatattatgtttcatcactgcttagaagacacaacaatagaaattgttacagcaagttcatacaacatcgtagctttagcactcaattattgtgtaaggtacttaactgcgctactaacaacctcttcagtcgcagagaacttgttattcacaaccactaacaacgatttgatggcgagccatcgaagaacaaataagaaccaacaacgaaataaaacaaaacaaaatcatgcaacacaaacaaaattaaaacactaaaaatacaaaaacactcaaaactatgtcacaaagacaagactacaacactcaaaattatgtcacagagacaagactaatcacagtaacaaaatacaaccctaactaagtcacatctaagtccaagaaaggccggcaggcctaggcaaagaaaaaatacaacctcctatagaccatatttgatttttgcagatttgaaaatttaaaccaactcaattatctccgaactacatgttgttgtctctaccaagtctaaaaactgccacaataattttttctttcttgtttttttttttaaatttgcagctatatctccaaattttattattataaattaaaacaactaacctctcattttttagctcctaaacctcccaaactttgtttggaaatttaagtttatgttaaaaaagtttgttaagtagcaaaatagattgtatgtgtacactcctatacacatgtatatttatattagtacacataatataatttacattttaattaaaaaaaattaagttgtaaaattattaaaaaacaaaataattttgtctctataattctttattttctttttcatattcttttttattttcaagtacttccttttttatctacttcatcttgtgcgataataacttgaagacaggtgttttgctcgacaaggaccaatgtaccaatgattataaatctcccaagttttcaaaatggtgacaagtttgtatgcccaaggatgaagaggaacatgactacatccctcgcatccattattttaaaaacacgaccactcaggaagatgaagatggggctccccgaggtaataattcttgtatttatggatggtctcctactgtccttagggctgatcgaataactttagttcagtttaaggatagccaatataatttcttcatctacaattgtgtcgacttagttgcccataggtttgatagttggtatcataaatatcatgtccaactaagttgtaatagctcctactatgggatcgctgcacaatatggaactaacttcaatagggttgctagtttagattaggatctatctccacttaacccctttgatctttacatgatcactggttctagggagttaagtaattattatagccattcttcctcgtctaaaacttatggtaatgttctaagtgggagttttagcctcgccacctttgtattggtttacttcacacagaatttaacatcttgttttctatcttatagatatggactgtaatgccctatccaaagggacgctacgtgtgtgtgtttatataaaattctcttactaaattatataattatatcaaaaagtatgggtaattacaattttacaatttgaaacaaactcataaaatttctttttataaaagataagtgttaacatctcctgatacgaaccacactagcagttgtgatgaaacccgacaccaaatatggtagactctaacaattctcgaaatttagatgtggaaccgcgacccaatgcttagttaagcatgatccttggtatgaaggacgacgccacaaggaatactccttgataagttcgaatagttctctcatgaactcaagaagaaaagctctccaatttttattccaaaataatatgatttttcaaagtgtttacaaggctttatatagccaacttacaactaaga

SEQ ID NO: 37005 - DNA, 2447 bp, Cannabis sativa
ctatgcatgcaccactttttctatggtttgctaattataatagtaaaccatacaagtgttttgtttttctgttgtttatgactttaaaataaaagaagaagaaattaatgagttggtactaaatagatggtttattttcattaaaaaaatagatggtttataattatcactgctatgtttttgaatgaaaaaaatgatagaagcaatgacttttatgcatagtctacaatggcttaaaaacttttaactatcagttcattatattgagattgatttttagtggttaaaggattatagtctaccgaagtatttgtttataatttttattgtttgttattaaacatttttctttaattatctaattttcttagagtgcagatctctcgtgtttataaatccgtaaataatactactcatttattaattaagtatgctctcggtagatgataagtgttcatagttggaagaaattcctcattctcttatgcttattatattatgagtctttgtttagtataataacattttattaaagaataataataataaataaataacaaggcctgtctaatcttaaattcttgggaaattcaccaaaaatattaattgggcccatatccttgaggccttttctaaaatcctataataccattttggggccattacttgtggcttttcttataatactattttggtaccattaatctatggaataatttcacaaatacacaaaaacaataaaaaaattataaaaatacggttttacagaattttaaatatttttacgaattttttgattttatttatagaaaatacagtctttttatattttattcatgttaatttgttgttaattttttttattatatgtatgttatttgttgttgttgtttgatattattttcatgttacttttatatagttttcttgttatttttatgttatttttacgaaaaaccgtaaaaatgtaaaaaaaaattcattaaacgtaaaaatgtaattttttttttacaaaaaatagtgttttatgtaattattccttaatctattttataaaaatgaattttggggccatttaatttagatagttatacaacttgaggccttttctgtataccattttagtatttttgaaaagtactagttacatttttttgtttcttcaaatgtagtaaaatacaaatatttcttttgtttgttttttgagagattatgatcaaatatagggctgtacaaatctttttacaaactacccaacttaaataaaactttcataccaaatcgagagaaaaaacacaactaacgataatccaaaccgtccatttaatacattggagatttggatattactccaacccgcccaatttaaacaaaataaatcgaataaaaaaaagaagtgaatatcgttttgaatgaattaaatatttttatttttttaattaattaaattataattaaatatttacaactcgatattttgatattcatattaaatttattgaaatatataaacctctaataaaaatgtttgtgtgaggatgttgttgtcggataagatccctcggaatggtgacatttgttattctatattgcataagattgtttaagtcaaataaaacaattatttatataaatattttccttaaaaacttcacaattgttatgatgtgatggtagagttgaacagtttggtcacgatctaagttatttgaagtttgttagatatgatttttttggattctgagtgcaggcagattctttctaatttgaataatgtttttttaatttttgttaagcgatctgttaatcgtgttgcttaccatttggctagagtttcgtggttaaatgctagttgtatttatttggattatgcgattcctagtagtttacgtgatgcaccttctataggtagcgctccacgattggttagtgatattcttaaaagatattttcttaaattatatgggacctaataacttaattatatcaacaacagtatgttaccgaaaaaaatactaaacatactttttagcaattctctttacattaaataggcttgtaaattctatatgataggtttatttatttttcttcttgtagtgaccaaatgccatactcaaagttgatgatcaaaatgtaccattgaaaaaaaagctcccatagttatttttaaatgatttttctattttcatttgtggaaaagtatttacaataaatcaaatagctagcttttgagtattcatgattttcatttgaagtctttcatctaaaatcttttgaagataaaactctgaaaaatatgacactcaaatgttgcatctacattaagtagaaaagtcaaaaagtcctcttcttataatatcataaattcaatttgcattacaaaagtcaaatgtgatataagttactcttgaggaaaaaactatgttagaccaccgaaatactag

SEQ ID NO: 37006 - DNA, 2985 bp, Cannabis sativa
caaagcaataaaaccactctgtatttaactttttcactttgatattgtgtgaccttgataccaataggttggcgagtggaatttacttatgtattttaatcaaaacaaagctacaagtattgaagaagggtgcaggaaacttgcacctcaaaaattaaaatacacatgaaaaagaaataccattttcctgctaacaaaactgatagaaaggcaaaacgtttagtagaaagttcagaaaagcaaaagttacaaaatactctgctaattccgagcaagatcagcaaagaaaatgtctttgaactctttaactttgaacagccatgataagactcctattcagtttgtttaccaaacgattagtctttgagagttttattttatgtaatttgtactagctggttaattgtttttggctgaggtgttctttttgtattggttagcaacttttaattaggttgctgatgtggcaagctttattctctatacatagagaagtcgaactcagtttgagatatgttgaagaaagtttagaattgagagaaattccttgggagagatctagccctcttgaaaggttagaataggagagaaagcctctccaagagctattttgtgtaaatcttggataataataaaatctttctggtgggatttcaatattcgtggctgaattctttgttagattatttttaatataagtaaagtctatctagccatgtagcaacccacattctgataattgatattggtccatcttatacataagtcatttttaaaatcaaaagagcgcaccgagttatgatttttcccgtgcaattctctcctgatctcatcccaaaaataatctaggaattttctttcttgttgcaactgtatattcatattcacatcaacttacgtggatgtggatagttccaatgtgcctgtttctagactctagtgtaataaagatttactcttagatctgatcatccctgttagagtgtttgttatattattatcgcataaaaatgactggcctgttttccagatgaaataagcatttactttcatttccaaacttctgttactgactcctgcaatttatatccaggggttgacagtgttggcactatttcagcatctcttgtgacgtatgcttctgtccaagcattaaagccagaccttatcataaatgctggaacagctggtggctttaaagtatgcctctcatactcagtttagtttcaacattgtaattactgtgatccaatctcctagtcaccatatttcttccatttttttctctgtagtttttctgtatatgttttgaaagttcatttatcgactattgactaaaactagttgtgttaatttgattcattactataatcattgatgtatactaggacgtatgagtttcataaaaatcaaagtttaattgctatgattactttatagtgttgactccaacttataataatgatatattatggattgcttcaggccaaaggagcaggcatcggtgatgtttttcttgcatctgatgtagctttccatgacagaaggatccctattcctgtgagtttttgttagcttttcatgcttctacttatcttgttttattgagaaagtacatacttacattaagcaagagatgattcatctatattttaaagtctctgtaaatatgtgcttaactggcgggactcagaagagtgattttatgttatatagaagcctaaactctttctaggcatgatgctgcagagagttattcagaagattaaagtaatacctgtttcctttaccaattaaaaagccaaaaactgcaatgaattgtattaggaaaatggacattttctgcgactatgtgcttagaatgttgaataagttccacgactccaagtatttcagtagatcttcctattgtgggttattttttcagacaaaagctttaagtagctgagacaacaaaattacccggtgtgagtatttgcataatcttcacacgacattatatgtttaaagattctataggatgagagcatgtggctttgagagttgatcccacaaatctcaacaaggtttctgtttaacggaatcttatattttataactacacggatatatcaccgttattgatgtatctatttgctgctttagacgtgtgcaacactgaaattttctatctcctacgttcctgcaggtttttgatctttatggagttggtttacggcaggcctgctcaacacccaaacttttgaaggagcttaatctaaaggtgactatctttctgacccctaaacttggaagtttgaagtttgaactactttctttgatacctcctcaagcctccctctattgagtcatgactcatgatattgatgtaaatttcatttgatgaacactattgataatattgattacatttgctcacttcaggttggaaagttgtctactggtgactccttagacatgtgcccacacgatgaagcatcaatcactgcaaatgatgctacaattaaagatatggaagtaagtttttcttgtagctttttcaattggcatatcagcttccccccttagtatgtcctctcattctctacaatggggtttcagggtgcagctgttgcatacgtagccgatattttcaaggttcctacaatatttgttaaggctgtgactgatatagtggatggagagaagccaactgcagaagaattcttgcagaatttggccgcagttacagcagcccttgagcagtcagtcacccaagtaattgaatttatcaatggaaagagcctcggtgaactttgatgggtgtcttacttgcaatcgtttcatacacattcagttccaaaaatattagaattgatcggttatatgtcctttgatattgtccaacaggccaaaataataacatggttcagtggcacatctcttaaacaactcacaactatgtggttttagtcttcaaaatctgtatattgacatatttttagc

SEQ ID NO: 37007 - DNA, 8619 bp, Cannabis sativa
  modified_base (7847)..(7849): a, c, t, g, unknown or other
aaataaataattagataaataaatttgtacatgccatatcatcaataaaaatcatgtccacacgaattaattcatcatctttcttactgttagtagactcccacatcctacaaagtctaattcttatgatccaactttcattgttattcttcaagtcttcaaaaaaagaatacatcatgatataaactttaaagaatgcttaagaaataacacaaatttgtaagaagaaaatgttgagtgaaaataataaaacaatattctttaaatatacgaactcatctagtggtatgaaattgctagttttgatattaaattgaatgactgataaagttatacatttaatttcaaaataaattagtccatttgattctggttgaagctgataaaatgaaaccggccctctgcttctagtgaacttattaggcagagaaaggaagagacaaagaggggttaaagacaaagtaaagttattattaattgcataaagtaatacatttattttctttattttaataaataataataatatttaatattttttttgtaacaaataatatttattttcttaatgcaattattttattagtttttttttgtcccgaaagtgaaggcttcctaattaccaaagaaaagagactctctcatatcaaagtgagcacttcacacttgtcttccatgtctttttctcctaactgcatttatactctttcgaccaaaaaattgaactactcttctcatcttattattattttattttttaagtagtgaaaaagtgaattgttattagtttattaacagaaaaaagaatacacattaaagtttaaaacaatactttttttaaaatttgaataaagaaaaaaacagtaaaatctatttagccggttgaagtgaaaagtgggaaaatccactatagtgttgggttggagatgtttttggtgttaaaatatagattacaccaaatctatttttattaatttttaatatataaataatatactagaaatttatatggattataaaaattatactaatattagtatattagtgaatcagctgatttgggaatagaaatttatatagattattaattttgtgcaagatacaaaattgaagaagacgaagatggagaaagaagcagagacagtattacgaagtaaaatatacatagtcttctcatcttctcactcccacactctctttctattcaattttagcaattgtcatccatccatgtgtcagattagaaattatcaaatccaaaaacaaaaaatctatgatttatgttgcttgctcaaaataaaaatcttgatattgaaaataaatcattagagaaaataagaataaatcaaaaaaattaagagaagagagattaggttatacatattgatttgaaaatagtaaaaatttccttgaaccaaaatacagacaccacagaaatctcacctgaaggatgtaatttttccaagattaatttcgtccaagtgtagcagaagaggccatgaaaaatggtgattttttttaattgaatggagagggataaacctctaaaagaaaatgatggaaaagagaatacggtacattactctaaaataaaattgcaaaaatacatttaagatcattaaaatctattaatgtgtttaaacaaataaattagaaataataagaataaatcaaaaaattagaaaatgagagattagaaaagaatcacaattaggctgccacatcaactcttaaaaacattcctttatatatatattgatttgtcgtttcaaaaattctaatgtaatctatcaatctcttttaagtgatgataaaattagtttaattaactaataagatatctctattcaatattaattaatcaagcaatattattcacttcaagtgaaactcatagaattaatggaatatttcaatttcacatcttttttatgttacgcaattctaagtctgattttattatttctctcaagtgtaaaatctaaaatctttatactaattaatagtgtaagcattaacaagatgataattaatgcaaaattgtaatagcaagagtgaacatgtaaataatctaaaaattttatttcatcatttaaaatagtttcataaacactctagaaaagaatttagttcataatgacaaacatattcacagcaataatcatgttcataatcatacaactaagaataaagaagacaaagaataaaaggactctaatgatagttgatgatgattacttggaatctctttctcttgctctttaatgaattttctaatatcaaagttgtattctgtatctctccagttgttaaaagtcgaattgcattattttttttataggccgaaaaagatattaatgatgttaatttagggccagtttgacacagttgtgatgtgtggaaaagcagttgtaggtgtgcgctgtgagaaaaaacagctccagcaaaactgtggaaaaaaaaattgaacagagtgtttggtaaattatatatttgaagtattgtgatttgttaagattctattataaatgataatgttataatttagttcattataataataaatatataaaaagttatgttatatatttttttttattttttatatatttttaattattttctcctaaaaatataaatttatatgcatttgataaaaataaattatagtattttaaaatatattttcgcaaataaaaataaaaaaattaaatatataagaaattcaaggttgaagtagaatgttaatattaaaaatatataatataaaatatttttcaagataaaataaaaaaaaaagaaatttaaatattatttaatttattatatttattgatttttaatatataataattaagtaaatatttttttagtacaaataaatttattagtcttttaataaaaataactttttcaacaagttgggttgtatcacctttggcttttagctgtagcttctccataaagttgggttattcaccatacactttttgatcacagctttttcaaaaagcatcttttagcttttctaaatgttttgccaaacttagaatttaaattttgaaattgcgtcatgtgatatgtcaccaaaggcgaggcgacatgtcgcctggactttatcttcaagatgcctatcttttttatctgccatgtgagaaaattagtttatttcgtaaattgggcgagatgtcatgtggaacaccaaatttaatccttttcttttccataactggcgctacaacaccacaagcacgatgctatagcaccacaattaagtttttgtcattttgcttgattctcgactcgctcgctttctagtttcgacactttaaatacatacagtatactctaaatttgtataatttcatcattttatgctcaatactgcacactacagaaaatacattaaatctatacaaaattttaaaaaataaatattaaaccatttaataaattactaggaatgagtgcataattgtgcactcatcgcaacttcaaacttgaactattgattgccttcatggaatgacaaaaataaaactaaaataaaaaagtaacaattcaattattggatgacagatcaaaaaccttagagcaatgacaatttatctcaatatactaaactctttcaattattcaacatgcacttcaaactaaggactaaaattttaatccattaaacttaattttcaatattattttattattaaagtgtgtgtatgtcaatcctacaaattctatttacatatgattcatgtgtttacagactttccataccacaaaacaatcaagataattataggcttgcataactaattcatctccactaatgtaaaccaaaattatattgattaaaaagactttataggcatatatcgttaggcttagggaaatgattgatgagaatgtcatttatgctaatttcacaccataaacttgcaaaacaactaatcagtataaaaccttcatcgtatatcccttttctttcttcaatatttttcattcaatgcatttattttgcacaattaaagataatcctttaaatttttctcttgttattaatatcttttgaccatgaattctttttttgaagctgttgacaaagaaattagccaactgacttggaatctaataaatgctggttaatcattaataaagaggttagaataataaataaataaataaaaaatagaatttatagaggttcacccccttttaggtgggtaaatacctactccccttagttgtattacttgtgagataatatcgggaagatcactaaaaaagacaaggtgatttctagctacgactttcaaagtgtttacagatatctctcaacaaagtactctcagatgcgtacatatgagtatggctctcagtttttcggtcccctccccttgtcattgccttcactatttatagggagagagttgttacatatggctctgtaaaaggagtaagtaaataataaacatccctgttttctaggatacaattatgatctaataaagctcttttattcttggatagatttgttggatctgagtttgtaagatttagttgtagatatttgaggaagcttgatgaagacgaaataaaggatcgagtatctctgtccggtacccctggcagtgcaagatttggccagcatgtgggtcatccagtcaaatcccttgacacttgtcttctttacgaatttggcttgtacaatcacccttgcaaggtgttgtcccattttatctggccgatagattgagtatctggccagaagctgtaggggacattttggccagcgtatagctgttactccttatgtagacctgccagacatatttttgcctggatgtttttgccaggtcaatgagatagctagactatgccacgtgtaagagccacgttagctttgtaaactttgggataatatttccccccaagtccccttacgagcatctgtacagatgggggctttatatacctgttcgggtgctagcaggcatgtgggtttcatgtgcttagtaccttgacggttgtgactgtcacacttctgtctcttcaactgaattttaattgttagctcttcattatggcagtttaaaaacatgctttgtgggaaacgtgctgacagttacacattcatgattacccctttttgctctttccacttccccataatacttttagtgggaattaatttcccattcaattgtgtttttttttggggaaataaaattggcttatataaaggccatttctcctcttttaaacctttcacgttcatttattacattgaaagaaattctcaaagaaagaaaaccagaagaaactccaagaaaactcgaagcctttttgccattttcccaccgttgtgcaaaggaaaaccatcatcctcgctgtctccatccagaccttgaatcaaaatccctcagtgattaagtccctctatctattctctcttttttttttttagaaatttatgtttctgcaatgaatatcttttttttttgccattgttggatgcaaaaaagctgcacactgtggttttagagagaccccaacttcaatagttacatgggtacaataagatagatggatgtaggacttttagggaagaaaggttgaatcttggtactgtttacttcattttggactatgggtcttgaagaacatgaagaacttggatttaatggcttcttttggtagaataggctattttagacctgtcaggaaccctagctggcctatttgaggtgttttcaccttggccaacaggttatatgctgcccgaatatttgtatgttatccaaatgttcacttccctttcctttttgcatagatgaacttgcacgactgctgaggaggtgaacaccggatagacccagacttgcttgagcttctctttgaagactagcccgtaccccaggcaagtaatcttcatctggtcattcttcgacctgctcttcaagcagcttctctgacttagaagtcagtattggttctcctaaacttgaaatccaacaccaccaccactctgaaaaagattagaggagagacatacgagtggttcatttgggaactgaactagggttggaggaaattccttctagcctcatggacgtatatagtctggccaggtgttccaaacaccctgctagatggacgtaggttgtccttcatgaagaaccatcttaggttgaagttgctgttacccttgcacggtacattgactaggatccaaatcaggcacgaaccaagcaaacatacagcgtaaccccttccactgacccttaccttgctgacctaatggcaagggggtgagctacacggcccaatcaagttgcaaggcctgctgaggaggctgagatgcctattgaagagctcgagaggcctgaggagcatactaaggggcctactgagcccaaggaaagggcacgacttgctaggaggcatgtcagggagtgtgacatccgcacagacaaccccatggggagttacactgaggctagggagcctctgaatgtggctggactaccatctcaactaggaatagaccatgctgaggaggagttggaggctccagagcctttgcctaaaagaggggagccccttatcaacacttattgaggaaatgtttaaaaaccttgtgattaaaggtttggtcagcggcctcaatattgatcttccaggtgaagcgtacctggaaaatgcccctctaaagaaatggatgacatggttaggtccccacgctaattagggggatatcttgtcgctccactcatatttctacgatattgccaactactatgggatttgcgcggtgctattgtcaccaaaggggataaagtatctatccaccgtcttcgtgttgtacgcacagatgggctggccacaaccttcaccatttgagatcagttggtacttcgacttaaagcccaaccctggccaggcccggtcgagatacttctatttcagctaggtgggcttcatctggttgagtggcacaaaaattactgccatgtccaagatcgatggttatgccaagaactatttcatgatttacgatgcagagggtgtgtgacattatttcataagggttcccacctttgacttaccaattcccatcatgcagctcagggacagagctaatcacatcctctcgttgcccgcctcaagatggaacatatgcaaattggcgacgagagagaacttcataaagtattgttatactcaaaatttggctggaggacacgtgtcaagataaagggaatatgaatcgatgcaattgcttcttatggaataactcattaattacgtaagtatcagagtatatttataacccgctggtcttaggcgaggaatcaatgtacaaactagaacttagtatataagcgagaaaccatatgttgctaaatgcgaatagtgaggcactaaagaaagcaacatgtatcaatcgtgaaagtccttagcgtacaatgaacaaactaagtgtaaaagtcagatcggctcaagaacaagtaagtgaggtggccgtctcgttatgggaagacttcatataacttcattccattagggtcagcgaggcttacaatcctggcaagccagaagatagcattcaagtgagcctcgaagaattctttgaggataagagccgcgatcgacaccagacatagatcgtcgacctcggaaggaagaatggcctcaactcgtgattaggatcgctgtaaccaagttcctgtcgagacatctacagatataataattaaagacgtgtttaatacacgattgttttgacacagtaaaaacggaaaaatcacagctatatgatttccaaatcataaaccgcatttacnnnacgtgatatgtaatcaaatcccacaattttagggatgattgttgtaaagatatttcagtcaactttgtaattcattgtccactatgtaattataaatagtgacaaagatgatcgaaaaagggacgaaaaaactcatacgaaagagttcctaaaaaagtaatcagaaataagattgactcatggactatgtagaattttaactgcaaaatcacataaaaaatattgtgttcatatctttatttctatagcttttatttttctatgtgaaattaatattgtgaggctcaaatttagttaacaaaaatcttcgttaacaattatgacctctactcttccccgggcaagcctcaaggttcacctgataaactttctacgaagaagaaatcaagaaccaagaggaaatacactgagaccgaggctctctctaataacatttttgagaagaaaaaatcagagaccaagagggagagagctgcttgaaaaagagttgagcggggggagtctttgaatgaggccccagttgtgattaggacccaagagtctgcacctgccaggactgtccgtccaacaattattaagtgcaagggcaagggtaatgccattgaaagtgaggactcttcttctttagataatgattgcaacatttggtacaacccttctcggggtgatgcctccgagcatactgagggtagaaattttttattttatgctgaactactgtctattgaaatcaatttttgaccaatacattgttggatattattttacca

SEQ ID NO: 37008 - DNA, 3283 bp, Cannabis sativa
tgcttttttttttttttgttttgtttttttttttttctatatatatccagtggtcaatttggagctattgatttcctatggttctgcttgtaaatccgtaactagtttacacattaattcaagaaactcagtaggtttaaagataagaactttataattaaccccccacccccaaaactgtaaaaagaaaatacatttatcaaaaatcataaatggttttcatgtaattcatactaaattgtaaaattactggtcaatttcaaccatattggcctaagaagaaaaaattattatgtaaataaacaagaattttagcttagctttttggaaaattaagaacaacagaattatcctgaataaatttaatagataagaagatgtaaaatagaaacacacctcaagatcttgatgaactgcattgtctaaaagtcttgacatcaccatgttgtcccacagctttcttgagcttataataataactattgtaataataataataaagtgtataataaacttaaataattaatcttatacacaaagaagagatcgagatagatcgattcagacactaaacaaaagaaattatataataagttcaagaaagctgtggaaaagcatgaccaagactacccttttcagctcatatatatgaaaagctagctttctcaacatatacatctcagatctcaattgtgaagaggatatatatatagtaaaagaagaagataatgaatttgaagatggatgagagaaaattgagaaatgggtagtttaaaatgaagcctcttatggaccactctaccatatataatctctgtgcaccagctttatagagaggggagaggtgaaaaagagagggtggggataatatgagtagggttttcactcatgagtgagaaagagagagaaactgtttattttgaggaaagagagagagagagactactatgcattattccaattttacctactcaattaatagtataactataataatattatttataagattactaataataataagttaataacgtacgtgtcttcttttagtctttacattttctagctagtgagtgcgcagtagggtatatatttatatttatttatatataaatgttttttgtaataattcatatgggtagaagatgagaaattaacaaaaatgacgaggaaaaaaagttggaaatttatgtatagatattagaatgataaataatatatatgttagaaataataaagaggggggaaatataaaaggggaaaagaggaaaattcaaaaaccatcccatccccatcacatggtggcatgtgatgaagatctctttttattttattgggatttaaaggtatggggtgtttatggtcccccaatcgacatgtttcaattttattttatttttaaaatttatgtacttatatgcattagacttatgtatatgtacatgttgtgaatcatcaataatgtaattgtgtctcttcggctagctttcttgcttggatatgttatttcatttatgtacacattaatatatatatatatttatatatatatatatatgcaccttaaagggacattagccatgagtaaatcatattttaactcacatattataactaaatacagtaaaaaaaaaattaaaatacaaaaaaaaaaatatcaatataataaacaatcttttatactatatcatatcaaaaatatttttaaataaatataatatttataaatatattacaatttaaaataaatttattaatacacttttaattatagatttagccataaaatagtggaaatttatcttgtcttttgacatggttatgaaattctctctaaagtggtaaaagtttgtttgtgtgtttattctgttttattgtatttgttcatagcttcatcgagtacgttatttaaaaatattaaagatcagtatgctaatattgcaattgacggggaggatgatagtgagtttgcttttgactttgttgatgagggtgaacaaccggttgatgagcggtggtgtatcgtggcgagattcctgactgaacatgctattgattttgatactatgcgacatatcatggcatccctttttcaaccaagtaaaggaatgtatgtcaaagaacttgagccaaactgatacctccttcatatctatcatcaacttgatattgaaagagcgatagaaggaaacccctggatgtttaatcacatacaatttgttttcgagcggctacaacatggtcaagacccacgatctcttattatcaataaacttgatatgtgggtgcaggttcatggtctaatgccaggctttaaattcgaacatgtgctatgggagttaggaaactacattggtacatttgttaaaacagatcctaagaattttcaaggtatttggcgtgactacttacgggttcgggtgaccttggatatatctgtcccgtaaaaaaggaggaagaaacttcgaagaactgctgctgaagaaggattctgggctttttttaaatacgagtatgtcccaacgttttgtttcatttgtggaattttgggtcattctgataaattctatcctcagttgtttgttttacctgcggatcaaattgtgaaaccttacggagttgctatgcgagcgcaaccaagatggaggaaccatctgatcggtgctaaatggcttcgtaccagagctgaagaagacatgtcctctggtgatacttcgagatctaatgctgtaaatttgacagcaaacagaaatctcctgcatatataatggaggaaatttggctagaaatcaggagaaagttaatagcaaatcaggtgttatcttaaggaatcaatctgaaggagacaagtgtgggaaagctataacacacaatattcctttgatagttggtcatattgatatggggcataatgttgagattggtgaggactcacaacttaccatattggatatcaaaagaagaaggactaatgagttaatgtctagtgggccatgtgtgttggatctttctaaaaatgggccgactgttatgtcagcacaagataaaatggaggtctatgatggtgatgttagtgacaatggggcttcaaaaaatggattgttggtgggtgctggtttccaggctcaccgttcattatgagtattttgagctagaattgctgggggcttaggaacccatgggtttttcaattcttaacggatcttattatctgaaagggtcccaattttatctttctctgtgaaactttatgtcggaaccatgtgattgatcgtttgaa

SEQ ID NO: 37009 - DNA, 2693 bp, Cannabis sativa
  modified_base (43)..(46): a, c, t, g, unknown or other
  modified_base (1911)..(1923): a, c, t, g, unknown or other
ttagttattatttgtttaaaaaaatttttttaaccaaatgtannnntaaaaaatcaaatttccctttcctcaatataaaaaaaaaaaaaaaaaagaagtgtggagtctaattttctcctcatatttaccatctatctcttttgggcccaacccactaaattttattgttagattctgtttaaaattgatatgtataaactgaaattgatttttttatttttaaaaaaaataatatatttcaaaaccaataatataatagatatgtgtacatataaattaagaaaatagtattttttgcatataacagtttatttctttaattactgtaactaaatcgtaactgtaaagacttgtagaatgcgaaatcacaataacaagacagttacagaaataaatattgcaaaatttaaagcttaacacgagaaaattatatgtgtatcagtgtttttttaaatactactagtccatgaggtgatgctcagagaataaaatcaattagtaaagtatcaaagattacaaaagcaaattgacttaataatgatttgtcacaactctttataatccaccttgctaatctaatctctgaatagaccaaaagtagtgaactccctttagctaatgatgtatgctcacttcttcccaaaatgagtttgacaaatcgtttcccgaagatatatgctcacttcctcttgaaatgagactaagaaaagtcttctcccgaataccaacaattgttcaaagcttctcttcacctattttatgaacaacaagagtactttacacaaagatagaaaaacctaacagaacactctaagtttttacaaaagacactcttttctcacaaacactacaaaaaacaattacttttagtgacaattttttaattacaacataaattttttgtaacaataggtctaaatcctatgctcctaaaataatttccttttaaatatacacaaattttttgtagtaatttttaaaaatatagcatttttttttttaaatacgagcacaataacataatttttctttggcctacaaaatatgaacatgaatagttgtctctttgtctattttattgggtaattcttgtagatatttggggaagctttaatgacatgtattgccttttgtattggatattgtagacccacggtgtgtgtcaattagaaaacaacactaatagtctaaaacaacaaaaatataactacaaagaaacaaaaaaataacaaaaataatatcaactttcctcactatatttttgttctacgattttttttacttagttttgacaacttgatttatttttttattctattacattatttttttttcataaaatttattgttaaaactttattctttaaacttttttttctcttttcttttttgagttagtgatagttaaaaacaactatcaactcaaaaacaactaaaaaataacataaaaattaataaaaaaaaataaatgcacatatatacaacaaaaatattatctggaataaactaaatatacacgataaaaaattcacataaactaaacaacaactatacagaaaaaaaatatataaaaacataaaaaaataactacagaacacttaaacaacaacataaaaatagcaaaaagataattataaatcaacagaaaaataacaagatatcaatcttgttaaaatgtgtaaataattcataaattattaactctgaataaactacaaaatatcaaaaaaaaaaatatatatactacttttattaatcatgtaaaagataaaaaaatataggaatgcccttaattttttgtaagaaagagaaaaagtattaaaaaatgagatataaaaatatacacttattatatatatacaatgataaaaactgctacttcaaatcataattttttagtcacaacataannnnnnnnnnnnntaaatgtgacttttagtcataacaaaatgttacttgtgactaaaatatagtatttagatatatgttgtcactaatttagttttaatcacgaaaattattgtgactaaaaatacatttagtcacaacatagaattgattatttataattagtcacaaccttttcacttttagtcacatgttttgttgtgactaaaaataagattttttatagtgagagaaagaattggggaaaaaaaaagacaaatagaaaaagaagagaaaaaattccaaaatatatatatgtatatatatatatacttgtggtaatacacttacaaagtttgaaacatgttacaatccttttttttttttgtagcaatgaataatttcattgaaaaaaaaatcatagtgtcatacaaactttaagtcttaagaaaccccaataaaaaaaaaagaatctcatcaaaccaaactagttctctatccacccaaagagcatgccgagctaatccatgtgcaacatcattggctcaccgacgaacatggactagggatgctccaggaaaactggacatcaaactagctaaatcctcaaacaaggaaccaagttcattgaggaaagaagagcgtttagaaaatgcatttacaaccgctaaacaatcagattcaacaaaatataaagaaagtgtaggaatttgctgttttaaccctacaccaacaaaggtaataatatcagtattaaggtcagaattgacctttccttgtctaagtaaaacttagaccaatacgac

SEQ ID NO: 37010 - DNA, 3436 bp, Cannabis sativa
atatatatatgtttattatttaaagttatacattccattgtccaacataaaaaaatatcatcggaaaaaagaaaaaaagaagaaaaaaaaaaaagaaacgaaatcctccgcacatgaaaaaatttatttaagatagagaattacaataaaggagactattcttaatattgcattattaagttgttactacctaataattgactctagtgaagtgctaaggatatacaatagtgtaaagatattttacttaaacacttttattaacataaaatttagaaatggtcttattgattttatacacacaaatgactcgcgaaatttagaagagttaattttttttttttcttttaagattatagtaaattattttagtatgtttaagtatagagtaattaaccattttgttctcttacattagattaagggtacgacaacaaaactgaaattatcaaatcaaactcttaccgtccactcagataactaaagttgtatacatttatgtaaaaaaaatttgtttcataataggactatgtataggttatatcaattttttttttaatattgtagttttttttttttttttttgctttttacatataaatcccaaaagaaatgtaagagttcaaaattccttttccaaccagacaaatctttagtcaacttttgcccttatctagagttaaaattgaagctcaatgttgatcatgtagttgtgtcctcttccaaagaaaaagaaaaaaataaaacaaaacaaaataaaatatgtacagtactagtatagaattaggtagacttaggaaggggtttatagaatttatctcttttgaatgatgtaactaatgatggttgttgttcactttcttctatctcaaccattgaactagtgtttgtgtatcttattattattattattattattataaactaaatatattatttattcaattatcaaaattttatcacaaattaatatttaatagctactaaatataatacaaataccacaaattaccaaaatacatgagtaatatgagacaaacatacacacacacaaatttcttttattacaaggaatatttacgcataattacttaatactttaggtttgtaaccaggaattcaatgtttttaatttttagcgataaaactactcaatattcctaataatataattttatgcaataatttttcaactaaggaagaaaaatatcaataacgttcaaaataatcagtactttaaatttatttaaatattagagatatttttggcactgtcataattaaatatatatatataaatatcacgaaaattaaaaaaaattcacaaatattattcatttttgtctccaaatataaaaattaatgataaaatccataaaatattaataaatttgaataattataataattcatataatttaataataaatagaagtcttattcgatattataatatcgtattgattataccatcatataaatataataatatttgacacacactatttgtagaagtattagtggcatgcaaaatccaccgctaataagggtagtattggctacagaaataagattttgctgctaatgctacttgtattattattttttattaaaaaagtactattggcaggctccaccattattgcccgtcgctaataactaggcgggagttttcttgcttctttcattcaaattattattagcggtgagccccatcgccaataatactaaaaaaattaaaatcccatcaacgtactacgaatctaagaagagattgaagaaattagggttgagttacaagtctattcatgtctatcaatacaactgttacttattttacaattggaatacatctaaggaggcttgttaagtttgtagaagtagtcgatgggttacttctgagaacagtaacgaggaaaaagttccttgcaaagtgatgcgatactttccgttgataccttaactcaaaagactatatagttcgaggattatatcgaagagcatgatatgacatcatactggcaaattaaaagatgatgggtgatgcgatattcggttgatggtcttgcttggaaagagtttgatgcaaagcatccggagttttcaagagatccaagaaatgctcaattgaggttaggtgctgatgaatttaatccattcggtaacatgagtcttccatacaatatgtggccggtggtattggctatctataacctaccaccttggtaaggtatgaaagataattattttatactaaccgttcttattcttggtgcaaaatctcaaggtaaagacatggatatatttttaagatcgttagtagacgagtgaaaggagttgtggagtaatggagtacccacgagagatattttaaccaacacgatgtttacaaagcgtgcaacgtttttgtggacagtgaatgattttcttgctcgtagtagcttgtctagatggagttgtcaatgtcacgaagcttgtcctacttgtaatgaagacacaacttctattcgagtaatcgggagagacctcttatatggccatagaaggtttttgccaagtaatcatgcaatgaaaagaaacactcgatttaatgaaaatgttgaaataagacctcctccgagacgatttacttgtgaggagatattagaacaagttaatgctctcaaactgtaaattctagaatatcatcaagattttagaggcatgaaaccagtggcggactcatgatttaaagtgagggagcatattttttttaggtaaggcaaggaaaaaagtaaagttaaaaagaaaaaaaaaatactattggtgggaactcttgagttctatcttatatgttattcattttaaccattaaattaatattaatattatgcttataaatatcatcttttattacaaatatatgtcatagttaactaaaatgtacatacattttttttagaaaggacgactgtcccgcctcgcttctatgtgggtctgcctatgcgtgaaacatagaagagttgtggaagatggtgattggaggaaaaaattattttctacgagctggagtagtggagcacaaatattttaaagcacaatacagatgtcatgcatgttgagaagaatgtgtgtgatagtctccttggcatcatcttagataatgataaatctaaggataccaccaatgcaagacatgatttaaaaaaataggtgtcagggaatcattgtggatttatgaagatgaaaatggaaggttgaaaaaaccgcatgctccttatgttttgacagttagaaatttatatgaataaaataaaatatatgaatgtgtatataaaatgcgaaattaaatgaacatatacacaatgtaactataggatcgaaatactttcagccattgattctttgagcttcagtcctatacaagctttgatctgcaaaaaaaaaaaaaagaaaa

SEQ ID NO: 37011 - DNA, 3654 bp, Cannabis sativa
gaacagaatactgagtatagaccctcatatctcgccggtattcggcgctggacaccgtacccacccgcgccgcgtcgcgccgcccgactcaagtctatagctgcagctgctgctctgctgttgatgtttgctgctgcatgcaatgcaatgcaggccacgcctcgcccttttcaatgccccaaactactgcaccttttgtctttgcttttcccacattcttctccattatgtttatattattcaactttttctgttcctctctctctctctttcttttcctatatatttatatctttaatttatatacgtaacgaaatcccatattcccatgccaatttgtagtgcttacgtggatatatattctctatgaccaattacagtgcaccatggcttttactaatacatcacctcatgacatgtcatgtcaatatacatatataacacataaatagctagcttagggagaatataaccaagtatacaggaatatgtgtgctattggattataatgctatgcatttgattattatccactatggtatattgtcgttcaaaacgtgtcacggttcatgattgattattgcactactttacctaagttccacgccatatatatgtttataattctcatcttgatcttccccccaaaaaacttaataactataccccaaacattattcattactacctacattttgtaatttgtgtagatataaagaaaaaaaaaacaataagaaaagatgcacgctatattgtcattaataaaaaaaaaattaaagggatagctataaggtcaaaccaaagacatgacgaagcaaaagagaagcattgatgatgatgaatattatcatcatcatgtttaccgtttgagaatccagagaaatgaaaatatgtaatatgaaactcccaaacaaacatatgcgcgtaagggtcacgtcagaaagtccccaaaaaaaagtgatctttttcattgtcttatatgggggttactattagttactacttttatatacccgacaacaaggaccaacttagccgacgtacatctctgccaaaaaataaaaattttaaagacacccaaatttggtctgactaaagcaaaggctaagctattagattcaacagtcattacttattagtcaacacaacacaaaatattttctcaaaaataataaaaaacatcaaaacatataatttagaataactaaaatttttcctatattaacttgtcactaataataatatgaaaaatgctaaaaggaagcaccctcttacatgtcaatattactattggtgtaatttagtattgggtcccatatagtttaatataataatttttaaggagtatcgctaactaatcataagacgatacgttttaagggtgctaagcaccactaatactcaataacaatactctaataatatgtatctcctcaatgaattgttagcaatcttaaatatttttccataaatttaaatgttagcgaagaaagggatttttgttagatttcgttagacttctattaatatataattaataaatttatctcctcaaatatgactcatacccctccaaacttttaccatttgtcaatttttttttaataaaagatgaaaattttgaaagtgatcaaaatttacaaaatataataatatagttgtctcaatttaggaataaaatttctgattatatatttaaagaaaatcacttaaactctaactgttataaattaggagaatatttactatcgtaatagttgattataattatgattttttaagagtaaaattgaagaggcaaaatatatttattaattaccggatactctctttggtagacaatatattactctcttaaacctgtacatagccgtcttctatatatatttattatatatgtatacatctgacataaaccctagccacttttggcgaatatgcatgtaatgtttcgaactataacacctcgtgagtacagacaacaatcctattaaagcgaaaacccacgacatcctccacccacgccttgcgacaagaacagacaaactcctcattattaccaaactacccttttcactacttctatagtatctataaatatataatctctaattttaccaaaccaaaacaaacataacaccctcaaaccaacattttcaccactactactactatactacttctctcttttataaaaacgtatatataacgtaaagataaagaaaaaagagaaaaatgcaataccaagcagatggttggggttactatgtggctagcggaagatgcatgggtggaggtgacccattagagagggtggcgaggcttgcggcggagagtgctgtggtggtgttcagtgttagtagctgttgtatgtgccatgctgtgaagaggttgttttgtgggatgggtgtgaacccgaccatgtacgagcttgaccatgacacagtattaggaaatgacattgagagagccttaatgaggctactcggcaattcaactcctcttcctgttgtcttcatcggtggaaaactcattggtggtatagaccgtgttatggcttcacatatcaatggctctcttgttcctcttctcaaagatgctggtgctctttggctctgatgatatagcaaattaattataagtactacttcattaaaaaaacaaaagcaaaaaagaaagagagagtggggaattgttttttcgtgatctccaatttcgtatacgtttggaattatgttattttatgtcacattttcgatcattattatgtctagttaattagctaattaaaagagcaaatataaatataatatataagagctgtttttccgaggcttaataagttattttgttgatcatctttgtttggggttgcacaatcatttctagcactgcatactaattatccatatgattttccttttgtatatagaaatggatcacaaattattcccccaattttttttttacttctccaataagtatttgtaactaatgtatataaacgtgactcttgtgaaatttggtcaataattaattaattaattaaaagattaattccttgtagagacacgttttttggtaatgaattagataaataaaacaggaacagctattgccacgtacgtacgcaaagcttggaaatctgcaaaccaaataatctatttgttgggtaatgtaatgtacctaattacatcctataactttaaattttagttcactggagaattcagtttttcttcttttctttctttttttttttctattttttttatgaagagaatttagtttcttctatttatttaaatatcaatgcctttggactgtactaactaatctactgttttgataattgcttgccacatttgtttaattgagatatttcttatttgctgttacttttttccttttttctctcaaaagaaaaaagaagtgttctttttccttttgccagatattattacagaaccattattgaattattgaaaagcttctgacattttttttctttctttggcgcagccttgtttcttcatcagtattggtagatatagaaaaatgttaaaagtcactgttggtaatgtcatatcgctaaataatagatgtgattaaaagtgtagcatctttcgataaaaaagaaagaaaaagaattaa

SEQ ID NO: 37012 - DNA, 12055 bp, Cannabis sativa
attgtagagatatctatgtagctacagtgcctatggtgaccattattagttattttattgcaatatttgatagctcattattggatttggaaagaataagaagagatatatattgtcatggtaatgaagacatcgtgtttcctataaaatgcatgaacttttttttaccctcttgttgcaatatcgtctccttgaaagccttaatttatgaacttgtgaaggaaatttcatcagatttaattcattagttagtattaatgtttactttttctacaggccaggattaaacagtggtgttgttggagttggaaaatcagatgtaatgtcacaacagactggcttgggcatccgttcatccctccctaggaccgatccagatagcagttctcttatcaatgataagagagatcgtcctattggttcagataaggaaagggtgaaccttagagctgttaataagtaagtttattaacaccactctctttttttttttcccagaatgaaaatttctcaattgtattacttgagaccattgttctctgtatatctattttaactccttaattttatttatttagagctctatctggctttatcaatctaaatatttttttattgttctaatttacttcctcctttttgttgaaaatactcagggcaaatgttcgtgatgatttaaattcagctagtcctctttcaaatgcaaaagtaaatgcaactgttcgggctccacgatcaaatacaggagttgtgcctaagttatctcctgttgttcatagagcaactgcttccaatgactgggaaatttctcattgtacaaacaaacccccttctggtgttggtgctaatcgaaaacggacggcatccacaagatcttcctctccacctgtccattgggcaggccaaagaccacaaaagatctctcgtactgcaagacgatcaaattttgttcctatcgtttcaactaatgatgaaactcctgccatggatagcccatctgatgttagtaatgaccatggtttgggatatgcaaaacgcatgccgggcagttctcctcagcaggttaagttaaaatgtgaaccactgttgtcagctgccttatcggaaagtgaggagtcaggggctgctgaaataaagtctagagacaaaggaaaaaaatgtgatgatttagatgagaaagctgcacagaatatccaaaaagtgtcacccttggtgttgtcatcaagaaagaatagacctgttactggggaagaccttggggatggtgttcggaggcaggggaggactgggcgaggatttgcttcaacgaggtcacttatgccaatgggagtagagaagataggcaatgtgggaacagcaaaacagcttagaagtgccagacttggtatagagaagacagaaaggttcaacattctgtacttgcctgtattctggctatctaatgaatgattcttctccctagttttctttagttatgctttttgcttttacttggagtggaatctcatagtcttatgattttttttttaatctcagtaaaccgggtcgtccaccaactagaaaaccttccgaacgcaaaacctatacacgccaaaagaatacagttaatgtagctgcagattttcttggtagttgcacttaaatcttacaagacatgcacttttttattgatctattattataaaatttattttggttttatgttttctactttcttacattcactaattactctgtttattagttgggtcagacgatggacaggaagagcttttggctgctgcaaatgctgccgttaatcctggtactttctctgaaaaatctgtatattcagctacctttatatttgcattagttaaattgagagttgaattattgctgcaggccgtgcctgttccagcccattttggaagcagatggagcctttttttggttttatttctgatgcagacattacttacttgaagcaacaggttaactgtttttttaaattatattttattttatccctaccaatttgaatgtttttctattgataccttttgtcatatatgttaaagattgttagctattgtgtgtgaatttcaaggattaggaaggcccctgtaaaattttttttccttatgtctatcagggaaacattgaatcaactgtgcacactgctacccaagctccctcaagtgtagatgcttgcaataatgtgcctaatggatttgggttaactgaatctgaatcaaggaatgatgaattcctttcagaacaattaatatcaggaacaggagatcataatgaaattcccctttgtcaaagactcatagccgcactgatttcagaggaggattatagcactggcaatgaagatctgaaagttgatgaatatcaacctgaacttgatctggatggagagttaggatcaaatagtttggatcaccaatcattacttaactttcagtttgctgggaaggctgcatttaatggttataggataaatgtgcaatcagaacacaatgagctggaaactgatatggctgacattccacacaagacaatgaactcgaacttgagtcattcattaaatggcttactacctgaccaagcgatgatagctaacagaccctgctcagaatttcaatatggaattatgcctttgaatgagaaactcctcttggagattcaaagcattggaatttttccagaatcaggggtaggtcaatattttacaagaattcttgttaaacctgtttcgcattttcttcttttctctacaactgttccatttgcaagtatttgattggttccttggtggcatagttcacgtcagcttcttcaaattcatcatttgtaacccttgggagacttttttcagttacatttctacttttttgtttcttagaaggtcatcagacgtgttttgattgactatagaggatggtttttattatatgcttcaatctcacttttttcttttttctctttgtgtatcatccatttctataaattttttttttatgttttgttagcctggcatatcacatataagtgatgaagaaatcagtcaggagataagtaaatttgaggagaagtatcatgaacaggtatttccaaaagatattttttttttattattttaaatgcattctttgtcctttcatggctgcactgaaacattctactgaatgattatctttcatggctgtaaagtcaatacaaattatgttagttgatgttgtgtacgtttgctgattcaacaggcccttaaaaggaaagacttgatggattcgctgttgaagtctgcctcaataacaaaagaccatcaagagaagtaataaatatctccttattttcttatttaaatgcttcttataccataacatcaactaatatttctatttacattatattatataatttattattctattttgtagggagtttgaacaatgcgctcttgagaaacttgtcacaatggcctatgaaaagtatacggtatttctcgaagcactactttattttgtcttactagtcttaatactgtattctctgtgggactcggtgtcaaatatttttacattttttttgtttgctggaatttgtattgactttacacaagtgtgttaacaatttgaggcttctagtatgtaaataatactcaagtaatctgcaaataaagggtctgttattgaattaggaaagggaaagttatggatttaggatgatagcaaatttggtgcaatggaaaaccatggagattaaagaaagagagtttgtcaatcatgcaagacaaacaggggaaagaaagtagaaaaacaacagagatgttctgataaataattgagtttataaatcaacacaagagtgcttactgcttaacattgttaatcttatttggagaccgacaagttagttagaaaataaagtagactaatggattataaaaatgagagattaaatttaatatcacagatattgataggataaatcttaaattcctaattatcataaccttatttttgttattataaaacattgagtttgaaacgtgtaaaatcattttaagctacaactagaagtaagttatcgtgacttaatattacttgttttctttcaagtgttgagtgaccttgtactttatcctttacccttgattccttagatggcattggattcttaaaattttttgtgtgttaggcttgttggggtccgaatactagcgggaagagttcaagtaataaaatggccaagcaagctgctttagcatttgttaagaggacattagaacaatgtcataagtatgaagagacaggaaagagctgctttagtgaacccttatttaaggatatctttctttcggggtctaacatcaattatgctcgacaagctgattctgcaacagagggtgaatcaagcaaaggatatgcttccatccggcatttggaaggcagagtttcaggtaattttgttatttaaaaaatatgtgggacatgtgatgcacttgtttatcttacacgtgtccaatttttgctttttatgagaaattggtggccaattatggagagttttctctttgttcttaaattgtttttggggtgtgtgcccctatctcttctgcagcttccatgggctcacatcagagcccgtcacagttcaatcagaatgttgataaccacgatatttcttcagatgtaaatcacttatctgaacaaactatagggaaagaagatatgtggtcaaacagggtgaaaaagcgggaattatcactagatgatcttggaaatacaattggcacttcaattactccagtcatgggaacatctctatcaagcagtgctaaaggaaaaaggagtgagagggatagagatggaaaagggcacaatagagaggtgttatctagaaatggaaatgccaaaatagggcgtcctttatcgaatgctaagggtgaaagaaaatctaaaacaaagcctaagcagaaaatgactcagctatctgtttcagtaaatggcctccttggcaggacatctgagcaagtcaaatcagcaatgccttctatgtcaaggtcaaacgaaatgactaggaccaacaatgccaaggaaaagaatgactttggcttagatgtattggatgaacatgagcctcttgacttgtctcaccttcaaataccaggaatggatgtactgggtgtacctgatgatcttgatggtcaagggcaggatttgggtacatggttgaacattgatgatgatggtttacaagatcatgactttatgggcggccttgaaattccaatggatgacctctcagaattaaatatgatggtttgaagctttcctgtatagacttgttcattatactattgaccaacaaaacaaaactgctgttgtcaagaaatgaccagttatatgttagtcatttggctctcctgtcaacaattagtttatatagattcttttttttaggctcctgcataagttaatttttgagtgaacctttcggatgttttttcttttattcttctgtattaagttggtgacttcgactgtaaagttctttttgttcaaggtacaagttagtacgtcttagtgattatatcttagcaaacatgtatcctcgctgtagcttttaaaaatcagagaacaatgcctcttgtaaatatatttcataatcctaataaaatcagctttttgttcaacgtgagaatccctcatggcgcagctaagcataagaggtttgcttttgaccctactatctctttgactttgtttaataaacttttgttccattcaattttaaatctgtggaatgcgttcatatatctatataaatgcttgcaagtatctatgtctttttgaagttttatgctcttcattgattccggtgcttttcgttaccataaagatatgttcatggtttgattactgcagattgagcttgccagtggtaagaattcttcttttatctagtttttgtcagcttcactttaattttgaggcagatttcaagtggcaagttggttttggattcgcttgtaaggacaatctaacctggaggaaatcaagcctcaatcttctttcatgtattcatacatcttacttggtaagccttttaatatgttcattgtatcattttagccattctgttttctgtttgtacagtgaaagtctgctgcacatattgtcgttggaattgataatttgagtttcttagcatttgtgcagtttagctgcacggcaactcaaatgaattgacgtttatcactgcaactcacaagatcatattgtgatgttcaggtcacccatcattgccaaatagtcttatttcaggcactcatttttcactctggtgtgttgctcatcaggtcacccataattgccaaatattcttttctcaggcactcatttttttactctggtgtgttgctccaggtcacctatctggtcccttacatcagtttagaaagtcatatttgcatcgcaagcttcctttttgtttgtaggtagcatctgcatcatactatgattcacattcacttgtgtcatttttttattttttctgccataccaagtgttggtttcttctgtaacagttccactgcactgtaatgattgttcagcttaaattttgttcttccaaagatgctctgggactgaagtgagatttctcgagtaacaaagtcctgtggaactcatgatttggagtgttgtttttattaataacgattaacttcttaaggacatgttataatttacaccgttcattttgacatttcacaaagctactgttcattttaaacataggaccacttaccgaagtcttctttctatttatgtaagtatgttgacagattgatgagtgtttttgtcggacaaaaatgggtgggaatcaataacttgttcccactcttgggaccttttttaatacaatgcctttttaacaggaccatgctaagataagaaggcttgaaccatggtatttccaagattcgacctgaaccggaatattctatttatattgtattcaattcctatagcaataggtatctcttctctatccattttcattgtattccattccaataaatatatatatatatatattaatatttttctctctctttctgtaaaaagtcaagtaggttagtattatgtagagaagagaattatgcaatgtttgacacgtggatgctaattttcaaagactcgtctccaagatgaaaacctttaatttttttttttttgataagtaaatgaaaacctttaattaatatccatcaaatcgctggcaatggaagcaggccccaccaaaaaggaaaaaggaaaaaaatggtagcatatcatttacttgcatttgcatcataaattcacatcttttacttttcacaagtacaaaaagatcatctcatcaacaataacaactcctcgacaagaccgagaaaaacaatataagaaaggaaaagaaaacgtcgtgttatgctatgcattgcatatatggtcggtccccatctatatgattggagagctagacacgtgttagaaaatcagaggcttggttgcttgctggtgtcagactttttggagctaaatttaaattcatgagagaaaataatcgaaataggaaataagatacaatttaaaaatttgtcagtttcagtcaagtgcatgaatgaatatgatgtatcttctattctttgtttctttgtatctgtttttttcattgtctaatgtctagactataagagaaagtggttgttaattgttgttgtacatctcccccaggaaccctctcatcttctgccacctcaccattacatcaccagccaatttttacagccattacgtggcaccattttacagtttagtcttctcctttgaacttttttttttttttttttaatgagaagtggggaaatgaaatcagaactttcttggaagacaaaataaatattatttctagggatttcttatagtaaatctattatttttaacaagtttagataattaatttggtgtgtggtggaaaacccaagtcatatatatgagataaataatgtatcattcataatgaagactaatttagacgtaagatttatattaaaatattattaactgatgactaatcatcatatggattaaaatcttgttctcgacggaaaaaaaataatagaagtattattaacaactgacgactaattctagccatgtgatttgattaaatatagttaataattagattaattaaagtaaaactattataatggactatatgttgaaacaagttactagattatcttttacttaataataaccagaaattaatgtctaattagttaagcatatatattagaatcgtgatcttgacgtttatcaacgaaagaagtataacttgtccaagtgcactacttactatgttgaacaatcagtttgtttttcaaacaatttattttgatttgtcagaggcaaaatcatctagcttttaatttttttgttaaagtaattaaagtcatctagcttcaattatgtacactactaattgggaaaagaaataaggaaaatatgggcctgtagtactaatttagtatttttaaacatgaactgaaacaaaagtataatctagtactaaaaaaaactaaagctgctgatgctgagtcatagacaatggaattgtctttttctgtccctaaaaaatactttacaccaaatatgagtatgtaatattttaactacgtaccccatgtatctgtatacttacgtgtcttatcccatttctattttaattttaataattttaacaaaataataataaaaaattgtctcagttttcatgttaaaagatatgattcttctttatttggatttataaaattttcttcctgtaaatgctggatacgtgtagatgctttggctttggtcaattcccattttgtaacaaatctatgttgccaatcatagagagacacgtgtcgaagttatctaacattataattgtccttcttcttggtcacttcaactaataccaacctgcaccagagtttaaaaacggtaagcaaaacctgcctcaccacgtgttctttttttgagactgtttgctttgcttcctcctaccctaaattaattaattttattttttattttattttaagggctgagagatattttagataaaagtaggtgtgactcacctttcttttttattttcattttatttttatttttaatattgaatattgattgaagggtggtttgattgatacacatgaaagtaattgaaaagagagtaagagagccaattttatgaggctaaaatgggttgcctctgaccttggcaaaacaattacacctagatttttcttttcactgttttatttttttttttaattagcttctttttcagaaccccattttcacgtctctgtgtttattagtttttcataaaggttgaatcttttaatctggtttatttgaactggatcttggtagaaaaagaatgtttctaaaacatctttaatcttcatcttggtgagaaaagaatgcaaaaacagtgttaaaggttttagctttcattacattaaagctattactgataataacattgaagaagagacttgatgaagaagatatcatcctcacctgttgctgtaccttataggcttggtaactttatccatgaagactcaacagtaacaacccaagttgagattaatggccttaagttaatttcaaacacagcatccctgttttctaatcccaatgccaagtcaaacacaccatgtgaatccctttgttttggaagtgaaagttataggagtgcagagggtgaaaatactgagttcacctcaagaggtaaaggtaataataacaataataataatccctttgttaataactcattttctccatctctggatttggtttctgattccattatgaacaaaacaacaaacactaaaaaggaagttggtaagtttgaaaataccactgggaacatacccagtggtgatatggaacatgggcaggaagaagatatggttggagtagttgaggttggtttggagggaaaagacagttatggatctgatgagtctgacccatgtattatgtctaccttgccatctaaggagaaaagaccatatagaataacaaacagcagtagtcagaatgttttggatttggattgtttacccctttggggtttcacatctatctgtggaaggagaccagagatggaggatgcacttgcagttgtacccagattgatgcaactcccaattgaaatgttagaagatgaccaccaaaacttggatgctataaatcactactcaactcaatcaactgcccatttttatggtgtatatgatggtcatggtggtaaccaggtatgcttatactctacttcatactatatcttctatgctatatttttacatggtatgtaaataggataggattctataatttggtctcattataagtggacactgttttcattaggtggctaattattgtcgacaaaggcttcatttagccttggttgaggagatagaaactgcaaaagcaggcttgcataatcgaagtaagagggaaaattggcaggagatgtggaaaaaggccttctctaattgttttgccaaagttgatgctgaggtttctagttctgctactgttgcccctgaaacagttggttcaactgcagtggttgcacttatttgtccaacctatattatggtggccaattgtggtgattcaagggcagttttgtgtcgaggaaaagcaccagttgttttgtcaattgaccatagagtaaggcctttcactagttgtggtgttttagagctctatcagttaattttttgttcaaatatttatagagattggtttcttcttgtgttcttcttcatagccagacagagaagatgaatatgaaaggatagaagcagccggaggcaaagttatacagtggaacggttctcgagtttttggtgttcttgcaatgtcaagatccattggtatgtcaaaccacctgtgcttgatgaatttttgcttctacttagcttccatataattacactgaaacaattatggccttagagtttgcacttgaaagatttaaaaccatagctgaccaagctactatccaatatggatatgattaggtgacaaatacttgaaaccatggattattcctgatccagaagtgatgtttgtttctcgagcaaaagaagacgaatgcctcattcttgccagtgatggtttatgggacgttatgacaaatgaggaggcttgtgatgttgcccggagaaggatccttatatggcataaaaagcatggcgataacttgtcgggcgaaagaggccacggggttgatcttgctgctcaagctgcagcagagtacctctcaaagcttgctctccagaagggaagcaaggacaacattagcgttatagtggtggacttgaaagttgtaagaaaattcaagaaaaaaacctgagagaagagaagcttttttctcttctcttgcaggattttgacatgtgttataatgacatgaatataaataacaattatttaacgtgattcagcccttcaatttttttttacaaaactgggctagttgtgatcacaacactaatgtatacctacccaatattacaatatattatatacttttaactttatttattttcatctccctttctctctgtgatactacattgactctgttcccaaaatttcacaccagaaaagaggcaaactgtttgtgagtgagaagaaaaaagagagccttaattgtaataactttgtaacccaacttagcatcaatccggcaagaaaagggggttgtttgcttcctttcttcaaagcgcctgcccttttttttttataaggtgattcactaccgaagcgaagaaaaggctggatcaagtctcgtgcaagtataagtggaaagaatgtggtgatgtcactgcttttcctggaaagcgtccctttctcgtgtaaaagtgatcaaaatttgaacacgctgcgttttactgggaatgatcgaaccatgggaacgaatctactta

SEQ ID NO: 37013 - DNA, 3698 bp, Cannabis sativa
agaataacactcctaaaagctaaatattgatgcgcagaggttgtctaggattcttagttactacagtggatactacccaacctatgtcatctggacctgaaaatacgagactggtgtgcgaatttctaaatgtattttcaaaggacttacctggattaccaccttcccgagagattgagttcgtaatagagttaattctgggagtgaaactagtatcaaaggtaccgtaaagaattgaaagagtgaagatccaactccaggaattactcaacttgggatttactagaccgagttattccccttagggtgctctagtgttgttcgtaaaaaagaaagtctggtcgtcgccgcttcgaaaatgtgtattgactattatcaggaactgaataagctcactatcaagaataaatatctgctaccccaaattgatgacttgtttgaccaattaaagggtaagtcggtcttttcaaagatcaatcttcgctcaagttaccatcaaactgaaaattcgggaggaggatatccaaaatgtaatgataagttcttaaaagaaaatttaaaaagtaaggacagggtttaaaagaacttcaaaatgataattcgtttaaagaaaaaccttagaattgagagcatggcaggttaatacttacaaatcagagggcattatttagttgtgaacattacacaaacagctttaaggcaaattatttggaaacaagacaaacattcagctaaagaattaagacttttttttttcttcaaatctttctaattaatccctaagctgtgaattatgttgtaaattacatctgcgagaatatttattggtattctaattttcacaacacaacaacaaaaaaggcatattagagtaagattttaaagtggaaaactggtttggacataattagttccatttgatcaaatcaagatgacttctttttcccaaacagtaagcctagtgaataagtgttccccttttgtgcagcagcctcaacccgccttccccctacctaagaaaaccataatagtggaattgaacaacaccataaaagacctttgtttgagccaaatacatcttgagactaatatgaaaaatatataataccttgtccatgagccaaaacccagtagttggcatgaattgcaccaaatacataacggctagtacaggctgcaaacaaatccatattaatcataaatacaaacagaacgaggcaatttttttttgtaagggatctatctgaataaggcaccacttttcacctggtttgatatccaagcttcctttagtccatggctggcagcaattattgtaagctccgcacacctttctgatgtcacccgtttctgttatttaagggaaaataaaggctgtcatggagcaagtatgcagcacaaaaggcaatgaaactaatgaatatgatgaagaggggtacaaaggtggagaataataacctctgaaacacctctattttctgaagttgatgctcctaagttagttgttgttcctattggcccggggcaaacaacggtaaccctgattcctttctggaaaagctgcacaatcaaataaggtataagacagaaattgataagagaagataaggctacaatgaggtggaacaattcaaaacattttctaaggtaaaattaactttaaagtgataagttaatcaagaagtacgcagaaggggaataattcatcttttgttatctacatgtgaacataataattcatctttcatcatcaagacaatgatggtccaggatttctggcactaggtttcaactatgcagtttgcatatattcctttttttttctaatcaaactgacaagtaagaacgccaagaaaatgaggatactgttgtctatcccttgtttttgtgttcaattacttcattggtacagtgagaacagctgtgcctcagattcaaactaaacctgcaaatacaagggaaatctgcagtatgttctttctaagaagagatatacctcagaccgcaaagtatggaagtagccattcagagcatgtttagaagcagagtacatggcttgacctggtgcaggtgtctttccagcagcactactcatctacacataatattggagcttacaatgaaggacaactcagaaagaaaccgagttttgatccatttcagataaaatgtcgaaattagtatcggtgaatgatcaagatgaacatccacataccacaacaaagtgaccctttccccgcttcagcatgtaaggcgccagcattctcgtgagagatattgtcccaaaaacattgacatcaaatgttgcctataggtaacgaagatacctcattaaagtcatctaaaacaaaaaattgaattatttaatctattaaacatcaaatgaaatattcaaaacccttgaatatatattcattgagagcctaaatcatttgagttttgacaatgtaggccaagccatcagccatcagccaaacacagaaggactactgactgacttggagatgaggtctaacattagttattccaaaagactccttttatgagataccttaagaccttcctccgacacttccaaagctgatgttttctgccaaagagccaaaaagtaaatgcattaacagagatcaatgattttaaaaatgatcagtacagtaactaacttagctcactaaaatatacaataacttaattattatcaatctcaagttcttatatcacaaacttattattcctcacttacaggacgctcgaaagctgcattatggaatatcatatgaacaccagtatcaggaaaaaatgattctgctttcagtacagactccttgagagaatcttcaccagatgccaaatccaatggcaaaatcttaacgccgtgaggagcatgcttacctagaatacaaatcttaatgaaaaattaaggacatttaacttttgaacaactcagatagggttataaattcgaataccagtgagctgttttttgactcgctccaattcagcttcatttcgtgcagaaagaataagcttagcccccaaattcgctagttgctttgcaagaacttcccctttaaatccaccatgaaacatggaaaaggttttaatttacttatagatgaataagaataacatttcaagtacacaaaaattccataggtttatgctttcaggcttcgtttggcttcacaaggtaaggcagtaagccagtacttcatgctagtgtaccttttcacacagtgaagctaagcaccaccataaaggagcacatgaagattttgagacaacaataagaaaaacccgctcaagaatgtggattcagttataatatatatttttcaatattattacaacttgaaaagaaagccaactaagaatatttaaaatatgtgctttaatcatttaaacaaaagataatggcccaaaattttacatcaactttttgcaataaagtggcataaacattaaactaaattcaacatcttagcagaaaataattttaaacactagcaagaaaataacaaaaataaatcaattaaccagtgcacatacagaaaatgaatgttgaaaacaaaaatataaatgtatatttaccaattccacgactagcaccagtaatccaaataacctgaaacaataatcaatataattcatttactagaggaaaaaaaaactttgtttttttattttcaaaaaaaaaa

SEQ ID NO: 37014 - DNA, 4108 bp, Cannabis sativa
tcacttttcattcacttcacttcctcagtcaaaataaacaaaaacaaaattcaaaacgaggtcgtttccctaccttccaacccgaatttcacgtcacgattaggggaattctaatttttatttttctcaaaattatatatatatttaattatctagctataattcttgaaattcaccgacgacgaattgatgcagtgagagaaaagcttgcacaattcaacttccatcgatatggaaaatcacaagagtttcacatatatgggaaggactttcagtgatctgagcgtcggtgacaattccactgctttcagcgactgcaacagcgacagatccggcgaattcccgacaacttcgtcgcagagccgccggctactgctcgcttgcgcctccgataactcggatgagctaattcatcaactcgtttccgacctccagtcctgttcgattgaggagcagaagcaagccgccatggagatcagactccttgcaaagaacaaaccagaaaatcgccttaagatcgcagaagccggtgctgtgaagccgttgatttcgctcttgtcctcttccgatctccagctccaggagtacggagtcacggcgattttgaatctttcgttatgcgatgagaacaaggagcttattgcttcatcgggagcgattaagcctctggttcgagcactcaggatcggaaacccgacggcgaaggagaacgccgcttgtgctctgcttcgcctatcacaggttgaggagaacaaaatggcaatcggacggtcgggagcgattccactgttagtgaatctactcgagaacggtgggtttcgggggaagaaagacgcatcgacggctctgtacacgttgtgctctgtaaaagagaacaaaatcagggccgtacacgcgggaatcatgaagccactggtggaattgatggctgatttcgggtctaacatggtggacaaatcagcgtacgtactgagtgtattggtatcggtaccggaggccaggacggcgttggtagaagaaggaggaattcccgtactggtggagataatagaggttgggtcccagaggcagaaagagattgcggtggcgatcttgttacagatttgcgaagatagtgtgacttaccgtaccatggtggcccgcgaaggagcaattccccctttagtcgctttgtctcagtctggcactaatcgtgctaagcaaaaggtaacataccctcctcctactgtccaacaactacaaccgtttcccttctttctctctctctctcttggctttgtcagtttggtcgcctgagcctgtgagacttttgtgctccggtcgatgactctgtccagtgacgtggcacggcctttttataatatatatatatatattatattacaaattcctgttttaatggctgttttcattgtttcattaatggaagtgaacgctgttgagccacgtcataatgcttatcaagtcggccatttgttcaattttgaaaatataaataaaacactaattaagggaaactgtagtttttagttaaatttaataagaacattaattcatcatgatatatattaggctgaattaccattttaccacacctagacattttcatgtcgtggataaacctttcctatttttccaatatgcgaggctagacatgtctttttggtcggtgaagtgccggtatctccactaatatattaatatactaatagagttttgccaagtcttttgattagataaatggttaagtcgaattggtatgtttttgttgttgttggttgcttttttaaaattattattattatttttgggtgatgaaaaagagaattaaaatataattgtgtctcacaagagtgggttccttttgtcgttttttgtgtcgttttatgtggacaggcagagacactgatagagcttctacgacaaccaagatccggcaacggcgctgccagagcttcggacgtgtcagcatgactgccccattacttatcagtgttatcttgtccatttgtccatgtagcccagacattcaatcccacactgaaagtctgaaagtcttatttttcttttttaaactaaaacaagaaagaaacgacaacttgtaaatatttatgcaatacaagagctttgtgaaatttgtgatggaagggagttcgattttcgaattttaattttgttatgttttttgttaaccagctgttaagatttgaaaaaaaaaaaaaaaaaaaattgttcagcgtgcgctgcatctctctctctctcttatttttttccttttcccgaacgcggcttactctcttattttgacctctatgtggtatgtacttctctaaataaagttttgggataaaatattgaagaagtaaggtactactactgctaggcccttccttaatcactagaaaatgattatttaaatagaagactaatcttttaatttattaataaaaaaaggggtaattatatatgtatatatcatccgcatagaacggcataaatttatacagatgagatgctttgtgtttgtgttttatagtttaatcagagagaaaataaatgttcaattaagttttttatagaaaaaaataaaggagtcccacgagattggcgtgcggggaaaatgggtccagaatgatggagagtagcagtagccgtaagctactttattttgtaatttggaatttgtagaacgttaaaccgtctagttgtttggcacgtgtaatatatatattcagttattagtagcggttgttcgttcagtcacatcattattgagtctctttcagctgtgtctgggtccctagttgacggctgataattatgttggaatactatttaaactttgctggtcacgccttcagtgtctcgtatcgactatcaactatgtttggagttgagtttttatgcttaaaaatacacataacgacaaaacagccaaattatttcaccttaattgtttctatttgctgtgcaaaaaagcacactcaagaacaaaaccaagtcattgtacagtgattaattgggttgaacataaaaccagaaattgagattaaaatgaaagcaaaactaaaattgtagcagaaccacaaagaaaacaaaacgttgaactgatttaggataaatccaagaacagtacagccggaaatcgaactctcaattacattagaaactcacactgtgagacatgggattaggcacacccaacctcattatacaactctttttagaactgtgcatgagttgggttggccgggttaagagtattttaatgacccaagccaatgacatctacctataaatttttaacaaattcacatcctaaatattttataacccaatctatttttttttttttttgcgggttgggttagtttaggttagattataacccttattccataattaaaaaaaaaagattttgatattatcaaaatcatacataaattaaaagttctaacataaacatattcatccaaagttacaaataattcaagatctaatattacagtcatctaaaatttaaaactatattgtccataacaaacttaaacaaaatcaaaatcagtttcgatatcaacctcactcaacaatctcaacgtcaattgtctttgcttttgatgatgattcattgaccttaagttttttgttctgcaattatatataaaaatatagttagtagttagtcaaattattataaataaataaataaataaaagcataataaaaaaacatattcaatatttatcaagaaaattatatttacctataagaaaatcatacactctctcataagaaaaaaaaaagttaaattataataatattagcaactacaaaaaaaattatttgctatatagtatatactaaagatcatagtaaaaataataacaaatctatgaaatcacaaataaaaaaaaatcctaaagaagaaaagattataatacatttatttgcaactaacaaaattttgtatgctaattgctatatgctcaagattgcaaaaaaataaccaaatcataaataaattaaaaaaaaaaaaaatagtagacagtagcaaaactaaaataaaaaattcatatagactacctttttatcacaaaaaaaaaaaaaa

SEQ ID NO: 37015 - DNA, 5472 bp, Cannabis sativa
tattttagtcacaagtagttttttttttttttttgtgacttcatttagtcacaaaaattttatgttattagctatttttttatagtgcttaatggtaaaagatgaatgaaaaaaaaagtatggattagaatctaagatctctaatttattagttgattgtgataccgttagttaaaaaaaatcacaactaatgcccttaaaattacatgaagtgtgttctaccaaatatatctcatattaccaatgttagacttagaacattaaacttaagtaagcacttagaaaaaaaaaggaaagaaaaaaagccttaagcacttttgatcaaatgttaaactttggttgcattggattccaatatgaactccataagcacatatatatcccaaactcaaagactcatttcaacttctttaaaaaggatcttcacctttaatttcaactaatatcatacacatcttctaatcaaaatctcacccaatagtcttccaccacgtgtaaagtttccatgcactttaccttacctgattactcgtccattcccatatttccccacttaaaaagagtcaaagttacaaactttaacggtatgatttcaaaatattatttattttttttgaaagtataaaaataaaagaaataaaaaacaatgaaaaggtttgtggtgggaaatgtcaccttcttcagcttggtccaccattggtatatttattgagtatttacacaaacaaagccaattattaaatactcagacaaaacccacagacccatttattataaaaatcaatgactcactcatttgcttcattttttttatttttctcaatggatgcatcacttttatctttcccaatgggaaatttttatttttatcatttttaagatacaagtatgcaaaaatatgattttttttttctcaaaaaaattattttatgaatttttaaaataaataaataaataaaaaagataagaaaaataataagagtttttttatttatacacttcaaaatattttttttattattatttttacagaattctacacagaaactcatatagcaactaacggagcaatttaaattgtaactaaaattcgtataacagctcacataaaaaccatcagaaaaactaccagaacaatccaaactgtaaattttttttttaaaaaaaaagaagttaaaaaataatatatagaataattcttcaaaataatataaagtaattagttaattccttaaagtaattaattatctctctcattacctaagagtacatagttacttttacttagttttcctatattttgatattaaaggattaattcatataatttaatagatttaatggtagcatgttaaatttagaatttttattagaatattgttaatattttttttattattgatgtgttaaattttgatggttattaataaggtaatttattttttctttaaaaaaacaagtttggcttgacaattacaacgttcttaaaatggttaaaatgggaattgaaatgtaattaattcaattcaattcaattcaatttaatttaattaatttaagagagatagaaaagacaaaacacacgcctgcattttgtacataagacacaacacaaaacaaaacaaaacaacatatgtatattattgtatgtacgaatgagtgagccactaatgtcaaatgcaatgaaaacccaatctaatccaaacccaactcaactcaacaaagccataatctttgactctttttttccaatgatttattcttcttcttcttcttcttctacctttggttctcatcctcgaatccatctaagacacgcatagtccggcttttacggagacttgtacacctcatcaccatctaccaacgactaaaacatatttttacttacttacttttcttgacctgacatcctcaacctcaattattgccaaccaaccaaccaaccaacccaggtgttgaagtgttactgtgtgtgtgtgtgtttggagtttaagatttcttgatttcacttgttgattcttccttttgggatccaaatctcatctgggtattattatttttaacctgttttgtctgattagaagtgtttagggtcaaaattggcatctgggttttgatttggtgagtttattgatcccttatattcaaaggttgcttctttcaattatgtttattgattcactttgccttatttaagcatcagtgtttgatatttgaaaagggagaaaaagaagaaaaggaaaaagatgtcccttggtggtggtttttgcaaggaaatgatagaatcccatgttacatatggagattgtgatgcatcatcagcaacaacatcgaatttggaattaagaaattcacctttcaagaaaggtgtattgactttgagtgaaaatattggaatagcttctaataatgatgtgcatgaacttcttgaatgtcctgtttgtatgaatttgatgtaccctcctattcatcaggtactactaattgctcatatttcatatcttacatgtttgtattgtattgaattgtattgtagaagaacccgaaatcactactcttttgagcttgaatgattcattggtaaacaagttgtgggagttttaaatgttaaacaatgttaatcagagctatgtttggaagttggattttggtcggaaaaaaaaaggggtaggggaaaagaaaatcaatttctcatgtttggtatgtaaagaaacaattttcatatcgaacatgaaaaattgattttgtttccatacttttaaattcaacttccaaacatagcctaagtgatcagatatgtggttacagaatgccaatactgttgcagaagccataaacatgaatatttatttagctatgttcctatactttttcatagttaattctctgaaaatgtgtttgtatgatcttctcaatcaatgtacattgcctataacttgataaaaacaacagaaaaatctttgttcaagatgattatttgtgtcatcctaattctagttttgtaaaatgagtttacttctctttgttcttagtgtccgagtggccacacactatgttcaagctgcaaggctagagtacacaattgttgccccacatgtcgccaggagctaggaaacattaggtgcttggctctagagaaagttgcagaatcacttgatctcccttgcagatatcaacttttggggtgtaatgatatattcccatattacagcaagcttaaacacgaaaagaactgtaagcatcgcccgtttagctgcccttatgcgggagctgaatgttctgtcaccggcgatatccctttccttgtgatgcatttgagagatgaccacaaagttgatatgcatgatggctccactttcaaccatagatatgtcaaatccaatcctcaagaaatcgaaaatgctacatggatgttaactgtatgtccctctctttctctccataaatctcaatcatataattgattagctttttagagactgagttgtcaagtccttgtgtctgaactatttagagtaaaagattgctctagggagataccaaactgtcttgaaaagttaagaaatttataatgccttacttggtatcaaattttattaacatacttgattttcgaactaggttttcaactgtttcggtaggcagttttgcttgcatttcgaggcattccagcttggtatggcacctgtttacatggcctttcttcgattcatgggggacgatgatgaggcaaagcaattcacctacagtcttgaagttggtgggaatggaagaagacttatgtggcaggggatacctcgaagtattcgggatagccacaggaaagttcgggacagtcaagacgggttaattattcagaggaacttggcactgtttttttcgggtggtagtaggcaggagcttaaactgaaagtggccggtcgaatttggaaggagaattgagctgaataaatacattaagagatttttcaatatattggtgtggaaaaagaatgaaaaaaaattaaaggcaggtaggaaaactattaggaatttcagtgtaaatgagtagatacatgttgttttgcttgaagtcagattactgtattgatttattaataaatctatgaaggaaactttctttgagtaatctttcatctctataaggaataaggataaggtgtagtagttaactacgtgatataagaaaagaatagaagaagcatttgattccttcgtgcatgttccacttggctcgggggatatagctcagttagtcgagctcggtgcttgcaattgggttgttgcgattattatttgggtgtctaattgtcaaggcggtaaaatgatagtatcatgtacctgaactgggcacccaaacatgacactaaaaattctaatgagacaaagatgggttgtgaagaatataaaggagataggatgggtagttggtaaaatttagtatggaacatgaacggtaattaaagttgatgactctcttaaagttccttcatctggcactggagaagacgagttagtatttcataataataattatggatttaaagctataaattttcctatttataaatgtatttttttttaatactatttggcagtctgaatatttttattataaagagtttttagttccctcttccaaatgaaaaatgagcaactaagaaattggaaaaaaaaatgaaagattcatttgtattatccggtttgaattaataataggataataaagaattttttttttttttttttgtaaattttaaatattttttttacttttaaagatttttttttaggattttttatttttatattttaaaatagtttttttttttctttttttttacaattttacggaattcacacagaaatttttataacaactaacaagcaatttaaatcgtattcaaaatacacgtagcaacttacataaaaatttccggagtaattcaaattgtagatttgaaaaaaaaaaagttaaaaattgtatctaaggtaatttctttttttttttttatatatatatatatttacggtattttataaaaacaataccaaaacaacaaaaaaattacataaaagtaattggaaaataacattaaaacaacaaaaaaaaaaaattaacaacaaattaacaaaagtataacataaaaatacatcaaaagaccatattttctataaataaaatcataaaaaataataaaatatttaaaattctatacaaccgtattttataatttttttttattatttttatgtatttatgacataatcccttaataataaatgtaaatttaccataaataagaaaaaaatcacttctttaccaaaagagtttagcaatacataaaatacaagtttattctttttattagaaactaattatgcaggcatttttctagttggaactaccaaataaaacgacaccgtataatttccttcatgtttataatttgggaaaaaaacaaaaaa

SEQ ID NO: 37016 - DNA, 5856 bp, Cannabis sativa
tttttttggcaatgtttacaaaatatagtttattttttttaaaaaaatattttatgaaaaattaaaaaattaatttatttgttttaaattttctcataaaatatatattttttttttttttttaaaaaaaaactacatttttacacaaattgtaaaaagtccataaaatgtgtaattttgacaaggatcagttcgatccaatatagcccaattcgatttagtgggtacttcaaattcaaacgggagccgccaaaattaaaggcccatataaaaatcagtttttcgttaaaaaacacgactttgaagtttgaacaaccaatgctctctctatactctcttccagatcggaaccaaatcaaaccaaaccagagaacccaagaaactaaaagcaagggctcatgggtcgtggtgatgggattttgggtaccaacgacagagcaagcttaaccagtagacggaaatggttgaagacgcgagagacatggcttgttgtcttaggtgttgttcttcacgctgtttacatgctcagtatattcgatatctacttcaaaacccccattgttcacggcatggatcccgtcactcctcgatttcatacccctgccaagcgactcgttcttctcgttggtgcgttgatcgtagtactctacctgtttgttgaattgttgaaatgaaatgaaactcttttgttgatactaaatgcattgaacacaaaatggggttgcgtttattcttggtttttcttttcatagcatgtaaggaaggaattgaatttgtgctgaagagtgttactttgggtcacaacttttttcaaaattaatttaaagttctgaattttatgtcattatatggatcgtatcgtagtgtttcttttttgaattttcataagggtggaatttgtaaaaagcattatagaaaaatggaatgcaattttcattcattccttagtttggtttcattttaaatattggaactgtttctctctggaatgactattttattttgaaatgattggaaaaaccattagagatgagaaaaactttattttttttttttataaattttttatgcattttaaattcattctatttctattcccattcaaagaatttatgtgttttcattccttccaattaaacgcaaccttagtttgttgattggaaaatgactaaatttattcatttctatgctgtggggatgaccaataaaacaaatgcagctgatggtttacgtgctgacaaattctttgagcctgattctggtggaaactatagagctccatttttaagaaatgtgattaaacagcagggtcgctggggagtatctcatgctcgccctcctacggaatcaaggcctggacatgtttccatcattgcgggtttctatgaggatcctagtgcagttacaaaaggttggtctttctttcatagagatgttaattgttttgtggcttccctttctgttagctaaagacactcaattgccttttcaggatggaaagcaaatccagtggaatttgattcggtatttaaccaaagtcgacatacatttgcttttggtagcccagatatagttccaattttctgcggggcattgccacacagcacctggaaaacctatcctcatgaatttgaagactttgcaactggtttgattacaatcttaaacaatttgtttcaagctcatattttacctccctggttctgcctatttcttcatgcataaataattgctcaaactttctttgcttcatcttaaagttgtgcttataaatattgtttcgatacttttgaattttagatgtttagtaaagatcattacttctatattaactttatcatgacagatatgaattgatagtcttaatgcagatgccgcctttctggatgagtggtcttttcaacaatttgagagcctttttaataactccaaacaagacccaaagttgaaggagttgcttcaacaggataacattgtcatttttttgcacctgcttggatgcgactcaaatggtcatgctcataaacccttttcatccatttatctcaataatgttaaagttgttgatgatatagctgcaagagtttacaaccttcttgaagattattacaaggacaatcgtacatcatatatatttactgctgatcacggaatgagtgacaaaggtgagatactactcgatagccttttagttgttgtggattactttgcgcatcaatgcactgaattatatgttttttggactttggatttcataaattgctaaaacctttcactaattaggcaagttacaaaacaacttgatactcataataataatgataaatttattgtaattatggaagaacattcctaggtcaattattatcgatattaaactaaacattaaatgtttggagttcaactcttcaaaacacttccctttggtttgtcttcagttactttttgtttctctatcacaggtttcctaattaatttctttgggcctgtgcactttcttcaaacaagtgaacacaagtggagcttaaaatagatggttagcatctcacctaaaagttttccaagccccaacacctggccacagactaagaatggctgcttgtgttcaatacacaaattatttccttgtccttgaatatggatgtgtcctgatttctcagaatatgataaattatttttctgtttacatttttgttgttagttgaaagacctaattatggtttatctaataggtagccatggagatgggcatcctacaaacacggatactccccttgttgcgtggggagcaggcgtcaaatatcccaaaccgatttccagcagcaatcattccgactgtggttttcgttttgttgatgaacatatgcatgatgcaccaactcctacagaatggggtcttcatgacttagaaagggtggatgtcaaccaagctgatattgcaccgctcatggttgtacattttgattccataatttttttttatatcctctttaagttattgatagttgagacttatatgctccttaacttctatggcagtcaactcttcttggtatgccatgtcctgtgaactcagttggaagtttgcctcgtgattacattaactttaatgaggtaaaattaggtagtttttattccttgagtgaagtttgttaattggaacgagaaaataaattttgaaggcttcagatcaattagtttcataacagataaagatgtctgaagattgattaacttatttttttttaaaggcaacagaagttgaagctgtgctagcaaatacgaagcaaatccttaatcagtttcttcgcaagtcacgtatcctcttgttaacttatattgagcttttcttttcattgtaattggcttgtaccatgagatttttttttacgtcttttgtggatgagatatggtactattttatatattattccttaacaaacaaacttagaaataaaacagtcaaattcaataagtttcaagccctttaaacctctgtccgattatacctctatattggatcaaattgaggaactcatatctggtaaagactatgaagctgcaatgaagttagctgaaaatcttcggagcttggcattgcaaggactccattactttcaaacatatgattggctgatgctcatgagcgtaattagtcttggctacattggttggatgatctatcttgtgattcatgtactgcagtcttatacttcattgccagtacagcttcttagaaaggaattcacaaattaccagagagatgattacaaaaaagtaagctcttgtaagcctgaacttgttagctttatttatgattaataaactggaggaagaagcatacaaaaactaaaatataaatacaattctttgtggcaggttcaattttgtggatgccttttgatgggagtaattagtactctactgtttcttgagcgttctcctcctctttaccatgcgtacacaacaatgacagtatttctgtggacacaaatatttagtgaatatcagtttattaaagcatcgtggaagctgttgcatggaagaagagtttattacgccgctaaaattctagctacttgtgctgtgtcagtgttcattcttgaatttctggtatagaaataaagcattctacgaattcctgctttttccaagataaagtgacagtataaagttctaaactatgctatgttccaaccttgcaggtcaatagctttaccgagaggaagctctatactctgtatttcctggtagcgggcgtcgtaggttctctatatctatacaagtcaattccatggagatctggaataccaatctttgtttgtgcggtgtgttggtttttatctgttttcaccttgatgccagcagaaattccagagaacacttatttagtgtgagtgtttctgtgttttttttctcttttttttttttagtggagggagagtaagtttgggttttagccagtgtgtgtcagtttttagaggcaaaaggcccatacgagaatctacagattaaaagcgtcatggctacattaaggattggtatttgaatagagaacaactaaggaatggattagaagttcttaagatttgtgtataagtattctagtgatgttttgctgttacaattttgctttcagaatagggagtggagctatgatcatcgttattggaattgcagcgaggtggcttgatctgcatgcaggagggaataaatattggattagtctctgcaatcatgaaaagaagaagcccaagtttcctatgctcttccttctacaggtgcaataaagagcttactttgtaatatgagacgcttaacctttgtttgttctttcataaacatataacttgagtagaatctaataaatatttcttttgggggattattattctttatgtttttgctattcaggctctttttgtggggttatcatctattatggtgccattatcaacatctcacaggacacaaaaacaagaattgcttgcattacaccagtttatcaactggtccattgccgggtaaaccagttttgacgcttatcatttttatttttgttttccttttctttttggagaacattctattacaatattgttttgtaaaagaagcctatccactgttgcattttcattctgattttgctcaactaactgcaatttaagactgtatcatttagaactggaacttacatgactatttatacccattacttctttgtgtcgtaggattctcaatgattctgcctttgttttcggcaaacagtcttttgtccaggcttacctccatatttctcggtttcgcccccactttccttctgttgtctattgggtatatattttatctctttcttttctttctttctacattctaatgaaattgttggttgatatgcttcaacatgggaaaccatagtacatagttcatacattgaaatcttcatttgagaacatctttttccttttcaccatgtagatacgaagcaatcttctatggtgctctttctcttgtacttgtggcatggatactatttgaaaacacacttctttatgtaaggaaggtgaaaaggccttcagcatccatgaaaaatttggaggataatgtacttgaactagatgacagatacttgcaactgtttgatatgaggattccattgatctttgtaagttattttccctcccttattgcacgtttcttactttatctctaacaagtttaagtcttctttccaacttctgcttcttcttagtatgttcatagtcttatcaccataggtttcagatacccgaattattttgacatttatgactcttaacattaaactgcctctgattagctaattcctgtgatatt

SEQ ID NO: 37017 - DNA, 4796 bp, Cannabis sativa
ggaaaaatatagggttccaaatgagtgtattccctaaatgttatggaacaaatttaaaatcaacaatactgtaattgcagttcattgaagtatattatttacaattcttttaacactatatcagatactcaaatgactatggcactgtattttccaacctacccatgcttgcttcaactaaaaccacaagcagattatatataattgaaaatgaattctctattgctcaccttgtgtcacaacttctaaactacacatcatatacaggcaatcgctcctcgataatgacacgacagatagggcatttcttacacttctcacagcatgttctgagaagaagcatcaaatcaaacacatgagcgaactgttataaaattttttggaaataagcaacaatgcaatatggataataaatttctatcttctcaatcacatttgaatggtttcaaaaatagatgaattttcaataaatatgttacccaaatgaggattatcctccttgatataataaagtgaggaaaagaatggcaatcaagatcaatagggtgatcacttacctacaaagaatgtgatgtctgcaaggaagcaaaacaatgtcaatctggtcttcaaaacatattctacaaaggatcttttcctgtgtttcatttaaatcagatcaacatctcagcagaagaacagactcattaagatataattgatacgagaattataatttctctagcacttgaaaatcattaaaacacgattatgataagactgaaattccttctaacgatgaaaacattcttttttccccaccttcttcttgcagcagtgataataacttctaaggaaaacattcaaattttgcataattgtaataaatttgcaagagctgaaaattacattctgaagtctttcaaattcctgctgactcgcttttgtaacttctgtttgctcacttagtgcagcttgtaatctccaaatctgcgcagagaagaatggaacaaataaagcaactgaacacagtccaatgtttatttaacttgatagagaaaaggatgttgcatatagggagaaagaattaataacagataccacagtagcctagaaagaaaagttcacctcatcaacaagatctgattttggcatcttcttcacagtatcgggtgagaaagtgttatagctgaatcaaaaagatataaacaaattaatatttatccgtagctttatgttaatctacaatactttgcttttattgaagcacataggattatccaagaaacaagaaccataaaaaataaatgattacagaaaccatgcttgcacctaaaaagctcatagatacaagaaaaaaaaaatacaaacattgatcaaccgcagcagacaacagttctttgatatgttgccaaaatcaacaacaataaaatcactattttaactacacatgtataatagccctcagaattgaacttggagtaaaataacgtatatatcggaagaactgtatacatcaactttatacttcagatcgccatcctttaacataaattttatatggaagatgtgtttcaactgcctaatctaactggtttttaattggcaaggcagagttgcaggtcaaacatctctacctaacagagagaagacttacagcattgcagtgtctatacaattatttaagttgcaaggaacttcaaagatatggttataatttaaatcacctcataaatggttcaaataactgagcagcagataagtaggaagcatgcatatttaggtacagtaaaaatacaattgtattcactactacatgttaaaggcagtagaaaatattatagaaacacaaaccctgaattccctgcactatatagtctagcctgttcctctcgacttccttcatcaattgaccaccaacctagcaatctgttatcaaataaatgtagtgattgggatattcgttaaatcagcaagataaccaatcattcaaacttaaaattctcaaaaacataccttgagccacgatgcatgaaaccaaaaaaatcttggacttttgatgctatggaaaaatatcttctggatctactataccttccaaaatcacccatatgagctagaataacaattttctccacaaatctgtacatagcaaataataccccagctccttgcagcaaaagaagaggagaaaaaactgcaggaactgagagatgcccggtgcctgatgttgttccctgaaatgtgctagaaatgaagataactaaaaaaccttcaacaaattgcccaaacaaacacttataataatatctttactacctctaagtacataaaaagcaggatctggaaaacaatcacaggtactttcataatatgtccaccaatatcctgcaaatcacagatcccactctggtgctgatcttcatctggagaaattactatacctctgttccagtcaagatatctgataactgaggaggaagaagcagatgaagatgaagaggcttctctgatttgagaatgcctatgtattgccggattataccacttggtgcaaacaagaaaggcaaaaccctctgcaattctatgaaaaacaaacatggattattttcacaggtgaggagaggactagcatgggcattaagggagaatatttttacccaaagttaataaataagtcccaccatcctaaagcagctacgtcacctacatcacatgacattgacattataaagcaatttagtctgaaattgcttaatgagcttttaactattaataccaccagaattttgtagaagattgattctggttagaaattcatagtagagaattgtgataaaacaaaactgaattccacattgagaagtattgaaactgcagagtattccagtcaagaataaaattatactcaccacatatcttcagaagagtgaatattgttgcagcaatgaggaacaccatagatattgaaatccagaagtgctagtaataaaataaagaatcataattagtttactgaaaaattataataacggaaattatgcattaaaaaaaacatgagtggtaaaaggaaataacatacacaagtaagaccataaaccatgaggccatgactattacattcgagttgatataaaattaataaagaacacatctctgaaacaccaagattgtcataaccctacgcctaaaccggactcgactcaagcaactaaatatatatatatatatataaattatacatatattttctacaaaataaaagttagaaagtgtaaaataattaaagaataagaaacaagaattcaaatatccaaagttttccactttcttggttctaacttcttatattcattaatttgaacttttaaaatttcatcgtgatattgttttgggaatttgcaatacagcataatatcgatcatttgcatatgttgcatctcactgaaacccataaataccaagactttgtaaaaagaaatattctcaatatgccccttcactaaagaaaaattgatgctctgcctctgatagtatcatttgtaaaacttcaattattcaagcatatgcagtgcaaagccaaaatccttagagagtataatcatatagaagctaatgaacagaatgaatcgattataaaaggtgtcactatgatcaataaattaaacatttggctgcaaaatggttaaaaatattcaatataattataatagcattaaagaaatgtctccaaactactctatagatgataatctatgagcgcaaacttacaggaagggtctcccatatcacatcatcactcatgttttcatcatctccaggcattagagctctacacatcctacataagtgaagaattgaaggttaagtgacttttgtaaactacaaaaatgtaagtatttattgcatgcttggttttgtagagtttatccaataattccaattaccattgcagaataaatatatctatttaataattaaaaaatcaatgattctaactattgcactaaataggtcaaccaaaaatttaagttaaggccttaaaggtgaaaaggcagagagagacagagatacctgatattatcaaccaatacagctagttcaaaaactagcaggggcagaaaaacaatcttcaatgtgacaactgcggcaaattatatttcaccaagaaaaaagcagcaataaggccaaagcattttaaatcacattcacatgaacactatatcatgatcatcaacttattgtttaaagaatgagaatttgaagaaataatacagctttcaagtaacactcttagaaaggcaagtcacgaactgaagtagaccactgcttgacagcgaaacgatgtgactttatgaagaaaacacacacacacacatgtagtatacaaaggggtaaaatgattccagaagtatttaataattactcttagtagaaatactttcaacataccagaatcgttttgaagatagatacatagaagaagttcaaaagccacaagcagtggagttgccaagacagcatgaaaaggtgcccactgaacatgacagcaaactgtattagttgggtgtataatgtgttagtgtgtcactacaataagaagtttttctttggaatatatattctcatatatcaaaaaagggtactatatccaactaagttggagatcactatcatacattgcgatcacgaggcagagatggagccggtaaggagaaccgagctcgtgcaacaactacatggaaaagccacaaaggggaaaatactaccctgcagagtaaccactgaaaaaattacattccaactaaataaaaaaa

SEQ ID NO: 37018 - DNA, 6970 bp, Cannabis sativa
  modified_base (49)..(59): a, c, t, g, unknown or other
ttttaaaataaattctaaaaagatgtttttataatttttaaataattannnnnnnnnnnccaatataaatatgccacgtgtacatgatgtacatatatgcagtctatatcagcagttaactgaaataaatagatgacaccttaaatttgataacggtttagcagtttggagagttttaccaccaaaatttgagattggatggttaagtgcaagtgaaatgatagttgggagggtttagccgcaaattactctatataaaatatacaaaaataaaataatgattgtaacactaacacgtgttattgattggtttgagagaaaagagagtgtaacattagaataataataaaaaaaagtagtattaaattataaattaaaaaataaaaagtaataaataatcaattatatttaattaaaatatatatgctcaggattatttttgtaacgatcttatatattagaattatttttaaattatttttttttttttggataatttagtaaaagttaaatattttatttactgcacaattatttttttcacatgcatgtaactgtttaactttgtttttcatactctaaattatttgattttttttaaaaattaaaaaataataataaataattacacagccttaataggaacagggatatttgcttgccaaataacaatattaaaattcatccttaaagcaaatctaactaaactatgtatcgatttattagcataattttttttcacataaattttcaataatttaaaagcagcattagctaaggataaatcatatatttttttttagtttaattaggatttttattctgaactttaacatgtactaaattatgccctctgaacttttaatatcgttaaaaatgtcccctgaactattgaaattgttagatttaaggacttttgtcaattttttttcaattttactattttaaagattgtttatgtactaaatcatgctcccaaactttaatatctaccaaatcatgcacctcgaactttgacatgtacaaaattatgctctctgaactttcatccatgttagacttttttactaaaattggaaagaagtcattaaatctaataatctcaatagttcaaggggcatttttaacgatgttaaaagttcaggaggcatgatttagtatatgttaaagttcaggggcaaaaattctaattagccatttttttatatataaaatatttattctttttctttaatataaaaaatataaataaataaaaaaacatgtcacattagtaacattacacgtgtaagagactacactgtgcgtttcgtgttcgtcttcgccgatttggacggacgacgacgacgacgacgaaaaagaaagaacgagaatcgcagagcaatgatagtctgcagagccctcttcaggtatgcccctcccctgaaatttacttcaattactcaccatttttctttctttcttttcttaacttatcactccctcaactttgaactgtttcttctctttccttcgttctgtaatttatattcgcaaaacccgcttaatttttttattgttggtcaaattagaatcaagcagttacaaacacttacatactatcacccttgacttatctgaagatacctactatgctttatcgtgttaacatattttttcaggtcaaattacatatttttttaataaatatatgtggattttgatattgttgcagagcggaccgtgttctgaaattaaccaattcctgtagtgcattgaagccagtagttcatgttcaggttggattatttatttatttatttgttttatagcaagaatttagtggaggtactttgagtttttgtttaataattttgtagtaaacagagaaataagattttagaaaagaggaactttgtaatttactgaagcttattgcacttttctgtttcgtagcaaaaaaattttgaaattaagaacatttattactaaaaggataatttttatcctttttcttctatacagattctcaagaattacattgtcaatgaaactgaacttctgatcgaattcaaagttgcctgttagttttgacatttgtgacatcaaatcctgcgacaggggtatggaacttgtgatattttgaactataaatttaaaatgaccgacagaaaggataagcaccatcaaggagaaaggagtaaaatgctcaagcatattaatcttgcttggagaccagtaaatactcaagccacttcgtatcaaggtttagttttactttgacaaatgcttatctgacgttttctgatttttttttttttctagtgtaaatttgtggggtcaaacattagtaatgttttaacatttttggataacgttaagctagaaatgaagatgtgttcatcactgcgatccaattaagtatatatttccgaagttacatcttgtcaaattttatgttcagttcatgaatttctttcaaagcttccaacttggtattggtcttattcatgtaaaattattgtttgagtggcaggatcttgtgcttatttctacaatttggtatgctatgcctatgcatagtgatttgcctttcttaatgtaacaagggacattgtagttgttgtttttgctagatagtaacctttaatatgtctttgcagaatgctcatcagaagatggcaagattaagtcagaagatgaagtcattatgagtaactcatcatcttctatttctgattcaaatgctcgaaatacggcagaggtaactgaagcagtggctgaaataacagactcaatcctgagttcgagtggaatggatgatattggggatggtagagtttcaaaaggaaaatcagtcatttccaccgaaaagcattccatttcggttgaggtaagattctggatatctttttagcatggtttgagctgattacatcctaattctcttaccacctttttgtttagtatttttcatttttccccatctccaccctttttccagacatgcttctcttaggtacatcagatgtttctattaccacttcatatcagctataccatcactgtcttgatattctacttgtttagtgctacctccttaaatgtctgtcttccattttcaggttggggcttcattatttagattcattgaaggaaaagggtacaacactatggctttaacaaaactcagactaaaatatgtgtgcttatatttccatgtaaatcataatatttttctttcagaggatctactcggaaacagattgaagaggagatgggagtaagcattatcattccatcgtcaaagaaagaagattctcttagtaagttttaaggttcacaattaagttcatttctctctggatttgatgaaaaactgtaagcgtgacatcttcagctgcattatgtttggtttctcttttacaatggtgttaaccttgctgtctgttgtagtcattgaaggtttttcaattgaaagtgtgactcaagcttcagctagaatccaaactatcatcgatcaggtcagtcacccatttattattcgttcacatattttgatttttaaggaaatttcgttttgtagttatttgtggttgaaacagtttataaaatgcatcttcattcaaaaatttagtaatttcataattattgtgtttagtggcttttttcttcaaaaataaaataaaaataattaaatttatcgtctattgatcatgaccctaatcacctactattaggagcagaactaatattttttaccctttccaattctttcttgttaattacaggcagtcaaaagcccaagccttaattactctcacttcatttcacttccactggctatacatcctgatttagttgacaagcttattatgttccagaactctattttagaatgcgatgatccttgcctagaaaagaatgcagcaagtggttcaaatgtagatgataaccagaagttagataaaggacccgatgttgctgttgaactaaaagttgatactgacaaagaacatgttcaagtgaatataaccaacgtacctgttgtcagttatgcacctaaggtttcttctactttatctggtacaaaacttgtcatactctgttatgctaccgatgctaaaagatttagcatatataatttacctactcaactatgcattttgacttggcaaaagtcactttatggtttcatttattagtggtttgcatttagaaaatttactatatatctcttttctataatgtgtttacttcttcagctgattcttagttctacatgtgtatgtgaatatctatttatcattgaaactgagtagagttcatggtcgttatttataattcagttaattatttaggaatcttctgtctcgcaattttttattaatatatctaaagctcaatgactgtatgaacttgacagacatgaggattgacaaatccatattcatcaaaccaaaaacttttcatttaactgttctcatgttaaaactgtggaacaaggaacgagtagctgcagctgcgaaagttttgcaggtaaatttgagtttgataatagctggtgcctggaagtcagtactaactgataagctattcttttcttttccttccagagtgtctcttctaaagtgatggaaaccttggagaatcggccggtctccattagacttcggggtctggtaaccattccttcttaagttctctactaatgacttaacattgaaagatggaacataagccatttggcttaaaaatgtcaataactttaaaaaattgttataagaagaaataatccttcgtatttctacaggactgtatgaggggttctttggctaaagcacgagttgtctatgcacctgtggaagaaattggcagtgaggacagacttctacgtgtttgccgtatccttaacataagagaatttaatttattacatttcattttatgattgctgtactcgaacttatagcagttaaaaaataaatgaaaatagtgtcctggtttcagtatcttttatatttttaaagtaatagttgatacctttgtagttttcttaactgtcttctttcttagaggtcattatcgatgcatttgtcgatgctggacttgttcttgagaaagatgcgaagaacaaattgaaggtatgatgttcaatccaaatatgattttatattaactccttcagccactgccctgctaatgaatttgattagtgcatatttccactgtgttacagtcacaactcacactctgcacatatggattagtacagccttcattttgttacactttctctttatcttgaggtatgtattgttgcattaagtgtttattatcttttcaaatttcagctgcatgctactgtgatgaatacaagtcatagaaaaaggtacacaattaaacttttgactcttcttctgttgttaatgcttacaagatatgttgaatgaacagaatgttttataatgttaaactttattattcttaagggtgagatggtcaagcaagagagagttcgattattttgatgcgcggtccatttttaagcagtttggatcggaggaatggggggagtatgttatacgtgaagctcacctgtctcagagattcgtctttgataacaatggatattatcactgttgtgcttccataccatttcctgaaaaaatgcaagtagactgattttattgtacttttttctgtactgttcttatcataaactagtaccgagacaatcttcaactatatcttctattctagctttccctttctttacattgtaatttcctgaaatgtgagcccctacaaagctaatttatctttgtaaaaccttaataaacagttttatgtatgttgacaccaatgatgcttttaaccaagtctttatcaaccaaattatgcgactgtgatggctatttgtattctaggggatatatgatgacattatgtgaaactaattaatgtacaagctgctttcaaaaaaaaaaaaaaaaaagtaatgtacaagttgcattctattcttattgaaagaccatattatcaatatgctaagagagatttgcagatatccaaagtatatgaaagaaatattttactgtgttttttagtttttaatttttaaaattgtgtttttaaaaataaaaatagaaaacagttttttgtcattttaaaaatttgtggtgttcgtaaaaattgtaaaaaaaaaatatattattaaaaaattgtttttaaaaataaaaaataaaattcttaacaaaacgaagacagagtaccacttcctgtcttgatctcgtgtgctaggttgtatataattaatttcatatatttaattagtattgatgtgttttatttcactcacaataattttaaaaagataaattttattacaattttcctttttaaattttttactatatttacttgatttgatgtttatttttttttcttttatatatgttagggacaaaaacatatctcaaaaatttcttttataatattaaaattttattatctattttaagggttttttttttttttttttatgtaagtcgggtattaaggcctatcaattaatttagccttaggttaagttagacaataagcttttctttagatggaaagaatttttttatttttatctttcaatttgtttctcaaacctataagggttaccaaaaaatatatatagcataacatgttaaaaattaatgcaaatttatattttagtattaaatatagtataaaaagaaaaaagtaacaataaaaatattgggttcaataattaagacattaaatataaatattattagtagaggttcaaaaaataaaataaaaatactaaagtaaacatacttttattaggattaaagatacattaaaaagtaactttactattataccaaaatttattttatgtttatagatatcacttttatttataaatatagattgtaactaattaaaaaaagagcattttacaattttgtat

SEQ ID NO: 37019 - DNA, 1342 bp, Cannabis sativa
agctttgtcgacatattcagagattgagaggttgctcttgagaagatgtgagaactagcctttaagttgtaacagacgagctttggtttgacttgagaagcatttttcaagggcacgccatgcggtaaacgaagtgtggaagtggccacaaatgcaagaactggtttagacatagatgcacgaagccatgaaaggaggatctgatccttctttttccactgagcatattcaggattcgaagctcctgtaacaagatttgttgggggaacacatcggagaagaggatctgatccaggtcatgtccgatgaccgtgggaaccacctgagacttccaagaaaggaagttgttgcgatcatgtttcagagtgagagatgtcgtcaacgagttggagaacggattccaattgttgacgatttggttcagaggggcagcaggagcagtagtgtgaggattggaggtggaagactccatggacgctagtcaggggacaatgataccatgtagaagatgaagtgttaaagagtaaagaaaaagaaaaaacagagaatagtaaaaggagccttaactcaactaagtaggccttagctttatttatattaatccagtctcatacaaacaagaattagaagcagaaaacaaccaactataactaacacaatataacagacaagttagttatttaggtgacatcaacaagaagtttgttaacaattgttgatgtaaaagtgaatgataaacatataagaacttaaagcttctactaaatcaaatcgtaaagaaaatatatttttaagctattagtgtaacaaaaattaaaaagctttattcgtgtatttacatgctctattttcaagaaaaaacaagagttaaaaatgtcgatttttaaataatttttgtagtctgattattttggacaattgatagaaaataaaaatattgatttcattgatttttatattggagttcgtttttagttgagtttacatatttggtaaaacacaactctattttttattttcttttgcaagttgtcttcatttccaccctcgagagcttcaatcctatatatcaatgatgatcgagtttgttgtttgttgtttgtgtttacgataatcattcaattgtgtaatgtggctacagttgctattttgcagattggaagattcagatggttcgacaatactattagtctcagtattaggtttggcttttgttcaaatggagttttcgagtgatgcagtggtagcttatagaaaatggcttggggtttatagcaaggttattaactcgattctagttttggttcaatcgttttggggttttggttgaattgtttctgtg

SEQ ID NO: 37020 - DNA, 3981 bp, Cannabis sativa
  modified_base (28)..(41): a, c, t, g, unknown or other
tacgtgcctcgcacgtagctttttgctnnnnnnnnnnnnnntatatatatataaattataatagttgtgcctaattcagtatagagaaaagtcacacgtggagttaattatatttataaagtcggggatagccggtgttacattaaaaaactaatatttttttaaagaagcataatttggaacaaatactggtacacactttgagagattctaaataccaagctccaggtttaaataagaaacgaaagagaaattattgaatacaaaataagtacaatgaagaaagcaagagcaagagaaaataattataacaaagaatctttgtttattctgtgggctaacttgacttatcatgtgataatcaatgtgtgtaagtaaaaactaatcagcactaactttaccacagatgaagacaattgaagcaactcaactcaaatggaatcagttctcttggctacttttttggttgcttataggatctatgcaaaacaaatatgaatataaatttttgtgtacgcaaaacttgatgttgaactatatatatactcatctcatttgattatatacactatatagggaaaaaaaaaaaaaaaagcaaaccatatcaagaatgccatctgttaacatctaagtataatttatataagatacacaagcataaatgtcacttataaaattgatttgcaaactaatattctgataatctttattacaataagtttgtttaaaattttcttccttctatcccttcgtggataatcaccagctttctcctgagtcatgacagaatcttgaaaaaactgcattaacgggaaccaagatatttgtatattaaacatatatgtatatattaacgacaagagatttattggaacctttaattccctcaaaattaaaaggtggggtgcacctttctttttttctttcttggctttttcacctttaattattagtggaatttcaaatccctggccaattgaatgcctgtacgtaccccacagaacattttgactaaattggttcgtaaaattctccaaataaataattttatcaaaaccactctaatgtttataacagcaattaaccccaactcttcattctaatattttcgaagtgttcgttggaaataagttactccgactaccccaaagcactctcggatcatcatcatacaattactaccatatccaactatatagccatggctcgcaaatcctcatcctcatcatcatcttcaaaagtccaaaataagaagaaatctatctgtgagaaatccctgcttttggtggcaaacattatcaagctttcgtctcttgcgtttgtgagtatcaataactgcggaactagtcaaacgacagtgcctggtcagaagaaaaactactccgaccacaacaactttttgagtagtagttcaagtgccaaagctgcttattatcatcatgaccatgaccataatctcgatcttgatcatcatttaatattggagcgtactggtggaaatagaagaatgggtcacgtgtccaagaaacaaccactattgatgagtgggtcagaacgacatggtgtttcgtatgtcatgataccaccaatcaaagatagtccacccaagcccgttgagttcaaggatttaagtactctggagagaatggtcgaggattttattaagaggaaacatgctcaacatcaacgacaacagtgactatttgtatttgtattctccctatccaactcccctatatataaatatatatatatacacattaattaatactatactcgaggaaataagagttgttaacttttctagccaagtcatgtgccaggttaatttgacacaaataacatcatatctatcttcacatttattttgttgcatttttttttaaaaaaaagtgaggtatctacagagttggattacagtaaatatggtggttaaataaatggtttactataataatatcaaacggtctaggcatggatatacatatatataattgaattgagcttcaacatatgtaccggtctgctattattcgtataattcggataacctttcttatgattttaacatgtgtagtgtctgtataatgtgagcaatattcctcaaatcttaaaacttgggattcatttctattttgtgataccactgtactttaattgcttgtcatgctagatttcacctactatattttaatttctcaagaaacaattaagttgggttcgaaaatcgatagatatggatttccttatctatgatacatttgaaaaataaaccccctttttcaaaaaaccaataaaaatttacatgaaagttggagtttttttttagaaaagactattacattaatgtgaaagcaaatctatatatctatataattgtgttgttggggtatgtgacatgacattctatcattttaatattgtcatttttctattttacggtttttctaagatttgtgtatctttatctatatttttatttatgagtgtctatttattcttataacttctattccattattattattatgtacatatgcattctcataactcacattatttataacacattttattattaatattcaacaatatatatattaatattcaatcttttttattgagaaaattagcagcttttttttatgactatcattcttataatattttattattataatatgacaattgaaaaatttatatctttttattctatattttttattatcttattacctaatattttttattatcttattacctaaaaaaaatattatcaattagtatttttttatttagaaatgaattattagaaatggtacttgattatctcggtatttgtgtactatgtatacaatatatataattggcaatttatttttttcatattagattgtaactttagatgctttcttatatattcatgaaaaatatttaatatatacgactagctaataattgattataacatttattaattaattttattaaaaacaaataatatcaaataaaaaattaattacaaattttattaattcagttacaatataaatttatttattattattaagaactatcatagcattaatgataataaaatttagtgacaacctttcaacttacaaatgtttactagctactatatatatgagctctcatataaatatatttgttctcttgtaaattatgtttttgttagtgctttatatttatatatatatatagttttctttgattcttttttagctttattgtagcagatgttaattaatgtactcatttctctatgtatattatattatgtgtacgtatatatatatatatatatatatttttagctcttaacattttttaattttccatgcatttttcttttggttcttattagaacacaaattatctttacaaaattatgttcttaatttcatgtcattaaagagcaaattgttgtgttttatttgatagcattggacaagtaagttaatctgaaaattatttgtttaagttgcttcttttttttctatatttatataacacatgactttagggaattttttttgatgaatattgtgaaactgtattactcttagttgtttctatctggcacaactaatttattactttccaatttttttttcttcttcttatttattggtatatatatttattaaaaaaaagctatatgcaaagtacatatacttattttatgttacatgctttataatttaattgagaacagttcaataaataattatataatttaaaatggtttaaaaattaattttaattattgtgtggagttatttcaaaattcatggtgaggcccaatttgaaatttgcataaagaaagagaagaggagaatgagtcattagagtttttaatcttcctctctttctttatataaacattgattaaaaatttatttaattacaataaatgaaatattttaagtggtcgagattaaatctcactcaaaataa

SEQ ID NO: 37021 - DNA, 3486 bp, Cannabis sativa
  modified_base (71)..(74): a, c, t, g, unknown or other
ctgcagtatgaaactcataaaaaaacacagtaaaaaggtaaaaaactccgtctaacagtatttttgtaaannnntgacaaaagttagtatactatgtaaatttccccttttaaattaatataaagtccatgactaacataaaaaatggttaatcactcacaatgtttcacataggttggtgttggaacatcaatgctcagggctaatttctatgtatattttacaaataaaaaaaaatatgattgccaaaaaaaagaaaaatatttccaaggattaaattgcaaaacaaaaaataacttaggaatatttatgcaaaaccccccgaaaaattgcataatttgtatttaacaaaatctattaaatctctacacacagaaattgaattttcttccaatttcagatttcaatggcgtcgagcatccgatccaaatcggttcttctcctgattttagtacaattgtgctttacactcatctcgtcttcctcgctttcaccttcttctgtgtaagattttaactttaccccctttttgattttcttggtaaccaaacagtgttgtggaacattgattccgcatcccttcaatgaaatattcgatttttttattcaaattattaatattttcaggtccagtgaaggttactccattcatggtcgagttaagattccaagtacgtatcctatttctgtttctcgaatctaaagattgattttttatttgaatttttccaatttaagcaatttattaggttttactgtaaactattttatatattatggtgaatttttcatgttactgaatcactcaattacttgaaacattggtaagagttcatgatctgaattgtagaaagattaggtttttgaactgtatagatttgaaattttgaccttttatattagtttgtttaaatggtaattttctctactgggctgttgttaatttgaacgaccaatatatgtaatgcttggttagagattgtccaaattacttgtctttttgggtttgaaatgactttctttttatttgaaagtctttagagttgttcttcaatgataaaagttaggttttcttaattcagatcatgctgaaattacacgaaattttctcaggaagagtgttgtgaagctccttgatacaaaaatgcatgataggtttattgtttggatccataggttgctctccttatatccagggcttttgactcattggggatttgaaccccttttagtctcctttccacacatacagatactcacatacctaatcactcgagctattccgaagtgacttgaaaaagtagtggtgcttggactgtatggcaatcttggatcggaagctcggttctaggatctctagctgtcgtggtattgtggttttttttagattgatgtctggttgctagaactttgattggtttgcattattttcttttaaataagagttgtgataagattgatatggttgtgaattcatgttatatggtttagacattgttagaacgtaatttttatcacagaacatacttttgcccgaacatgttttgcagttgtattgttcttgtttttctcccttacttatcttttcttttatggttgagtttatgcacataactaatgtctttcttcttggcaggttttggggctactggatttggtcttcctgggaaaatatcaaacatcaaagttatactcaatggtggccaaagggtgacctttttgaggcctgatggttttttctcattgtatcctttaacattgtttatgctgtctatgcgttgattcaaattccatttatcttggtggttcttttcatattcgaaaactttcaacaatagatctttttttccctttttttatataattttaaagtttcataaatttatgaacttattcaatgttttgaactatccttgacatgtgtgctttaagccataatgtgccagcaggtactcatcttatcgaagtggcagcaataggatatttcttttccccggtgagaactctatccacagatcaatctcgctgttaacattttcaaaccgctacttatgtctgatctcgttatgtttctttcgttaaaacatttaggttcgagttgatgttagtgccagaaacccgggtaaggttcaggctgcactaaccgagaccaggaggggactacacgagtttgttttagagccattgagagaagaacagtattacgaggttagcttagattgacacactatttactttactgtttttgctctgtcattggtttttttacattcaccattgtgatttcaggtaagggagcccttcaacataatgtctattgtgaaaagcccgatgggtatgatgattggatttatggtgattgtcatgtttctaatgcccaaattagtggaaaacatgggtaagtcttctattcttttacttataaaggattctactccatataatttgttttcagactccatttcctagaactagatttgcattcatatgatgggatagctcctcctccaccatgaccttatcacaattaagggcgtgtttggtagtcactgtgtaattactaagtccagtctagtaattccactttaaaatacaaagtatgtttggatatcagtgatgattacatatacattcttaatgtcttagttggcaaaataggtagtaattattatataatattttttagtaattactatttaaaatggaaagtatttattaattatactcaattttcttatgggggctatgagagttgaagcatagaattgtagttactttcaattatatgattagttaattgtgttaaattgtgtaattacttctaattacactcaaattcagttccaccatggcttttcaaacgcgtcataaaagtgaaaagagaatacaacacacataggtggagggaacggttcaatccaatcaatctcattgtctattagcatgttcggtctatctatatgctgcttgaaaaatattatgacccacatgagatagaaatgtctcttctaccgaaacttctgttgttcttttatatctcgcgtacttattgagttgccaagttattgttttcgattcaggactaatgtaatacttatatgttaatagatagtttgcttgtatagtagttcttttactaaccatatggtttaattaacaacagatcccgaagaaatcaaacgagcacaagaagaaatgagaagccaaggggttccatcactagcaaacttgatgcccggggctggtagaagctagtggagcaaagagttcgtttacaccagcgtgagccatcctgggcctatgctgacccaaggaatggcctcatttatatgaacagaagctcgaaagctctgaattgatggaggataggatagaagaggctttaagcgaaaactttgtaatgaaaaagaaaatctaaatcttattcctttttgggattgattttgacacaaatgtgctgcccttgaacttgattaacttgtgttt

SEQ ID NO: 37022 - DNA, 2308 bp, Cannabis sativa
taattataatatttagtttgttgttggaataaatactacaatcaaaattattgtgtttggtgtgggaatataatgaaataaaaaattaattgacctaaatattcctattatttttatttttataattataatttataaaatatataatataagatagaatagacttttgaatttcttttattatatttttaattgacatgtaatttcttttataattaatatattaaatataatttcacataacttaattaaaattagagtctaaatgcaaattataggaatatgatttataaaattatatataaattaaagagtaataaaaaaagtaaaaatcaaaataaaaaataaaaagtgagtatatagtttaaattttctaaaaaaatatatatttataagtttataaatattttattttatatagtttatttataaagaatatggagtggatgtagttgttagcctagttggtgagagagaagcccattaaataattttgggtgggaaatatgagttgagttggtcaacaaaagaagaaaaaaaaagcccactaaaaaactctccttttcttcttctttcaacctcaaaacggcatcgtattaattataagaaatttctattcccttttaacgaggttcttcttcttattcacttcaccttcttcattgaccatttatatagatatttttgtctctctgggtatttctagaatttataaaccactaacatttgtctctaatttattaaaaactcactctttaaatttcaataacaaaaaacaaagaaaaaaccctaattttgattcttccccaatttgaaaacctcaaaaaacaacaattgagggtttccatggaagaaacccaatttcaatccccaccgactctcccactcttcctgggtttcttcttaatcatctacctttctgctcagttcatcgtcttccgaaattggagtccgaagatccgacccgaagcttcaagttgcttaatttcattcttccacggtacaccggcggttttcttagccgccggtgcgatatttgccgacgcaaatcgtgggttcgcttcagccaatactgaatttcagaacattgttctcgattacagcatagcttattttctaatggatcttcttcactacctcaccttcgttcccggcgacgttctcttcatcggtcaccacttagccacgctcttcgttttcgtcacgtgccggtacctggtctcacacggggctttcgctattctcttcctcctaatactggcggagatcacaagcttttgtcagaacacgtggacactcgccaacgctagaagaaacgaccttgaatttgcagccaaactgtatgatcttttgtctcctccattttatgttttgtactcaattgttcgtgggtttgctggtccttattttctctacaaaatgggtgttttttacttgagtggcgctgctgatggtgtgattcccagatgggtttgtgtgtcttggattgttgtggtgtttactgccatttcagttagtattctttggataattaatctttggattgagttgtacagagtaagaagaactgagaaattggagaagaagaaacttagataaatttatatgaaagtctttatgcattttggtttcaacttcaataaacctttttattattttggctttactttttcaacaatgtcaattggttaggggggttgttctgtatactgaattagaattatgggtttagaagttagaattgatttaagtatcaaaatttgcagttagctttgtcttttttttctcttttgtactttgggggaaaatattgaatgtatatgtcagaagaaaagcattttcctctactaaatttgtttttatcttttgtcctctctctctctctctctctctctcctttgatcttaatttttgtgtataatattacttataattgttacaacacaatgattatgagttaaccaaagagtcaagtagtgagcatagcaacttaataagcaagcaaagcatgtcaatatcttgagatttttacctaaaactataatcactaccatatcatgttccgaactattacaactaccaaatttaccacattaatttgggagcacaactctgttaattcaataataatataggtgaaaagttacattttggaggtgtgaaatacttatgaaaaaaattctaattattctttaataataagtttgattatagaatgtatatatgcactatgcaacattacatccaagttcacataataggcacgtgacacaacaaacagaacagccttatttattctctttggtac

SEQ ID NO: 37023 - DNA, 6124 bp, Cannabis sativa
tgtagaaaagtattagtttagggacaaaatattaggtatatgtaagtatagaaagtcaaatttcccatttcaaattgtacttcaaaaatgcagtatataatacggtgcaatatgtgcaatttacaatttactaaataaacaataatgcaataaaattttagcatcacaataaaaataatagatctcagctaggaacatattaaatcttgtaccatatttatatatttatataatattcttactaatgaaggtcatgttgcagcctaagttttcttcattatgaattatctaatttttcatttttttaataaactaaacccatgaaaaatatactatcttcactctctggtaacgttaactgtaatactataaagaaacggataaacaatatcaacatatatatatttcaaaagtgtaagaaatatacagtatatatatttgtgataattataataataataataactataacttctccatatattcattttaaaaaaaaaaaatagtaggattatgtgttgacagtgaatttagctaaccaagacggagtctgattaggatcaggtctcgtttatgtttatcatgtgtggaacgataataaatattagatattattccaaattttatccacctaacgtggcatgtccatgtaagccaaaatatagagtacaagtagagtacaaccttatcggtagcaagacagtatctctatacaaggtatggcaaaatcgtcaagcagcaatcgaaaagagtgaagcgagctctcaaggggttgtaccaacatccctggccaggcaagagaagcctataggctggccagggtgagcctacagctggccaggatctgtgcacaagctggccaaccaaaaactgactttggcaccaagggagcatccgttcgactaagggaacttagcctctacagggaaacggtgaacaaacctgtcctcaacttgcaaaggttagcctccacattcgacggctagccttagaaatattcttacaaaatagggaagttgcactatattttcataatacaaaatatataattaataatccctcaataataggattgttatttgttgatgaagagcccctatctttgtgggcagtttgaactgttcctaagtgagtattgaaggagagttggtaggcttacaagtgttgtgcgtttctgtatagttggtcaaccagctttattgaaggctaaccggtacttggaggttgtcacccctggctggccagctataggtttggccaggacctggtaggtttgttcatctgtctctgcttatgtccaccgtacaaccatggaatctcaaaggttaggaggctggacggcgctaatcctagcaggttagtgctaacctgccttcaacgtattttctactttttgccatgtggagatgccacgtcaagtggacaaaaaataggataaaaattgccccccccccccaatgtccctgtttggatatctggttaggtagggactttatactttttttggtattgcaacatcctttcccatgcaggtatgcatagtcaggtattggactctttgattgatgtgattttatggcagttataaattttacgttgatcaatgtaggaagttttgtgacggctgcacactttcccatgttgtcattcttggtcttctctttcccatgcatacctatttttgtggtattaattttctattaagtttttttgggagaaaactttcaagaaactatatataagtgcatcatactcttttcattctttacttttcattttatattctctaagcaaaatttctctcaaagactccatagacctgaaaacttgtgagcttgagttctttgtggattttcaagtttctaacacccacatttattgtgaggactagctcaagcctccttgcttcttcttagtgggtaagttcaaagctctccctttctttctcgttctttgaatttatgccattgatgagttttagagcttttatgaactttttgattctcatgccttaggatagtttttatacattataattcgttccatagctttaggatgcataatgtataacttcttgatgaaaaagatcgaatcttgtgctctgttttgagattttgatcttcaaggttcgaagaacatgaagaacgtagctttaaatcttaaaaaaaatatggtttttgatccacttagggacctggccagtgctttgggtctattagagacctttcttggttcttggtctagtattagacttttggctgatacttagttcctttccaggaactctatccggcccttttggggttgaattttgtattggttggttcatggtgaagaaaacatgagctagccagttcttggtgtaactttcagatgctggccgatttatggcaaaccaaccataagctagccggttcatagcttgacacccatgggctggtcggttggtacgcacaagtattggcatgttagcccatgtttttatccttatcatatttgtgatctcctgttgttcacctccctttgtctttctgcatagatgaacacgcacgactattgggcaggtgatagctggatcgacgaggacttactccgtattctgtctgaagactattgctcaactagttcttgctttgagagctctttgggtagctcttcaagtgactttgaagtgaacagtggttctccggaacctaaagttcaacatcaccactattctgagcaaataggtggtgagatctacggaagatttttttgaattttgaaccatgggtggagacacttcctacctaagtctcggacttacattgtccaccagagtgtgctaacaccttgcctgttggacaaacgacttctgcatctagagatcttcttgcactagcgactattgtgattgttgcccagttttccgagcaacatccaaacttggcgaaacttatcaaaaggcacctccaattgatctccacgttcctaaactcatgcaagggggaggatccgtcaagttgaggagactgaacaaccagaggctggccaggaagaggagcctacggccgaccaagaggaggagctggaagtagatcaagttgagtctgaaattgagcctagggttgttcggaggtgccctaaggagcatgacgtgatccaaggtaatcccctgggctcttacggtgaggctggaatgcctctgaacagcaggggtcaaccctcagagattagggttgaccatattaaggacgaggctaccgagccatggattttataaatgggggaaggagatagatgggtatcttctcgttcgacactaccaagcttgacgacatcgtcgatagtggacttgtcggtcaggtccgatgcattagggttgctcgagatcacttggctcaccatctttagccaaactggatagcgtggtttggcccccatagagcaaggtatggtgcttcctttaaaccgtatttcaggtacgtagctaattttttcaactcagattgcaccaaaaagtatcaagtacttgtcagcagtttttatcttgtatgctgagttaggttggccatatccttcgcctttcgaggtgaattactattttgagctaaaatcaaatctaggccagaataggactgggtacttctactttagccaggatggctattagtggctgggcggcactaatgatgcaaccatgtcaaaggttggaagctacatcaggagttactttatggcgtatgacataaaaggcgtctgtcaatttttccaccgagttcaaacttacagtcagccactccccacattgagactaagggacttgtccaaccacattttgtcccttccagtcactcggcacaatatttgtacggttgcctatgaggagaactttaataaatatggtatgtaaccttctagagagggtgtttctgctccgaataaccctcctgaggacctaggtaatgctcctgttagaaaggagaagagcaaggggaagaggcctgctgttgggaaggaaaagagcaagcttgttgaagaggtccctttggcaaaggtggcccgaatagagagcatgagggactgcactcttcagttgcatcttttctatgggggcactattggtgatgccccggtcttataggggcctacaagacctgcccagcctacgcctacagacaaaggcaaaggcaagggtatcatgactgaggacaactctaatgagttttcttctcaggatgaggggcctttaggtggcacttcttggttgcattccaccgcttgtttcaagttgtgtactagttcttcatatttgcactctattgagataaattggccactgacttcataatttacataattcattcattcatcaaaatacccattgtaaaaatgagaagtagaattgcgtcctgttcttgagaatttaaaaattcatttaaggtaagtcaactatgaaaaacctaaatacaaatgcaatgcaacaagtatatttgttgttaggcaaacttacgacaattgagttctccttgtttaagtcgtgtattgccaattctgagccatgtttatttacataatagtattttagtagcacaaatataactgttatacaaatattttgaacttattttctttttcactgatcaataatcttttttacattaatatttttttttggataaacaactatttagaacattgtaaccaatgttaaataaactaattaaaaatatagaaaaaactgatcgtgttatagattgtatttaagaaaagtgttgccttcaattatcagtgcgtgaataaaatagaaaagcaaatataatgcaactgtaataaaacacaaaatttattgcacgaagtgcactaaaatttaacaactaatttgtcctaaaatttaccatatcataatcaataaataatttggttaaatctttaattgatacaaaatatctgttacattaaagttcagtatattatcaaattaagcaggtttatgttaaaataaagtccaatttaagaactcaattcacacaatactgttcttaaacatagacattgcctagattttgatcacacttagtttctaagatttagacccaaattgtataaaacatataacacagcttaccaaaaaatattgagaaattaatttgaaaaaattacattttcaaatttcaacaatgaagtgtatacattgcgattaagagagagattcgtgaatattgtgaaatcgaaagaaaagaacaaaattaggacaaaccttgctagttgaggagctgggtgaggttgggggagcctttgactcatcttcgaagtcagtttgattgagcggaataaaagttgactccttagattcagccatttttgcttctcaggtcttctagtggagagagagtctattcttcttcttcttctctaccgaaatggctttcttctgattttgggttgttttacagttatcgtcttcatttgatcgcatgaagtgctccaagatgagaagcttaggtcatgggtcttgcagcttgataattgtgtgtaacaggtattcttgtaatttttgttatgtgggttgtattattgtaacagtgaccacccactgtattagtgtaattgttttgccttttttagttataatagaaaaaaatcctaatagtaatggtaataaaatcatgagtaaattatggcataatcccaaaaagtttattctcactagcaaataacccctaacttattttttggtagcaaaaccctctcaaaattcagcaatttaatatttccattcattttgagtgttaagtgtcatgttgaactatccacgtgtacatctacgtggagataatatacacttagtacaattttattggaccatacaaataattatttaaaaaattaatttgaaacaaaaaaaattaaaaataaaataaaataaaacataattaaataaaaactaaaaaaaacccttaattttggtaactagacactagaaaccctaattctctttctcactcagcgccaatgtcccactctctccctcttcattatcgcgtagccatggcatgccatctcggcggttctccaaccacccccaggctagaccgaccccaaaatcaaaccccaccgtccaaaaaacccaaactctctctct

SEQ ID NO: 37024 - DNA, 11097 bp, Cannabis sativa
catccacgtcgtcgaagcgcatcactcgcgagaaagcttctctcgttcaccctccgatccacaacggcccactaaccagggctcgtcagggacccagcaatctctcctcggcttccggggcaggtgttgtagcggcgtcacctactggggcgaagccagctgaacacgccaagcatcctggtggtttagttggggagacaattgtttctgtagctgaggaattaagaaaacagagcgaattggaagctttggaggctggacttgaggccaagttcgtggccactagatctcgtagtaactgcgcccatgtggttcccagtcattgcggtcagttttagtgcctccatatttattggttcttttggtaaagatatgaattttgaagttagtagttatatggattttatgcttacggatctaggtcaagaaaattaactctatttagagcagtagttagaatttgctttggttgaaaatgaatttgtttctgaatcataaatgcttgtttgtacgtacttctcttttaatttgaatttaacttgaagctaagggagcactggctagagtttttttgcaagggcattgaattttgataaagtggaagcaaaattgtatgagcttttgcaatgaaagtgatttttttcttttttcttctcaaggatggttttcatggaaaaatgtccaccccattgaggaacgcacattgccatctttctttaatgggaagtccgagtcgcgtactcctgatgtgtacttggaaattcgtaacgggattatgaagaaatttcatgcaaatccaaacatacaaattgagttgaaagacttgtcagaacttgaggttggagaattggatgctagacaagaggtaatggagtttttggaccattggggtttaattaatttccacccattcccaccaactggtcctgccactggtggtgctgatgataatgttgcttcagaaaagggttcattggctgataagttgtatcactttgaaaccctgcaatcttctaagcctgttattcccaaaaataatatatcagctccagctgtgtcatcaagactgtttcccgaatcatcaattgctgaagagttaataaggcctgagggtccagctgtcgagtaccattgcaattcttgttcagctgattgctcacgcaagcgctaccattgccagaagcaggttagttgtgttttcactggagaatgtttttatcaaattgttgttttccataatggtgcaatgctctcaaaccaatgtttggttaagttaggattgccaagtttaattttaattactcaaatctatgcagtacccaaattgcacagttcttcgacatgaattgcaatataaatttagttttgcaatttggagttatatgttcatgtatcagttttgtaaatttagttttaataaaccaaatcttggtagttcctgagtcgcgcttttcccaggcttggagttgaattgttttttgcatgttaactttatatgtttcttgatcagttttataaaaacgctagggtttttctgaaatgctttatgaaagatgaaatctttacttaagcatacgtgcaattttaaatttattctgtaggtttgtttttttgttttaggatttttatttttatttttttatctaaacttaaaacatgccttttgatgatcattcaattctgacaatgtacaggtccttgtattccatctcaatctctttcatattttacattcgtaagctctatatttaaaatctgaagatggacaataaactagaatgtaatgagtgcattatatgagctagaaatcaaatttgcttaccaactagaaagtatcatatttagggaagcagtggtattgaactgtcatattgttattagtgcgattcaataacgggtcttacatatttttatttagaggagtgctaatcacaacctcctattgtaatctcttagtcaacctacgcacccgaaatcacatgctggaatattttttttttcaattttcttttaatagcggtattcgttgtagttacaataccttatccatctaaatttttgaatagtttacagtactgaaaacagagttcctgatgttctagtttacctaaaacacttcaaacctattttcaacactaaaaactatttgtaattttctaaaaatttacagagataatgttgtaactataacgaacatcgtcatgaaaatacatattccggcacagagattggttaagaggtttaaataggaggttgatggtagcactcaaattttatttcacatgtaatattaaaaaccactaaccacttataaagttccatctcatgaggtgttgggcaccctaaagtggacacttgtcttagactagtcccttcttatatattgaaaaccctcactttgtggcggaggaaaattgtggttacatacatttaagcataaaacaccacaccaaaacacacagaaaccagaacaaacacagtaagaatattcatatgaagcaaagcaatgaatactacatcattaatctccattttctaattaagtctaaaaatgaaaatttttcttaatgctttgtcttgtacacccatgatgctgtccaaacactactgaacactcataaccttcaaagaatctattatttctttctaaccaacagcccacaaaagtgccacgaacgtcgatctccacaagcatgagttctatttactgccatccaccttactcactaacatttggggaagcgaatagggcatgacccattggatctcaaattcgttccttagctttatccaaagactacgcgcaaggcaacgacttagaaacaaatgtgccatcctggtgacaagcacaagaaagctttctttacattcagtttatctagagccaccaaccacccaaacactttaacttttaaaggtcccctacttttccatagggtctttgtccagaataactcatcagaattttggcttgaggtaaaccaactaaatgctgatttagaagaaaagatcccactagaatctggtatccaaagacaactatcatctagaatgttaagcactctaactgttccaattgttgtagcatttgtaccaagctaggaatttctctttccacaatgtttcttctaaatttgaaatctcagctcgccacacagttccccacctcgccttcattgacaatcaacttctgaatactttcattcttagccctagaaatagtagctaagttcaagaatcgattcatcaatgaagattccccaatccatacatcttcgcaaaagtggatattcaccccatttcctaccttgaatttcaccagttttccatactcttcatgaaactatgatatatccttccatggccctctactcttcatgaaactctgatatatcctttcatggctctcttggggatagtctagcgcccctttttgtatcacataagttttctgctttgccatagcaacttttgatcactttgtgaaacattgaatttgtttctaaagggtatgtccgtagccatttcataagcaaccctttgtttctcatctctagtcttccaatcgctagacctccctcatttcttggtttacagacctcatcccaagccaccaaatgatcaccacctgctatatctccaccttcccaaagaaagtctaacatcattttttctagagcatttatgacctgctttggagctttgaacatagaaagatagtatattggaaaggaagataggatagtgaataagagtgagcgtaccccctctagaaaggaaggagcatttccacccatccaatcttttcgcacatttatccaaaacaggctcccaaagtctttttccttggtgaaccaccaagtggcattcccaaatatgtcataggccagctgcctacctcacatccaatttgctccgcacattgggccaccgcctcctcattcagaaaaattcccaaaagttgactcctcttcagatttacttttaacccaaaaataccacaaaaagcttcaacaatcttaaccaaattttggagtgatgccttattatttacaaaaattagggtgtcattctcaaactgtaaatggctaagttgaattttgtctttaccttgtctagacacctagtaccctttaattttcctctcgttcttccattaatgaaaatagaaaatgatgttgatgagatacatcctgtaatccattttctccataactccccaaatccttttttcctcaaaaccaaatccaggaattcccattccacccgatcatatggataagaagggttcacctttctttcttaatcttgctcttgattcagttgcatcatttgagttagtgagaacattggcaagtaactcagaggtgtgtgataggttcaaattctgtattgcaagaccccattagagagtggagatttatattgtgaatggaaaattgtagggcctaactcttgtattttgagaagtaaaaggccttatgtgtgctctaatactgttttttcacagtaatattatgacaccacggttttcctccaagtgagggtccctaatagttatgggaggaggtctatctcgacctctttctcgttttcaaaaagataaaggaacattgataaatttacccaagaacctatcataatttactttgagtaatgatgaatctatggtctcttaattacgagagcatttataactgctactttagtttggaatgagctattctattttgactgattataatcatatttggcaggcagattttgatctatgtactgattgctttaacaatgggaagtttgactctggtatgtcatcttcggattttattctcatggagcctggtgagatgcagggtctcagtgggggaaagtggaccgatcaggagactctcctcctccttgaggcattagaactttataaagaaaactggaatgagattgctgaacatgtcgctacgaaaacaaaagctcaatgcatattacattttgttcaaatgccaattgaggatagcttttttgatagttgtgatgatattgaagctgtggatccagcttctagtgataaattaaaccccaaggatgctcttgaaacaaatgatagtgagactgctattaatgtaaatcagtccacttcttccccaatggaaacttcaaaagaagaaatgactgaagttcaagctagtcaggacacttcaaaacatgaagatacagacaaaggaaaagttgaccaggacacttcaaaactggatgatggcagtgaatctaaaggtggcaaggatgcagaagaaaattgtgcaatgaaggctctcaaggaagcatttgaagctgttggttatcctctgatacctgaacgaccattttcatttgctgaagtggggaatcctgccatggcattggtaagttgaatgctcacatgtgactctgggttattagtaagtggggtcagtcataggagaagctgtaattacggttatcacgtggctgggaaaatgttgaatttacatcccaatgatagcaccttcaagtttgttttttatttttttgattccaggagtgtcatttatcatcaaataattaaaatcttatttttgtttgcattatgaatctgctatccagtatttattgtacttgtgcatctttattatagttattctcatgtatctacctattttttatagctactaatgcttctcttctttttttcaggcagctttcctggcacatttggttggacctgatgttgctactgcttcatcacacaattctttaaaatccctatctggaaactccccaggcattgagctggcttcaagacactgctttcttttggaggatccaccaaatgacattaaggaaccagctgggttgcctaggtatttcattttctatggatcgcatattcctcttgtagatccatgggtcttatgttagcaacttattttgcagtgtggttgctgaagctactaatgagagctttgtgaatgaaaaaatcgaagcagaccttccgaaagaagatataccaactgatcattgtgacaagaaaagtcaagattctgttcttgaagcgaaaacattggatgtcccaaatgttgaaacctccgagatatatcacagtgcgaaagaacaagatattaaagctggtagtgatgaagcttctggtagtgtaagtacagcaaacaaatcaagcactcctgcgatagtaaaggatcaaccactatctacggatgatttacaatctgaggcagagattccgccaagttttgtgaaggagtcagaagcgaaaacagaagagcctcctgaacccagaaagacgtcaaaggaagtagaaatgtctgaaactacccctgaaaagaatgagctgcaagaaacagttccatcagatgtattaaaggaacctaccaattcagtagatgcgcaagtagatgaacctaatgattctttgcattcaaaaaataataaggatcagcatgtaactgccacttcagttggaaaaccttcttctgaggaaccaagagacatagatatggtgcctcattcggggaactcagaaaagaatgaaccttcacagccagctgaaccaaatgtaacaggtgaaaaaggtgctacgttctctcctcttcagatcaataaaacaagcgatattataacagtacttgctagatatttagttaaaaaatgtttaatattatattttgtttgggttatttgtgatgcgcaaggatgattgaggaagagaatttttagtgatgttttcttgctcagatgtaatatactaggactatagtatgtgtcattttagttggaaacataatatagatatctttgtcttggccataaagaattcaattgtaggtttctgaatactgactgattttgtctcatacctttttccagttgtggatcttactaaagatcgtgacaaaaagaatggtatgggtataaaagaagacaccaagattgataaaataaagtgtgcagctgtctctgctatctctgcagcagcagtgaaggccaaacttctagcagatgaggaagaagaccaaatccgacaactttccatgttactgatagagaagcaggtaatctatagatttacctctccatagttgttgtcttaaaaaagaatttaaattttatctactgaagggcctttattgttgcagttgctaaaactggaaaccaagttagggttttttaatgagatggaaaatgtactaatgagggttagggagcaattagatagatcaaggcaacgtctttaccatgaacgggcgcaaataattgcagccagacttggcttacccgcttcctcatctcgaggggcgtcttcatctttgcctgcaaatagggtgaacatcaacgttactaactcagttcaaaggcctccatttagcatggtttctcagaggcctcccttgtcaagacccatggggacagtggcgcctaccccttcaataccattgtccacaacaacagcaggtagctcaattggacctccgagccaggaaaagctttcctctgtttgaacaaagtaaaacttaatatatacatgttgaagtgcatccagttttatacaccacgatagtactttctacatccagtgagttcctgatatttatataattttttcatttggggtgcttttaagaaaattcaacatctatcccactgatactgattttggtagatactgtggaaggcaataactcgtaagttgatggcttgattctggctgagaagtattttgagacctagtttgttttcgtagagatgaaacaggaagaaagtcaaattttatgagatataagaaaattaaatatactatttttccaatcacctaggtggcattcggttagaggtaatgaaatggaaagaaaataatttttattctattattttggtggaatgtttattccatttaaaaaaaaaaaaaaaaaaatccaatgcaagataagaataaattttataatcttttgtcaattttttttatgttttaaatttgatttcacttctattcccatttctcgaaagcttttaatttaactatatgctgtggaatgcccgactcacagagacaaagtttcagtgtgtgatttatgaatgcaccgtcttcatttggttggtagtatctgccacttgtctgtcctattttgtcttactataaaccttaaattaaccgtttggcttcttcctttttaaattgcaatatcatattcatatgaaatgccttagtcttatttttcttctcgtttgacatggcaggttcacaaatgcaagggtagtttacacattgtcaagaagattttcctcaagcagtttcgagattaaaagattagcagtttgctcccgtatcagtgaggctgactatacttattagtgcgcttggagttctggtgatgacgatgttgttaggtctgagttcttagcaaacttttttgacatctttgaactctgcttgtggtagctgtccctgcatccgtcttgtattcctctgcagtttcttatagagctaagaaataaaagggatcacaaattgtaatggaaactggctcttggaagtactaatgttagactaattgcctgctgaccgagtaacttgtattcctttagtggatattaaaataggtgatttagagaggagattccggtactgatgtattggttcgtttgttaaaattatttgctagtttgagttgtatatttgtatcaatacagcgcctatcggagattgtaaaatcgctcttgatagtgaaagttcacgagtgttggaccagataattttattttattcttcgtatttgagaagaaaaattgcatgtgtttgatacaaaaagtttcagtgattttattttctgttaaggttatgtgtagcatatagaataaagattcaaactatcgaagcaataaacttcaagtattgatgacattgcaaaagtttttcttcctcttcaaactttcctggtttctatttctagagtcttttggtggtatgtgtaccagttctccggtaccgaacatggtgttatggtccacccaaacgagtattgtggtggcttcgttcctcatctattccatcgtcaaatcccttctcatttcaatttcattcctgcacacttaattgccacattaatcactctgagaattacacttttcctccatcccatcataaccttctttgacagagcattaattgtaaccttttcttttaccctatgcgaaattgttccacatggccttcctctttcttcctttccccttctcatcgcaaaagccaaacaattaaccctgtccaatgctttgttcttggcaaaatggagggggatacttagaaacttgaggctcctcaaatctctttcatcatttgggctacttctcttacgatttgggatgggactagaagatcctccaggagaatacaaatagcttactggttcttcctatttaaggcgcgtctcaggtatcgagctccttaccttcacttttcccttgtttcctttgttaaagtcctgctcttgcctcctctaaatttcaatatgtaagatttccatactaatgtctctaacatactagtcttgacccctgaagaaaatacactatacttatgatgttagttagttgattcccttgttactttcaaccttcttagattgcacacagttaggcattttaatcgtccctcccttatgaaaaccttatatgaaatctagtcatcgcagtgtcgttttcctattgctgtttctgagaatgcagatggcctgtttctagttagttttgggtgtgagggggatataggtagaattttagaaggttagccgtagcattttgctcaaaatcttactgtctttgctgctcttgaaagccctttccctatctcatgagcatcttcattatatacccttctggattcaggtgtatgtgattcccttcatgtgtaagtcttatgaacttgccaagtttatcgcgttagaagttggtaatcttattgaagtggataaaaccactattaaggagggaacatgaccttatctgcagataagaatgcttttagatgtgaagttgcttattagaaggggtatgaatgttaggtttatcaagataggaagggagattatcaaatgattggactttagatacgagagattaactgacttttgctacttctgtgggaagcttgattagaaagtattgtcatgcttacctggaaaaatgtgatgaaagccttgcttctcctccttgtccttttactatccttctttgaggaaaagaaaaggtcactgataaatctatgccctttcagtaccctcaccatccttcaataacaattgctgatatgaactttggtacccttcatcctccttcctcaatgcttactaaccaagctatcaactttccttcttttctatcacccaccttacactttcccaatcgcccgctgatgtaatgattccaacacccattaatcccaatgtttaggctttgactcctcctattagtgatgttagttttgatctctactatgacctcttctacctacgtttcttatcccacaaactctgttcttgttgcagataaccctagtggggatgatccagatagtttgttgaatacccaatccattgctgaagctcttttggtttttgttaaggagagttctattatggttagtaatggcttaggagctgctggtagtcatccagtggtttaacttgatccttctgtgcgaggcaagggcctttcttctgcttctagtgtgaagcatgcttcttttcaaccccaccatgcttctgttggcgactctctccgatctatgcataagagagctcatggtggtgatcgagatgatggctcctctttctatggaacaggtgggtgatgctatgcacacacacccaaaaaaatgacccttatcagctggaatgcacggggattggggagtagcagtgcattcagaagactctccctgatggcgaaggagcttatataagccttctgttcttttcttgatggagacttgtttacctcccatgtggttgataggattcagatctcacttggttttgactttaggtttgaagtccctaggaaacatttggg

SEQ ID NO: 37025 - DNA, 4841 bp, Cannabis sativa
catgaccttgaaggttacatactcggcaccaaaatctgtccacctcagtacgtcgacaacacaatcggaggagccactccaggcgaaccacgacaactcaacttgggctacgccatatggagacgcacagatcagtcaatcttgagttggcttctcaactcaatcgccgaaacaatgttcggtcatgtgataaattgtctcacatcacatgatctctggtccactcttgaacgcctgtacaccaccagttcgaaagccagaattctgcagcttagatttcagctgcaatccctcaaaaagggaaatctctcaattcatgactatattttgaaaatgaaaaatattgctgatggtttatcctctgcaggacaactattatctgatgatgacttgattctctacattttaggtggtcttggccacgagtatgaggctgtggttgttaacttgacttctagacaagatcaagtcactcttcaagaagtccaatatatgctgcaaagtcaggaaattcgtctagaacagctgaactcaactcaaggagatccatccatccctgcagctcatttagccactcaaatgagaagaaacctcaacttcggagggtctccaaacaatcataatcaacactctggcagatttaataccactcgtggtcgtggacgtggtaggggccgaaccaacaacagccgacccgtgtgccaactctgtaacaaacctggccacattgcctccaaatgctaccaccgattcgacatatccttccaagctcctggaccaaaccagtcccaacttaccccaaacactaactccaaccactcacaaagtgaccaacaagcctatttttcatccacagacaacatacatgacagttcgtggtacatagacagcggcgctactaaccatatcacctctgaggcttcaaatttgcaacacaaagtcgaaccaaaaggtatctctcacttacttgttggcaatggataccccctttctgttactcatcgtggttcgaataaaatacacaatactgtcaattctcttctgctaaatgaaatgctatgtgtacctgcaatatctaaaaatctcttatctatttcgcaactaaccaaggataatcaggtttttgttgaattttatgctgattactgtgttgtgaaggatctaaacacgaaggaggaacttcttcggggagtgcttagcaatggtttgtatcaacttcaactatccacatcagcaactacatctgtcaaaccaaaaacctactgctacaacagttcttttaatacctccaagagcaaaaatattgccaaacatccgagtcatgtagtgtctgtcaacaagagtctgtcattgtttgctgaaaatgtttttaattccaatatcaatgtgtggcacatgagacttggtcacccaaatgtcaatgtaatgaaacatatgttagcaaatgaaaaagtctctttcaaatccactcctaatttctgcaatgcatgtcacataggcaagtctaagcacaaacactatagcaaatcttacactaaagctcattctccacttgaactcatccattcggatgtatggggaccctctccaatcctttcaaaagaaggatataggtactatgtacatttcatagatgactttagcaacttcacatggatctttcccttaaaactaaaatcggatgtcaagtctatattcattaactttcaacaatttgtggagagaaagtttgataccaaaatcaaaaccctacaatccgattggggaggcgagtataggaacctagcccctttccttgcctccataggagttcacttccaacacccttgtcctcacacacatgctcaaaatggaaaatccgaaagaaaacatcagcatattatcgagatgggcctcactttactcactcaagcatctatgccactacggttttggtgggatgcattcagcacctccacatttcttatcaaccacctgtccacacccactctatcacaccaatctccaattgaaaaattgtttaaggtgacacccaacctgaaatttctgaaagtattcggaagtgcctgtttcccctacctaagagactacaacaaccacaaacttgatttcagatcatctaagtgtgtcttcctaggctatagtccaaaccacaaaggttataaatgtctacattctagtggtcgcatctacatagcagcaagtgtcacgttcaatgaattggaattcccctttgctactggcttcaccaaccccccctcagcacaagccgaacacagcacacctgtcattaattaccaccattggctaccatttgtgtctacccctcacataactcccactgatgttccacaagctgaggttgatacatccgattgctattcaagccccgtggctccttctccacactcacctacggattctactccacacagtcatcaacatcaaagtcactcacctgtaagttcctctccaaccacacctcttgctatacaccttcccattgcaccaccttcaccaccaaattcttccccagaccctacacctccctctcccatacacaacccgttacctacacaagcaccattacccacccatccaatggtaacacgctccaagtctggcatcttcaagccacgcacatttctctcctccatcctaaacaatccccatctccctgccctctccctccacatacctgaatctgctgcccttgccctcaccattcctgtgtggaaaaacgccatggactccgaacatgatgctctcattaaaaatcacacatggcatcttgtcccaagacaacctcacatgcatgttgtcgacaacaaatggctcctccgcatcaaattcaactccaatggttctgtccaacgacacaaagcgcgcctcgtcgccaaaggctttcaacaacaaccagggatagacttcttcgaaacttatagcccggttgtcaaacctgccactattcgggtaatactctctcttgctatcactcacgattgggatgtccaacaaatagacatcaacaacgcattcctcaatggaacgctcgatgaagatgtttacatgaaccaaccttttggttatgttgattcgtcaaatccaactgcagtttgcaaactaaaccgtgctatctacggcctcaagcaggcccctcgcgcctggttcgacacacttcataatgctcttctccaacttggcttaaaaaactctgtgtcggacaactcactgttttatcttgctgaaggggatgcccgaatgtatgttctcgtctatgttgacgacattctcttaacaggcaacaactctcgacgagtgctcaatatcatatctcaactcagcaacaaattcgccctcaagaaacttggccccgtaacatatttccttggctttgagacaactagggggcatgaaggtcttcacttgtctcaaaccaagtactctattgatctactacaaaaaactcacatgcttgatgccaaaccgagtcctacaccgatgatccaaagcaacaaactccatctcaaagacagcccaccatttgaagacatcactcaatatcgcagcgttattggcgctctccaatacctcactctaagcagaccagacatcgccttcccggtcaacaaattgagtcaattcctccaagctcctactcaaaatcattggctagcatgtaaacgcatcctacgctacatagcaggaacaataggcgaaggcatccaattcaccaaggctgtcaatcctaccatagaaagctactgtgactcggactgggcaagttctcttgatgaccgcaaatcaacttcggggtgctgtgtatactttggtggaaacttaattagttggagctcttgaaaacaaaagtctgtcgctcgatcaagcactgaagccgagtaccgttcactagctcaagcatgcactgaagtcatctggttacaatctttattcaccgaaattggcatcaaacacaacagccctgccatcatctggtgcgacaactcgggagcccgacaacttgcctcaaaccctgttttccactcaagaacaaaacatatcgaaattgacgttcacttcattcgtgagaaaatcctgaacaaaaccgtggaggtcagatacattcccaccgaagagcaaattgccgacatcttaactaagtccctaaatcattcaaccttccattacctcaaggacaagctaactgtcagatactctacacagtttagcttgagggggcatgttgaaatgaaaggattgaatgcagcccaattggagaatgaggcccatgttgaaaacaatgcaccagctgctgactaggcagaggatatccctcagtaccgttacacagaatttggagaggattctcctttaacaaattctctgacagtggaccccatgaagaatatcttattgttacaatttatcattctagtatcttccatcatattgtatatatatggcctgtaaggctttgtaatatttgagatgaatgcaatagaaatatatagcagtaaaaggttcattttctctgtttttctccactttagcttggtatcagagccaatctttcgtatgacctaaaaacatggaatcacccacttcagtcgagagatccacagcctcaaacccaaacgatgctcccatcgacaataccacaccttccataatcgaacctacaccagctccagccatagctccttcgccatttcagagcttagcacccctcaccatcaaactcgacagaaccaactacccttactggaaatcgcaagcccttccagcccttcgagctcatgaccttgaaggttacatactcggcaccaaaatctgtccacctc

SEQ ID NO: 37026 - DNA, 11559 bp, Cannabis sativa
  modified_base (70)..(70): a, c, t, g, unknown or other
  modified_base (11479)..(11510): a, c, t, g, unknown or other
agtgtgttgcacgcgtgattattttattttattcgcgtgtaaaatagactatttgaatattattttctanattgtaaattattctaaatttttcaaataaaaatgtatcagtacattcattttaaggaagtgcattgtagaatcacccaataatatatgtatacggggctcaaatattccacgaaagtactacaaattttccaagttataatattgtaattatcagcaatttgtatatcatggcgtttaagcaaagaaatgccttccaacttccaaagtgaccgtttcttttgtttgttgttattattattaattttaacacatctataaataaccctggtctggtcagaatttttttacttagatggtggtgggtcccatatacctatacaatcctagtcctacaacagcaaattgcaattgcaaccctgtgtttcatttcattataaatactaatactttcccctcttgctctttagaatctcatctctctgttctctaataatctctcaaacacttacaatccagtagagaaaacaaaataagaagaagagaagataattagagtacattgagagattcaccaatcttctcatatccttatttatttgtttttcttcagtttcagtactctttcagctataaataataatggctcaaaggacaacattattcgttaatttatttgtgttattaacaattcagttgttcatatcaggtaacaattttaacaacaaaacatcatcatcattattattattattattatttgttttcatgaaattaatgaccgttaattacaggtgtggtctcaacaagtttcacaatattaaacaactgcgattacacagtatggccaggcattttgtcaaacgccggcgtttcgccacttccgacaactggtttcgttctccaaaagggtgagtccaagaccctaacggccccaacctcatggggaggccgattttgggggaggacccattgcacccaggattccaccaccggtaaattctcttgcgtaacaggggattgtggctccggtaaggtggaatgcgccgggagtggggcaaccccacctgccacgctggcagagatcaccctcgacggccacggtggactcgatttctacgacgtgagcttggtcgatggatacaacatccctatgatgttcactcctcagggcggtaccggtcagaattgtaccaacaccggttgcagagctgacctcaacgacgcttgcccttcggagctcaaggtcaccggcgtcgatggtggtgccggcgtcgcttgcagaagcgcgtgcgaggcctttcgggaacctcagtactgttgtagcggcgcgtatggtacacccgatacttgcaaaccgtcttcgtactctgagatatttaagaatgcgtgtccacgcgcttacagctatgcttacgacgataagtccagcacattcacatgcgcctcagttaatagttacaccatcaccttctgtccatcccctaccaccaggtaaatttacagaaataccctttttttctattattgttttgtttttcttttttactagcgttggtgaaaatatgtaggagataatcttactttttgttcttgtgttgctttgagcctaactttttctcacgtcggtagaaacaaaacttaaatggaaaataagtctgttatggtaaatatgatgttccgttcctaaatttaactctttagggctggggcactctagtaattatacaccgagttgtaccaaaaagagtcgcaaagccttttcaggcattgaaattcaacataaattcctacgatattttgttttgtatgtatactgtttaatgaaattcataattcagatgctgttttaatggtaaataaatggcaatagtgaaattctaataaaatttagtcataacaaatctaacccaaattagaccatgtaataaaggatagtacataagccggctttcatgcttgtttcgttggacttgtcaattttggtctccgatgcaggagctgaatctgacataaaaatgcaaaaatcccaaataaaaacccaaatccccagacccattaattatcactttattgatattttcatgagcacaaattccaatcagtaatttcagctttaagtaacggtcaaattaagtgtagcctaacgttattctaatcagataccaacacgtggattttgtggctttagtatagattctctggttgtcagtcttttaattcttactttattactgctacgttgtgatattttttcaacggtaaatttactgaacgttggtttttttattatgtttttgtagccaaaaagcgtcacaaccacaagaagggcagaatacggagaacgcaaacccatcaccgcatagtgccggcgcaggcagcggtaccggcacgatgatttacgaaggagcccttgatgaagagatcaacggatcaccgtccacgcgtccccacgtgttgggatttcaaggcctagctggattaatcagtgtcacgttggctatttggcagttgtggaaacccttcttctaactttttcacttcattagttagtgtagtaggcccattagcattaggttccaaggtttctggtcccatctaactctaggcccaatatcgtagcaccgcgtgtggaccccgcactttgtttggttcatgaggttcgcatcggtgacgtggattcgagtcatgatttaaaaagctcaccggtcaattaattaatgtctaaccacacacttgcggagagagtctctttcaaaattcgattaaaatccaattaacatgtctttatacggaaaccaatataaaacagaataatagtggtgctggaaatcgcaagaagatgagctgtttatttagtataaaaaaaaaataaattaggatttttaattttattgtattttttccttttccagttataaaatattaaagggagggttgggattcatttgtttgtttagactttatatatagagagttccattattgtatgcaaccaccaaatttggtgcttaaatatattgaaatgaagtactaattatttatcattatttatccgagtttgttttttgtgttagacgtcacattatcattatgcacatattatatcatatatgcaagtagaataattggatttgtttttttgtttgtttgcatatttatgctataaagtataaattatataaaagaggagaatatagagtagtggtagtggagtggataataataaatgtaattaggaaacgaatagtggtggagagacgtggaagttgatgcttgaaatgactaattaacaactgccaatggccaacaattatgtaataggaattctccccctctctctctcttttagttactattaaaacactcctctacctcttgtgaaagaaaagagttgattaagtttcactatctacaattatataccaaaataagtttcactacagtttttcattaataatcaggaatttacactgcatgtatagttgtttacgtatcatgtatattaatataaatatcacacgatatcatgaacattgccctaccaaacattataaattaattcaagctagtcttttcatatggatgcacaggaagctagctagggagtgtaattgtcacgtttagtagacgtgaaagagaaattggacaatttatttttaaaaattatccctgatcttttaatatgtcacattaaaatgtatagaaatttaatactctaaaattaattaaacctcaaaataccctcctcgtaccttccctgtttctcttggccctcgttccctctctctctaactctcacaaaacccaactgatactcacgaccacagaaccaaaccgaaccagacccagaccaaataggaccggccctgaaacaaagtgggctacaggaaaaaaattatttttgggcccttatgttaggaaaaaagaggtattttgcaaagtcagtaaaaaaatatataattttaaaaggggaaaaaaaaatttgcacaggcctagcccgcctctgcgctgggcgaacttgagaccaaacccacgaccaccacaccacctctggcaaaacccactcccaagaagagtaggacaaaattgaggaggatatcacgaaactacaaagagatatcgtaaaacccaaagtcccaaaatctatgagttctcaactcgcttgttttctgcattttttttcttctggtttttgataatttcgcgaaacatcgcgaaatcatgaaacatcactaaatgtctccaattcacaacatcgcaaaacacatcgctaaacattactaatatcatcgttaaacatcgctaaatatcacaaatcattgctaaccttcatcctaaccttagattaattctatcattgcaaatacattgctaaatatcacaaaaaatcgcaaaaaaactggtaaaccaaaagagaaaaacgcaaaaaacgagagatgtcgtgagagaatatgatggcgaggccttgcgaccggggttctgggtctgtgtgtttgacagtaagggttctgggtcgaggttaacgccggagagtgagagagagaagttttttttttaaatgtaagggtattttttagaggaaaaaatattaaaagtatatatatactatttctaatttagtggtatattaaaacaacatattttacatttaagcatactaaactaaatttctcatgtgaaaccaaataatatatatgtatcaatgtttatgtgtggtgtgggtataattagctagcttagggttggtctagccaacactctcactctatgtatatagtatatgcaaaatatatgggatgggcgtactacaagaaacgtatcttttggtagtcgatgcatgtcgtcgctaaggatcgccaaaacatatcgtgttaggtccgtcactcctggtgaatttagctgctatcctccaatatgacttactcgcgggggacgcgagggagccagaggtgaaactagtggcaaagcaagtactagtggctcggttgggataggcgctttgagcctcgagcacatcagggcttgaacaattctccccctgcgagattacttttaaggagttcatcaaccaccttggaatagccccattccaattggttctatttcctacagaatccttgcaagtctgggttctgtataaaattttaagatgggagtgccccactcccctagagatagtctatctttactcgttcaacgcagtccttgcgaggaaaaattgtacaggaggcttctactatcttgggactcatataggcgatcataggatcatcgttgggttaccaaataagaccccttttaaggaagacttcttctggacgacgagcctctcttcaataaatacaaccgcatttcacatcatacgtaagtagctatttatttcaaactgggttctaaattactccaagtttttaattttggcctcactgacttacaaccccaactcctgagatggtcgaacgatgcaggcttttgctgggtctcccttttagtcttcgattagtggagtttctcttaaacgaggccaatttgagatctattggcctcctcgccgaaaacgagtatacttgtgataataagtaccccaagtatacgtcgtggtagcaggttccagtcctagctgacgatgaaacccaagactacgcagctcaggtgcattatctctagaatgcagttcctcgggaagctgaagaagaatcatcccaaggtaatcaatgtggatggtctccaaccgttcctagggcgagtcgaacttcattagtgacatccaacgatagccgatataatttttatattgggaaccctcgtagattgcatcacccataggttcgatagttggtatccaccttttcgtgtacaacttagttgcactagttcttattatgagattgtcgagcaatataggaccatgtgggatagagtaagccatccagatcggaacttagatccactaaacccctatgacatatttaagatcacgggatctagggagtttagtggatattatagccctccttccttgccatcttatgattatggtaaattctcttaagtggggattcgtttcccattttccccttttctgcttctttaacagatattaacatatctctttatctcgcagatatggatctaggtgaccttctccatacttcaagcaaaaaggggaagaagaggataaccgcctcggaaacctctttcgacttcaacgtggagcccgttaaaaggcccaggaagacgaaggctaacaagaagcgtgtcttgcagaccatagatctcgagatctctgagaatgaagtccaaactcatcctcctagcctcacacatagcgaggagctcgttccaaaaactagtctggccacagcttctttgagttaagcgcctgaggctttgcccaccgaggctgggagcattggttcagaacactctgcgcagtatgctgcgccttactagctagcgtcatctccgatctttctacccaacgactgggacttggtcaataatggtagtccgaccgagatgtttgaaaggagtctcgccttcggtctctcgattggttcccttctccttttcattttgcctttaatttcaagaacctttaaaaatacttatgcattttcattattatttattttcagcaaaccttcctttctttcgtcgcccaatgccaaggtctcgatagggtgaaacaattagagggcgagattcagagaaccattgggcaatgcgaggccgttgccgaatagtgaaatgaggctcagttggagatcacccatctaaacaaagaggccgaggaggtgaagagggcccacaaggctaaacttgaggcatccccgaaggaggctaaatctgagatgtgcttgaaacttcaagaagaacttgatgcagccaccgcgaaactcgaaggggccaaggccaataccaaggagcgatgcaacactgttgccaagtgttccatctaccgagcttggatggcgaatcgagaaatggattaaagtttcttgggggagggcatggaggaagtcctagcctactgcgagcaggcaaagaaagttgaggaagaggtcgaggcagaggaagaagaagaagacccgtccaagtctcctacgatgtaggcttggtttttaacaattattttttttatttaggaaaatagccatatagccaagacaatagtttgccccttgtggcactttttgtaaagataaatttacattgttggatgaccaactttgcttttattttatcttttatttattgcctcgcatccttacctttgaacttaatatatttgcttgtttgcgtttttattcacaacttaaacaattatatttttatcaaacttaagatattccaagtaagcatttccattgatcttatttttccttttgatactatttaagtagttaataatctactatgcatgcgagcagttatcgtctgccatattttttattcgcgagcagtttatcagttctgcttcacgtaaataattataattcatcttgtgaattaatttgtatatttttgattgcttgtatgaatagttaggccttctattcattccttaggtcaagtattttttcaaggtatcttggtacctcgtttaatatattcctataaaatgcgagccattgtagcttagtgttgtctttatgagttaaatctcatttataactgctacttttgactttctcttctgacaagaaaggtcgactttacattgtatatagacaacttcaatcaattactttaaaatttttaaattttaaagtggagtgggtttgcaatatattatgtatttctagataaattccagttgatcatacacatatatatatatgcccctcaagtaattttaaagaataaaactttgtaattacttgaaaaatacttcaactttatcgaattttaaaaattacatcagaaagagagattacagcatttttactggtagtagggtcacaaatgctcaacattccagtggttctttattagcgagtcgttaagccgagccaatttataaacactggttccaactattgccttgattacataagggccttccaagtttgggttgaatactcctgcagatgcatctctcgtgtttgcaaacacttgtcttaacactaaatcaccaattaaagagtcttttcttcactttcttattgaaatatctcataacttggtgttggtacgatgcattagtaatttatgactcagtacgtttttcttcaagtagatctaaggacaacttcaagagttcttggttttcttcttgattataaaaatcccatctgtgggtcgcaatattaacttttactgacagcattgcctccgagccaaatgccagcgagaacggagtatgccctgttgctgttttctcagtcgtttggtgagcccaaagtacttgtggtagttcatctacccatcttccttttgcagcatccaacttctttttaatagtatccttcatggttttattaacagcttctacctgtccattggcttgaggtcgtgaaacagacgagaagctcttaataattttgttcctttcacataactcagtgaacaactctctatcaaactgagttccgttatcagacactattttaataggtattctgaatttgcagattatgttcttgatgaaaaagtcgagaactttcttgcttgttatggaatctagaggttcgatctctgtcaattttgtaaagaagtcgactgctactactacgtactttgctcctcctcaccctgtggataatgccccaatcaaatcaatcccccatatcgcaaatgggtacaacaaggtcatcattcttagttttgttagtggtatgcgaggtatattagaaaatctctgacatttatcacatcttttgacaaatttgtgtgtgtctttatttattgttggctagtaatatccttgtcgaattattttctttgacaaactctgtcaacctgcatgatctccacagatgttgtcgtgtatttctttgactatctcgtttgcttctgtggggagaacacaccgtaggagaggcattgaatagcccctcctatacaatttgccttctactatcgtgtagcgaggtactgaatacaagagttttgtgcctcgtttttgtctactagaagttgtccattgagtagatagttaactatgggtgtcatccatgtaggcgaggcatcaatcatttcaacttcttccattttacatgtacttggttcgtctaatacctcgactggtaccaagttcaagtcatcaagttcgttttgcgaggccagttttgccaaggtgtcgacattagagttttgttctcttggaatttgtttgattttaaaataatcaaacctttccaagttcttccgaaccttctccaagtatttttccatttttaaaccttttgcctggtattcgcctagaacttgatttacaattaattgtgagtcactgtagcacacaagattcttaatttttaacatttcatctattttcaaaccagctatgaaggcttcatattcaacctcgttgtttgaagtgtcatattggaatcttaaggcataatgaaacttaaagctttctggagagattagtatcacccctgcacccgagccattttcattagatgctccatccatgttcaacttccaagtgtctgtgtctcactgtataagtggattttcatttggagttatcccttctatcaggaaatctgccaaagcttgggccttgatggatgttcttgggtgataagttatgtcgaactgccccaatttaataggccattttatcaatcttctagaagtgtctagttttgacaagacttgtctttggggttgatcagttaacacctttatcggatgtgcctggaagtaagaccttaattttttagttgcatgaattaggcataggttgagtttttcaagagggggatatctcgattctgcccccagtaaccttttactaacatagtaaactggttgctggtgatttccctcttctcgtactgatgctgcactaatcgtattctccgagatagccaagaagaggagtaaagtctctccagttattggtttagccaaaactggaggtgttgacagatgtttctttatatttgtgaagccttcctcacactcgtctgtccattcaaactttttttacatcgcaacacattaaagaatggtaggcacttgtcagttgatttcaagatgaatctgtttagagctgtcattcttcctgttaagacctagacttcctttggttttgtgggcgatggcatttctatttatgccttaattttttcaggatttgcctaggtgcccctcgtgttgactatgaatcccagaaactttccttaggagactctaaaggaactcttctttgggttaagtttcatattgtacttcttcagtatctcgaaacactctgcgagatcttttgtatgatcttcactttttactgactttaccaacatatcatcaacgtagacctccatgctccttcctatttgccttccaaacatttcatttactagtccttgatatgttaccccagcattcttcaaaccaaaaggcgtgactttatgacaataaagtcccatgttggctacaaaacttgtatgctcttgattagggacatgcatcttgatctcgttatgtctagaatatgcgtccatgaatgacattagctcgtgtccagcagttgcatccactaactggtcgatccttggtagtggaaagtaatcctttggacatgccttgtttaaatttaaatgtcaatacaagttctccgagttccatttggtttaaggataagaacaggattagatgtccacaaagggtagaatgcttcgcgtataaagtcgttattcgataacttgtccacctcttctttgagtgcccattatctctcaaaatccaagtgtcgccttttttgtctcctaattgggtaatttgggtcgatattcaagtgatgggaaatatttttagggtcaatccctatcatatctgaatggctccaagaacactgatccttgttttcctttagaaaacttattagttgctattttagtttttcatctagatttttcccaatgaatacacaccttgtgggattttctggatctaaaataacttcctccaattcctcaattggttttaacaagttcttttcatcttgaactcgaggatctagatccttgtcctgtttctcactttcctttgttacaactatcattagttggcggccatgctcattatttttgtagctctatgcgatagcattcacgagccagtagttggtcacctcgcactacacctacacctgttggtgtctgaaacttcaaagataggtgtttaattgaactaattgcccctagtccaattagcgcaggtcgacccagcaatatattgtaggctgatggtaagttgacaactagaaatgacaatattatttaataannnnnnnnnnnnnnnnnnnnnnnnnnnnnnnnatttaaatggttagaattggaaaaatgacatttttggagaaatagaaat

SEQ ID NO: 37027 - DNA, 4858 bp, Cannabis sativa
  modified_base (2849)..(2857): a, c, t, g, unknown or other
  modified_base (3698)..(3703): a, c, t, g, unknown or other
acaaacaaaaattgagaccttagggattattaccgccaatttttgaggttgagtattaatctgcatcaaccttaagtttttggagacttttaccgcaattatctctttaaagaaaagttatttgttttgttttgttgaaaagaaaaaaaaaagcaattttaaaaatattaaaaaaattacgggtagttttaataaaggagtgggtttgttgtattatttgagttagcccaatgatgataggagacccaaaactagaagtcatatacattagactcatccaaatattcataccaccagcacaacttcttggttctcttcattcctcaatctcttatcgcacttagttttaggctttcttcggttctgtcaccaactcatcagcgctacactagaaatattaacaacctcgtacactaactgatcggggatcggagatcgtattggacgaattccgtttcactcattgaccggataagcatttatttcactcacaacaggtactgtgcttacgattttgaggctctgttaggttgaaactttgtatggttggttgagttttctaagtgattttctctgttttgtatagagttctacacgggcattctacagggatattacttagctattatccaattctcttttcttttttcttctttttaataatagttaggtttctcataattaggttataatgttttgttctaagatttagaaattgtgttgaaacgttatactatgaatatgtcttaataatcatacgatactttgttctaatctggatgttcccgagattttgttctcaatctttttcgatttgaaacccacgggctagggccgatgaaacttccatagttttctgattttggttcaataaattttttcgttctgtttcattcatgtgaatcccatttgtatggtatttgctcgtacatatatttattattttaggactatgtttaagtttgggataattctatatcttgtagttgaagaagtgtttggtgacattgagaaacttctctccaaataaaatctaatttatatttatggtgtttctaggagaattgcaattactttaacaactcatagtgacaaataagttacctggaacaatgttgtgttgttgattggagagataatttgtagttgttcaaaaaaaattctggtattgtaatgggagaagcaaaataggcaatgccattgaatagttacgaattaatactgtttagagaagttttgacaatacttcattgaatagctaccaactaatagtctgtttagggaagttgtgaacaattatggtttatccatttgcatctcttaagccttgttgttttagtatttgacatgtttctgttgaaactaaaagaatttttaaaaatactctgttaagccacaagaaattctgtgagataggcatagttttaaaatcggtaggcaaggcagtgaaaaacgcagctgaggcagctgctgtcattgaggcatacgcctcacactgacgaggtggactttaggcgcacacctctgaggtgatgcataccgaggcgcatgaggtgcacacctcaacagcgggcttttttttttcttttctgtgttagggctgttttgttggctgatttggattttttttaaaaaaacttttctaatagctatttcatacttttaaacgactaatgagctttagtttggatctttttttaacagatttttaataaaaaagataggaaaatgtccctaaaaaccctaaccctctaagttcttaacaaatttttatatttagagctttcaccattttttatttgaaattgaaccttctatcaatttagtttatgattttaagacttaattagtaattttcttgaattttatgactttgttgtggaattatgtgttgttttttatgagttttatgatattgtaggaagtttttcttcttattgttgaggcgtacgccaagcccattctaaattctttttctgttgctgactttctctcccatgttttcttcgttcagtgtctacgtttcactcaccctttcttccgttctgtctctgattctcttggcctctgattgtgattttctttctgtggtagctgctcatggtttcacagtgacgcaaaataataatatttgtttctgctactgaagaattgaggtacattttctcactgattggttcttctcttaatgttgtgtatgaataacttgtggattcatcctaggaatttggtactgaattatatggttttaacattggtataaggtgattaattcttagatcattactattatgttttctttctcgtaggtgtaaatatattttgttaatgtaatgctagaaacaaagtagggcatttgcgttttgggatgttgttagtgtaagaggaagatgataaataaatgctttgcttggtgttgttttttccccctctcgttgaaagcattttgaaacttgtattttgttcgtctctaccaggaatatgaaatgactatatattatactaacatttatgtggtatttcatattaaaagcacctttgaatattgctcaagacctagacaccacactatcaattacagagaaataattttgaaaatctaatttatattttatgaattgatgaatataaatcatataactatactttcactcagaatatcaggggaaacttgacaccacattgtattacttcaatatatctaattttatagtaagatagtttagaaaaataggaataagtctttcgtgttaatgaatgctaatcatatatttggaaaatttgttagctttttctgcaagtttaataagcctctagaatttgtttagtttaggtggcgtttggtaacnnnnnnnnnttttaattttaaaaacagaaaaatgaaagtaaattttttgtttttaaaaaacaataatgtgttctataaccatttttgtttttaaattttaaaattagaaaacaaaagtgtgttcgctaatcacttttgttttgtaatttttaaaacaaaaaacaaaaatgtgttctataattatttttatttttcaattttaaaaataaaaaatataaattttctttttttgaataaaaaaattatgaatattattaagttttatttttagataaataaaaatcaaataaattaaggtataggtattcaatatcacatagcacaacatcttatcttacaaatgatttattagagaaaatgttgaacaacccaattgtaatttgttaggaatagtagttacttacaccaagacaaacactaaagaaccacaaacccatcaagtactcaatgatattttgttaagtagaatagttttgcaacaaagttttattagagtaacaacaattgtaactttttattactcaaaagtctttgggaaatttgattttttatgcatgatttaagagttaattggttaggaaaacttaaactataggtaattgttagaataggcccactttacctaaatctcaaaactacccctctcaaaatcccacactcattctctctccttccctctattctctctgttcatcccaacctagctgtcccaaccctagccgaaaccccaaattgtcccaaacgctagccacggaggagacccaccgacccacggcgcaccaccactgactcacggtacccacgacgcaccaccactgttttttatttttttattgattttgtttgtgannnnnntgttaaagatagattttgttagatttatgaataaatttaggttttagaatctcagatctatgattttaggcaaggtctgatggggtccgatagggtcgaatgaaactgtgagtttgcaaggtagaagacataggtccgatggggggtccgatatatggtccgatgggggggttcgatgggtttgatatagggtccgatgggttcgattgtgttcgatgtggggtccgattgtgtaaatgggggtgatgtggggtattttagggatatcataaaagctgtcatatcctacaaatattagttattatgtgtttaggggaaattttttaaccaaatgtaagcatgaaaaatcaaatttcccaagtcttttggagcagattgcaaactatcttatagtcactgacttaataggtattattactcaatggatataatccaacatatattaagactaagtgatacccacattatcatcaaaacttatagcaaatattgaaatcaaattcaaagagaaatttttgttgttataaaatagagtactagataaaatgtgtaccacaaaacaagcaatctaaaaatttcaaagccagcagccagtcagaccaaactgaaaatttcagcaagaacaagaaacacttcaaattttgagcaatccctatttagactttcaacttccaatatataaatcctaattttcaattcttaaagaaaaaaacagaccaaaaaattcagagtccaatttatactagaaaacaaaactgttaaacaaatccaataagttgaattagattaaacatatcaacttcaatatttctctcaaacatctctattccataactataaacacctatgtctatatatatatatatattgacatatatgagcatgaaagaaagtagcaactgaagcattaaagggtatgtaacgatatatatgtatatataatccccattaaagactatttctcaaataataaattattcctataagtctatctaagaaccacaatctgtgttatttgaaaggtcaaaaatactagggttatcgtattctttcaaatgtgtggattgaacctctctaagaacccattttagatcagagactaaactcgaaatctcattttagagatcaaactcaaaatccattcaaagataaaat

SEQ ID NO: 37028 - DNA, 6259 bp, Cannabis sativa
gtagcaaaaattttttaattgtagaaaagaaaaataaataataataaaaaattaaaaaatcaaaacaaatggttggtctctttttatttttaattgtagagtgaaaatgagaacagataaaaaaggaaaaagagagaaagtggtgctgatagtggtgacataacacaaaagattgatgaattcatgggcttacattttgagcggtagaacggtaactatattttgattatttaaataattatgtttgttatttctgtcaatatttttaatattatgtatagaattaaaatttctctatttgaaaaaccactgtgaaccgaggagacatatttacgattcaaaataggacaaggagcgggaaacttagtaaggaatagaatagagaagagttgtagctgttctcattttcaatcaccttaccactctgcttcctctcaccattagggcttcgaaaatggcggacaaaagcatcactaaaagaccacctcagagtctcaacgacagccactataagttccttcaagacttttccgctccgcccaaacaatcctccaaaaccctcggtacgcagattatttttctttattgctttctccgtccgttttagggtttataaatgttggattgattattaatcgtcgtggttctggttttttgttttttttttttttttttctgaatgttgttttgggttttgttttccatttctaagtttgggagctctgaatgatcgtttttccattcactttgtattgatttcagaggagaatcgtgaggattcattgggcgatcacagtgaaattcggctcgttgacgacgatgttccgaacttctctataatcaccgagtttgattcttctcctgctcctggtactcactctctctgtctcttgtactgcccacttacaccttttgtgtttgtgcgtaagatagtatttgtgaaaagcctattttgtttacttaataaccttttgttggtttgcatgaattttagaacaaaagctgaccaaggtaaagattcaaggacgccgccgtctttgcaaactttctactcgggatgatcaggataagtccgagaaagaaaatgtgtttaacgaacccacgtttgatgcaattacagattttcagtccccacctccaccacataatccaaaaaccaatgaggaaaatggtggaggcaacgagattagagatattcttaataacttgagtgcaagacttgagtttttgtccattgagaagagaaaagatgccaaaaagtcgaatcctgttgaagaatctctgcctcttccgaagtatgaaaggattgaagaagagaaacaagttgacccgcctgagtatgctagtgcaggctcttcattttcacttaaatctgattcatctgattcgtcatcagatgcaaagaagaatgttaataatgtaatggggagaggggatgacaaaaatggcagtgaccttcacgatgaatctgacggtgacatatctagtaaatatgagcacaaaaatgaaagtcattttatctcgcagtttaaaaaagaagaggttggtaagaaactagatagtatacaaaagacctcagcataccaggtgaaagaagaggaggtagatgaagaagatgattgtgctgtgttgagtaaggaagtggcaaggggaaagcagagcaccaagtctggagaccaccacatttctagcaaagttgacatcttggaaggtgacagctctataactctgaagggtgcaaaatatacatacaagctttctggtaatatagcaaaaatgctgtatcctcatcagcgtgaggggctcaagtggctgtggtctctgcattgtctggataaagggggaattttaggagatgacatgggtttgggaaaaacaatgcaggtaaggaaataaagaaataatctgttgaaagattctattttaagattgtttccagtgaaattgaattgtttgatttgtttatcatgtagatttgtggatttttagctggattgtttcattcgcgtctgatcaagcgggtcttaattgtggccccaaaaacattacttcctcattggattaaagaattatcagttgttggtctatctgataagacaagagagtgagattgctttcctatctatccttcctttttcttttataaccaaaataatatgttttttagtggtaaactgatgattaatttattacagatactttggaacctgtgtgaaagcccgtcaatacgagcttcaatatgttctacaggtatcaatgtgtctactttgtattgttccgatatagcgagtttaaaatgttgacttagaaatgcagaatcagaagttagatcaggataacattcatgttatgtgtttataatgtattaaaagtaaaatatgcagccaggcttatgctttgaattcaaatcgaattcttctcttaatacctattaattcatttagtcagtcattatctttctgcccaaacacagaaagaaaatgactgtgtgaagccacgttatttgttaagcttctcttttgtttggttttgaacatgtattggggactttcatactaatcactgtttgctgttttgtaggacaaaggcattctccttactacatatgatattgtgcgggcaaactcaaaatctttacaaggggagaacttgatgaagtatatgattctagatgaagaaagggaggatggtaacatatgggattatatgatacttgatgaagtaagtataatagtgctatacatggttaaactggaactggtttaagtttctttatcacttacctaaattattttagttggaaatctttgaagcacatttttttttttaaaagagaaagggtcacttgtcttagatccccactctaatttattgaaaaccctcacgtgtggcggagcaaaactgtggtaacaaaatttttagcaaaaagcccaacaaaacgtaatagaacaaaacagttaccagcactacagtcaacaaggttttccattctctgcataaaaaaggaaatctcctcaaaatgtttagttttaaaggcccatgacgctgtctagaaccttattttctcccacaaatcctctactggaccctcctttccttcaaatattctgttatttctttccaacctagcatctttctacagtgatacttccctatatactctgtgctgattaattaatatgttgtttttgcaaagtttgaaatctctgacaagttgcctgtaaagagctttgccagtgtattaagtgtattttctaatcatcaattaagtgaattttttatttctaagagattttctttatgccttcatgaactatagacatgtctccataaatactatatcagccaactagttgattctcttctaggactttgttgccgattcaagtgaaattcagttggaatttgtactattataatttatacccgcattgtactatgaacatcctctagatgacacgacgctcctaattctttatttcactatttctttttctttactttaatagggacacctcataaaaaatcctagtacccaaagagcgaaaagtttgcttgagataccatgtactcatcgtataatcattagtggtactccaattcaaaacaatcttaaggtatgtatgtgtatggtttgattgaatttcccttttattttagtttttctcctttttattgcataaaacttgatcatgtaggcatgtgggataatatgattttggaattatgcaacaggaactgtgggctttattcaacttctgctgtcctgaactacttggtgataaaaaagagtaagtcattactgtgcttcatcttcttttgcttgaataagtttatgcttcacacattatgattttttgtgggattttctcaggtttaaggaaacttttgaagattatattcttcgtgggaatgataagcatgccacagagagggagaagcgcactggttcagaaattgctaaagtattgatattatattatgacttaattagttttgttagttcttcagttttttaattgtagctgctattatattttaaatgttggttgatgccaatattacttttgttactttgtttgacagaaacttcgagatcgcattcgaccttattttttacgtcgcttgaagactgaagtgttcaatgaagatgccaacaatggagatgcaaaactttctcaaaagaatgagatcattgtgtggttaagattgactaattgtcaggttgggtctgttgcattttattttatttattatttttatggttctcatacattgatactcaactctttcattcatggtggtgtagcggcaactatatgaggcatttttaagaagtgagctggttctttcagcttttgatggatctcctttggccgcactaacggtagagtactttttttgttttaatttggattctctcacttcttgctccagcgcattctccttaacttgcctacaagtattggggagaagttttgtgaaaaaaacaatgaaactgtttttcatgttaaattttgaaagctttttcaagttcttttcttttttattctcttgcatagaaaacaaatacaattattttttttccttttgtaatttgttttatcacaaaatgtaacttgtttagtgtttcaaagcattatgctattttaaacttgattatgttgtagtatttcaaagacaagtgcttgactcaattaattggctgttttttggtgcagtataacctttttttgcagcaattccttaattatttgagtcaagcacttgtgtttgaactgtcatgagttgcaaagttattctgtcacgagtcacacttgatacctagttttcaaaatgtgtagtttcgttttcacgtggttggtcttttatgtatttttttgttttgttttgttttttatttttttatagatcatttaatacatttaaagagtaattatgagatgttgttaaaaaaaaagagtaattatgaaatcagataattttaaattactttggtaaaaagaaaataaaatcattttggcaaaatgacttatgttaaaacattgttgggttattcaaaatttaacattgttggaaatatgagtactttgcaattatgcaaatattttatttacataaaacttgcaatatactattgaagaagaggttaatacatcatctcatatagaaagcaaaagttgtgtcatctttagtttttttagcaagagaatgattaatcttgtatttatttacttattatatatattttttgagatgaaacagatcttgaaaaagatttgtgatcatccacttctgttgacaaagcgtgctgctgaagatgttctagaagagatggatacaatgcttaagccagaagaggttaatgtggcagaaaagttagccatgtacatagcagatgctgctgagaaagatggctttgaagagaaccacgtgaacatctcatgcaaaatatctttcatattatctttattggtgagatgctgcacatattaatgagctaaaatttacatttgcattttctgggtaccatgttagataaattgctcaatgctctttttcaggatgacttgattccaaaggggcataatgttttgatattttctcagacacgcaagatgcttaatctcatcgaggttagtcctacatttgtttcagtttgatgttttattttggggcagctggatgatattatttcatctatatttatgcacaaagtttaaaaatattattttggggaatgatgtgtattgctttgctttagctcggccaggttgtgggaagccgaggcataatcctcaacagagaacaaaaacttcataaaacttatatcaagaaaatttcaatctacataagcttttaatttttaaactaaaacttctaataagtaatatttattctggacatgaatttatacctttcccacctgggcacactaacttataagtttttattcaagtctttattatccagtcacatactttcaaatccaaaaggtgaacagcctatattattcggtggtgtaaattgaaaaagaattggactatgatctgaaacaactcgaatctctacttgttgatgaataaatggaaaaattccacccaattgctgttgtctgtcaagtgttcaacaaatagcccagctccctattcaatctgtgaaagctttcatgcttctaatgttataagacagtttttgcatgctcagaaagaattgataatttttctttgtcagtgatgatgtaatttacatgtgtata

SEQ ID NO: 37029 - DNA, 4669 bp, Cannabis sativa
ttaaacaaaataatgagacaaaacataacagaaagactaaatttctgaaaatataaagattcaggaaattcttaacaaaccgagcaaagtcagtattatcgaaagtttaggaatcaaaattactaattattctaacttgaaaagacatgagagaagtgctaccgttaaaagtgcactatacaataggcatactgcacccaaagtttaaatagaaaattacaagtgacacagccaataacataagcacaaaaattcctcaatatgtaagcaaagagtacttgttccacataaaatttacacaccacaagtcacaatgagtttttctggttaaagtccccacatggtgaaaaaaaaaactcaatatagaatgaaatcaaagtgaaaaagacctaaatgtgacaaagaattacaacatgcaggccaaaaaaaaaatagaaaaggaaaatacatctatggctacagaagtacaattagaatatcttgttgtattgaccagtgagagaacccttgagatttgagtacaggccatagagtgaatactggcgaaggttctcaacttcataccaagaattaagagaagaaaggtgcttatctgtgccagagaatgccacttgtattccaaggctacaatctacagtgccttgatggtttttacagttgtttgttttaatagcacaatcctgcttgttgaggcagacaaagttggaatttccggagcatttggaacaaccgtctcttttccaatacaagttttgaagccttcccttcttaaactcgagcacctaaatcggacaaaattcattagattctacaatgataatgaaattaagattagcagcagtgactggaggggagtccaaagttaactcttacaagagtaaagctggtcacagtataggaaccatttgcaacaaaagcagggggggaccttgcagcatattttcgaccagcaaatgcgaccatgtagccaccataagcatcctgttacaaacaaatgattacaaagactcggaagcgtaagcaagtattaaagaaaattggcaaattaaacaatactctgagctaaacatactaaaagttcataaatttaccaaagaacaaaaagctcaatcgttaaaaatgttggaaaagttgtttttcccatggatttatcaggattggcagagaattttgaaaaagattcatcaaccccacaatgaaccaattgatgaaattaccagtaactagactacgattcaaatgtgccaatcattattaagcaccaagtaaataccaccattttggtggtgctactagtgacctagtgtacttagcaaagctgcgaagagaaacttaaagagcaaaattaacgataaaactaaccaaacataacaagctgaactccaaggaggaatggcttaatcatggtacattttagccaaacacaacttcaaaacagtgttaaaaaatggattcccatgtatctgaatagtccatggattaatcaaactaactaaagacaggcaaagctacaaagaccaaaattttaaagtttctgcactcaagaatccgtaacatagttcaacttttatcaaccaaaactctaatcttcatcgtaatattcaaactaagtggaaaaaaacctctagctaattgcaattgcaaaaagccctaattttgactataatttctatgttcataaaaaaatcatcaaagacaaagactttacagttcagaagaatcctacagccaagtccaattcaaaattaggataaatgagagtttcaaacttgtacgaaaaacaaaaatcccaaatcatagaaatcagaatcgaatagagattatgcacgttagagagagagagagagagagagagagagagagagaactaaccggagaaaaggaagaagtgttgatggtcaagagagagatctcatcgaccttgggcctgaagagggcgagctgagaatttttgttaggaaggtcgagccttcgatcgcaaggagacagctgagatttgtttgcattgccaaagaaattggaggaagcgaaagcgattccaaaggtgaaaccgtcggagatctgaacctgagtatcggtgcagggagagtagacatggttgttgtcgctagctgtaattaaccctagaatcatcatcatcgtcgttaccaaaatcgaaagagatgccatgattgattccgaatttgagagacctctccgcttcttcttttttgtgtttttagttttgttctttgattctgtcaatagatttggttgtggtatgatctaaaccgttcaaaatggaagataaaaactttctctagtttccgagccttgacagcagatttggcaaaatgaaatcaaccaaatatctctaataaaagtcctgtttaataattttgttccaaacaaaatatcttttggaaattttgttcaaaacacaacacaatgcgacctcatattttgaagaattaaaaaaaaattatatatataaccagtttgttttttgggataatactttggtatcatgaattaaattgtaactcatttacaataatagagtaaatgggaggagatatagtcccaaccaagagcaattttcatccagctctagagcatactgagccaacccgtgagtcgccatattgacactacattttacatgagtaatagtaactctaggaaaaaaaggataaaagacttaaaatatctataattagatcatgaaaagataaaatcccaatttgtgatttattcaaagcatttgcaaccatcaaagcatctatttctatttatgtaatagacaactatagttaaagaagtcaattaagaccgcaaaaaatagtctttgcctccatttcatgtgcttccaaatatcctctaatcggcttaaatagggcagtcacaacatgaccgtgagcatctcgaatgactgcaccaacaccaattatacccctcctagcatccaaggtagcatctacgttcacttaatagtcgcctaaaataggtggcaaccatggaggtgaaacagtcggtagttgagttgttgctgagagattgttgtcttgagttgcaggaacaaccggacagtatttttgactagcaaatttgaagttgtcgagataagttgcagcaaactctgcaagttgagcagccgaccttaccttccctccatgaataacaaagttccttttagtccaaatgcaccatagagtacagattataaattctatttcagccttcatatataatgtagagagatgaacaagatagtctcctttagtcatggtagaagaaggatgccaattgaaaaccaaccccgacctacgccaaactgatcgagcatacttacaacaaaacaaggcatgtcttatagacttccaagcccgactacacactgaacaagtagcatcagttattacattccttttaacaaggtttgtagcgacacagagagcatcatgaaccacacgtcaagcaaaagttttgactttttgcagcaatttaagagaccaaaaatagctccaccatgacgacgatgaagcggatgtgggaggaagcatgtgcatcttcaattgaatccaaatgaaagcctaatttaacagtgtaatggtcggagtagtgatgatgccaaataagcatatttgggtttgggaagaaactcaatggtaaagtaagaatcttttccacatcaagttgtaggaggtgtatgtttcattgacgctcttctattatcaagttcgctatcatcccattctcaagcccaccataagaaagtggaagaaaagaagtgtgacttagaattatttgaaccacttctgacatatttgccctcaccaatcttccaccgtaaaccactttctaacaactcacgaccccacaagatcccttgccaagccctagaaggagagtgttttgtttgtgcttcaagaaaggagttgtaggggtgatatcgactttgtaatagcttgctaagaagagaatctagattttgcaaaatcctccaaatttgtttagccaaaagagcttgattaaagtgcatgaaggagcaaaaacccattacaagaaagttgaataattatccttattattacatagagtagaatgcggtaatagcaaattttttataattataatgtagaagatatacattacaggaaaagaatggttttgaagtattaatttctatacatacacttattttatatctatataatttatgatttttaatatcatgtggcatatgttatttgttttatttttttttagatttttttatatattaaattatttcatattttttaggtaacttatttttagtgaggaattttaatatttttcaatgataatgtgttactattttactttttagctaattaaaaaagagttagaaataaaaatatagtataataattttttatatctttcaaaaaaaatgtatattaaaaattagtaagactaaaatttaatataatattattatttaattatcattaaataagtaaaagatataattcatttcatatatatataactagggaactaagccgcgcttcgcgcgggtttgaccctacttttgtatttttttaagctaattaagatttttatcccctgaattgtaacatgtaccaaatcataccccttgaacttttaaggtcgttaaaaatgcccatgaactattgagattgtt

SEQ ID NO: 37030 - DNA, 3858 bp, Cannabis sativa
gtttgctagatgccagtaaagttgcaaatatcttatgttataattcacatatttgtgtaaagttactagtggttctcaagttacctatacttcaaagtcgtgtgatgggcctttcaccaatgacatgtttttagattgattttcatgccttattaagtattggccttctaaaataaagttacggtttattgtagtcatgaaatgtggctattgggactacagtgtcttaaaatgttctaaatgtatgtgattggatgtacaggagcaacttccttccttttcaccgagtaccagtatgttggcattttcatggcaatctttgctgtcttgatttttcttttccttggctctgtggagggattcagcacaagtagccagccgtgcacctatgacaagactaaagtttgcaagccagcacttgctaatgctgtctttagcaccatttcctttattcttggtgccgtcacatcagtggtttctggtttccttgggatgaaaatagctacctatgcaaatgctagaacaacgcttgaggcaagaaaaggtgttggaaaggcttttattactgcattcaggtctggtgctgtaatgggatttctccttgccgcaagtggtctattggttctttttattactatcaatctcttcaagctgtactacggtgatgattgggaaggcctttttgaagctataactggttacgggcttggtggatcttccatggctctctttggtagagttggtgggggcatctacaccaaagctgctgatgttggtgctgatcttgttggtaaggttgagaggaacatccccgaggatgacccgaggaaccctgctgtaagcattagctcactttttctttttaaaaattataatagttagtcttttttatttattattttaaacatacataaataatcttatatttataactttcatgtcttcaggtcattgctgacaatgttggtgacaatgttggtgatatagctggtatgggatcagatctttttggctcatatgctgagtcctcttgtgctgctcttgttgttgcttccatctcctcctttgggattaatcacgagctgactgctatgctatatcctctcattatcagttccgttggtatccttgtatgtttgctcaccaccctcttcgcaactgatttcttcgagataaagaacgtgaatgaaattgaacccgcgttaaagaagcagctaatcatttctactgctctgatgactattggaattgctgttgttagttggattgcccttccatctaccttcaccatcttcaattttggaacacagaaagttgtacataactggtaagttgtaattataaaactttcttgtgttgcttgctatgtctttctttgttgtgctaaaatattttcttttctctgcacaggcaacttttcttatgtgttgctgttggtctctgggctggacttatcatcggtttcgtaactgagtattatactagcaatgcatacaggtaagcatctttttatcttggtatatggtattccagtgcaatgattgggagttgactattttcttttaactgtgtagccctgtgcaagatgttgctgattcctgccggactggagctgccactaatgttatctttggtctcgcattgggatacaaatctgtcatcattcccatttttgctattgcagcaagcatttttgttagttttagctttgctgctatgtatggtattgctgtagctgcacttggaatgctgagtaccatagcaactggattggccattgatgcatatggtccaatcagtgacaatgctggaggtattgctgagatggctggtatgagccacagaatccgagagagaaccgatgctcttgatgctgctggaaatactactgctgcaattggaaaggtttgaaattctttgtacccttctagtgttacttttttactttgtcatctgggtcctggttttcagcaagcacaaggggaatgtgtgaaccctgctctttagaattagcttttgtcttgttcccttctctcacaagttatttttaaaacttagaacattagttcttccgttcagcatctacaacagtttaattttctcaaaagctctttagaagatgaattgtgcctgatagttgctttctatttccttttcagggttttgctattggctctgctgcccttgtatccctagctcttttcggtgctttcgtcagccgtgcagctattacaaccgtcgatgtcttaaccccaaaggtgttcattggtttgattgtaggtgccatgcttccatattggttctctgccatgacaatgaagagtgtaggaagtgcagctctaaagatggttgaggaggtgcgtagacagttcaacaccatccccggtctcatggagggcactaccaagcctgactatgctacctgtgtgaagatctccactgatgcctccatcaaggagatgattccaccgggtgctcttgtcatgctcacaccactcattgttggaatctttttcggtgttgaaaccctctctggtgtccttgccggatcccttatctccggtgtacaggtaaaattcaagataattttctcattcataaaagatattgacgattgtgtttttgacttaaatctcttctcattgacagattgccatttctgcatccaacaccggtggtgcttgggacaatgccaagaaatatattgaggtatgcattcaagtattaacacatttgaaaagattattaaagttggtgtttttgggtgatatcttaatttgtcttgtatttctatctaggccggatcttcagagcacgcaagaagccttggccccaaaggttcagacccacacaaggcagcggttattggtgacaccattggtgatcccctgaaagatacatccgggccatctctcaacatcctgatcaagctaatggctgtggaatcactcgtttttgctccgttcttcgccacacatggtggcctgctcttcaagatattttaagagcattgaattgggaagatgatgattcctcacccctcttaatctaccaccccaatttcattccatccccaatcttttggccgcatctttcattgctgactttttctccccctccttttttattcatctctccttaaaccaggatatatatatatatatatatatatatatatctatatatttagtctgtagttgatgttatgttatatagcttctgaaaccagttatcttccattccaaggttggatcaaccaagaaattttccccttttaagggtttgattatgacgttgatcattatgttgttgatgatgataattcttgagtttatcaggagcactatctgtgattaattttttttgttcgttattatcttcataattcatttttgaagtagaacttttttttgttattgttgattatgtgagtgatggtaagaaaattgttttggaaaaactgaagaactaactttggtgtagtttttactttattttatgtcttttttttttatacttggaaagccctgaaaatatctggtgttactaaaatgttacattttaaaatgggataattacaaaaattattaattttttttgttacaatttttacatttttaggtataaactttaaagttttttttcgaagtgtttgtataagaacaacacaaaattaataagaaaattacataaaaatatagttaattaggaatttttctatctaaattttgacaagtattaaatcatgtttcttgaattaaaaattctccttgaactattgagattgttagatttaagaacttttgtctgattttagtaaaaaaaatttaacatatcaaagtttgaaggacatgattt

SEQ ID NO: 37031 - DNA, 5951 bp, Cannabis sativa
aatgtaacttacttatccaagctacacggtttcaactttcttggccagattttgccaccatagccccacgctcacaaatttgatagaatcaggtatcggttcgcatcgaactaacccgcttcgaaaaatctgaattagaaaacatgcacagttaaataacaaacatactagtaactaatttgtgaagtggaattagtatttgaaccagaaaatgaacaaacatttcacaacctgctaaagctcaacacaattcccactgaaccgaaactgtcgaatgcaagaatagcattgttgttatccatagtgctaactggagttagtgattccatctgaaatttgataaccagcatccttcatttccattgctaattgtcccaacatgtcatatatttcatcacactgatgatgtttctggtctttagaaacgaaacagtttacagaacaggaaatctcaatccaactacaccctgtctccttccacagacccttttccctcatttgttttctcaatttatcaacatgtgaccactctccttcctctgcatacatgtttgagagtaatacatggtagcctgtcatgtcatttgctttccccaattcgagcaacttctctgcaacaacttttcccagttcgaattgttcgtgaattctgcaagccccgagaagtgatccccatatttcgagcacattgccctcttcgcctaatcctctaacaaagtcatatgcttcaactaccctaccggccctccctaacaagtctgccacacatccatagtgagcagttgatggttgaatatcatattcttttgtcgtcatcaactcaaatattcgaagaccttcctcaaccaatccagcatagctacaagcggacaagacagcaacgaaggtaatggcatcaggtttgatgccagaaccttgcattgagtaaaacaaagaaagagctttttcgcccattccatgctgaccataacccagtatcatagttgtgtaagtaacagaattcttcatagtggtttcttgaaacacattttcagcataggaaatcgcacccgatttggaatacatatcaattagtgcagttcctacaaagacattttggtccagcaagtgtcgaatcgagaacccgtgtaactgctttcctaaatctatgttccccattggattacaagctgggagaatcgatgctaaagttacagcatttggctcaactttttgcttcatcattaatcttagaagcataaaagcttcttcaatcagtccattctgagtgtaccctgcaatcatagaattccaggtagcaagatctctatcatgagaacaacttttctcaacgagtattcgtaaagtactaaccaatcctgattttgcatacatatcgataagatagctgtacatcccctcaaattctatcccattcctaattagataagcgtgagtctgctttccaacattcgggtttctaagatttgatgctgcagaaaggagagcagttacagttacagaatcaattgtaaccttctgtttctgcatttcatacacaagcattaaagcttcatcatccaaaccattatgcacaaatgcagaaaccatagtattccacgaaacaacatccctttccggcatcccatgaaagatactaaatgatatatcaacagaaccacaccttgaatacatagcaataacagcattttgtatatataaaggtaccactctcaaattcttgatcacataagcatgtatctcttgagctaactttaattgttgcaactgcgaaactgcagttacagccgaaagaaaactgacttcatcaagaacagcctcttctgacaacgttgctcgaaggaaaaggtcaatcgcttcattgggaaagttattttgaacatatccaccaatcatggtgttccaaatttctgtgtttttctccaaacaaaggtcaaacatcttcctagctaaatccaaacaaccaagctcagcaaacatgaatatcccagaactcacaacaaataagtcattcacaaattcccctccattttttattagcaatccgtataaagcaatagcatgattataatatcctaaacctgataaagcaggaaatacattaacaaaactaaccgcacttggttttactctcatcctcatcatcctcacaaactccataacagcttgttcatatctctcagtcttcacataccaagaaacaagtgtattccaagcaaccacatttctcttaggcattgtatcaaacaccttacgaaccaaatcatactttgaataatctaaaccaccatgtgaatgtgaacaagcagcatacatattcaacaacgaattatacacaatcctactggggttcgatatacacctcaaaatatggcaatgcaatgctctacccaacttaaggttccgagtatcagcacaagccttaagggttgaagagtaagtataagaatcacatttggtttgaggagcagatttctacatctgggcataaaccaaaagcccttcatttggaaaattgttgcaaataaacccaataatgatggtgttccaaagaacagtagttggtcgaggcaaagtatcaaacagttggcgtgcaaggtggggttggccctcttggcaaagcttgctaaggcgagcacgaatggtgagattttggggtttcttgggaggtggaatggttaaagatgagtgggaattggggtttggagtggctgttgaggtaggtgaaagtgggagaggaacagaagaagaaggggatgaggccatggccttctctgttccttgtctacaaaatccggttacctctgttgcttatctccagaatcgccggcattttcaaacgcaggccgttcgttttctcagcaaaatcaaaaacattttagtatttgtttttgtgttttgtttgtgtttttttttttttcttatccacaaataataattattattattatcattatcactacaaagcacacagaccactggttttcagagcttaacgaaatctatactcaaacaccagtgttctccaatgttgggtttccctctcttcctttcacgccattttccccaaacatctggattttggccgctgatctttcctccgatcaacctctgcttccggggatcatgtcgtcgccacggaaaagtatataaccttctgagaagaatatctttaaatttaataatataacatttgtatttaactatttaatctcaaattttgtccataaattttttaaattataaaactgttagtaaatttaaggtgtgctctaattaattatgattatttatatgtatatttttatatgtgtagcacattattttatattagtaaatttaatattattattttacaatttatttttatattatattattatattaatatacacatgtcacgtgtacaaaaattacacataagtgtagagatgtatatattaaataatgatgatgctcatctctttcattggtattctaaaatatatatatacattacaaaactgaaggaaccaatttacacctaaagaatcgtacagaagcaaatatctagaccaaaagaatagcacaacactgttttgtaaaataatgagtcaaaataagaatatatacatatattaaagaattagtcaaaggtaaagataattaaatatattattttaatactctattatgtcccctcaagttggagctccgtgaggtaagtccaatcttggtcaataagtcatgaaaccgactgcgggataacggtttggtaagtgcatccgctagttgatctgtcgaagagacgtgagtgacgcgtaagatgccgtcttgaacctgttcacgaatgaagtgaaaatcaagagccacatgtttcatgcgagaatggaagacggggttggagcagagatttgttgcacccacattatgacaatagatgaccggttgttgtgtggatgtaatgccaagctcactaaggagagatgttatccatcgtacctcagcagctgtcgaagcaacagatcggtactcagcttcagtcgaggagcgagcaactgtccgttgtttctttgaactccaggagatgggatttttcccgaggtagacaatataagcactagtggaggtgaaatcatctttgttactagcccagtcagcatcagagtaagcatgaagagtgagaggtgatttgcgatgaaacatgatgccatgatcaatggtgtcgcacagatatcgaagtaatcgcttgacagcattaaaatgtttggtagtcggacgatgcatgtattgtgacaatttgttgactacatatgcaacatcggggcgagtaagtgagagatactgaaggctaccaactacagctcggaattctgttggatcagtaagtgatgtcccagagtgaagagtaaggacgggagaagtggcaagtggagttgcaactggtcgagcatcaatcatcttagttcgagccaacaactcagcaatgtatcttcgttgtgaaagaagaagtccttgaggatgaggaacaacttcaacacccagaaagtaatgaagactaccgagatctttgagtgagaaacgttgagcaagagcggagatgaaggcttgtatggatgctgcattattacctgtgacaattatgtcgtcaacataaacaagtaacatgatagtgataccattgtcattaagaatgacacaaagaggtgtcagcgacagagtttgaaaaatgagatgcaagtaggaacttgcgaagttcattgtaccaagctctgggagcttgtttgagaccatatatcgcctttcgcaatttgcagacatagtgtgtattgtcagcatcaacaaaaccttgaggttgggtcatgaaaacatcttcagtgagtgtgccttggagaaaggcattgttgacatcgagttgacgaagttcccacccttgactaatcggaagagaaagaatgatacgaattgttgtcggcttgacaactgggctaaatgtctcatgatagtctactccaggtctttggtgaaagcctttggccactaagcgagccttgtacctatcaatggaaccatcaggtaaacgtttgattcgaaaaatccatttacaccccacaacattttgcacaccgctgggaggtaccagttcccaagtgccattacgaaccaatgcatcaaattcagcagacatagcatgtctccatctatgatctttgatggcctgagttacacatgtgggctcaatttctaaagtaagtttggctgagaggctgagcttggtgagtggtttatagatgttatttcgggaacgggtgactataggggagggtcgaaccaagggtggaagcgatggtatttctgatgcttggttaataacaggtgaagacgtttgaggagcatgttcaggcgttggagtgggtaataggggaggtagggcatttggaggagtagctaggtttggtaaaggaaatgagagggcgagaggcaattcttgttgatctaccattgtcgtttgtgtgttggagtcaactggaaaagagccgccggaactaccttcagatgatgtgtatgaagctgggagaataacatgctgaggtagccatctatcatatgtggagtcgtcaggacgatcaagatggggatcaattttggacatgggaaactcagtttctacaaatcgaacatgacgtgagatgtagaccttttgagtacttggatcaagacacacataagcactttgagtgagtgaataaccaagaaagacacaaggtgtggaacgaggggcaagtttgtagggagagtatggacgaagccaaggatagcacaaacaaccaaaagcacgaagcttagaataattaggtggtgactcaaagagtttgtgataaggagagatcatatggagaatgggtgttggaaggcgatttatgagataaacagcagtggagaacgcatatgaccagaatgtgagtggtagg

SEQ ID NO: 37032 - DNA, 4330 bp, Cannabis sativa
aacaccaaaaaaaaaaattatttgcctcattttacaatttctctaatagaagtaggaactttagtaatcttttcagctaaaatttctgagctacaggttttacatccacctggagatgtcaggcagataaatatataatactgatcattgagatcccactgagctgaggcaccaggggctgcctcccacacttcatcatatatctagcatagcgggatacaaattctctcgaggaaatggcagcaagaacaagcaggcttagttttaaatctcttattcctgaacattcgatgaagccattcacagaatctcatgagcctttccatagtatctgttgatgaatggagactgagacaccaaaaacaccaagttatgtatattcaagaaaagtgagctaaaccagtagtaataaaaaaacaaaaaagatattagtgagtagaagctccttcaacattttcttctccaatactaatctactcattcacattcatagccaccaaaaacacaattcaaactgctattacataaaaagtggagtagcgtcaaaataagttggtatgcaaaaagagcaaacagtaagttctctaccttaacatttgatatatcaggagtatcgggtgttgacacagggtagaacttgtagaacttcatactctcaaatgctgttttggtttcttcactcatttcttcaagggcctttttccgggcttcccttgcctattaaaaaaactataattagtttttaatgcaagacaatgactacagaatcaacggccaataaaaaacggacgcatctgattcctctctaccaagtagtacctgtcgattggccttcttagcttcccgaactttctccctgacaaactcctgagaaaagaaaaaggcactaagttcaaaaggaatgttgcaaagaaaaaggaggtgaatcaaatgcatctactataattgttaccttgaaatcatccttctggtcttcagttaattcctcctctttaatcatattatctgtaaattcctgcagattaacacttcagattaattcttttaggaagggtaaattatgtcaaagaaaaactggtgacagcaatattttgcatcatttcatttaaagggaacttcttgctaaaggggcaggataaatacataacttcacaatttattaacaggaaaacaagtcactagtacagaaacgacacataacgagaactagaacccctcaccctccccccacacaacaacctgagcgagcctcaactggcatcactaatacacaaatgaaagacaaatcccttctaataataatcatcaaacaaaatatggggaatgaagaactatgatcagcacaacttggtccaatatatatagcaaaaatcttttaacttccacagttgataagataaaggaaactcataagccaagatctgagttgtcacctctagttcgtccaattcccaatcgaactcacaaaaaacctacattgacccaaaaaaaaaaatatgtcaattttgaacaatcaatcaaataaaaacgcacatatttaaaaagccatgtttttttcctttatggaatttgaaagccatgttaaaggtgaatatttgtgcaagtgcacaataatttcacagctactagactttggttgacaattctccttgctatgtcatagaaagacttttagaaagcaaccccttggtacaatatagtcgcaaacaagatagatcctatcctatccaattcttgcaagaatctctgataacacttcagcactcaaatccttcctcacaatttttttcccagccaaagagttttgcgtaactaatgtttcaaatcactggatagtgaaattcaaatatatattcatctggatagtgactacttctaagttccaaagctaaatttgctacttatacctttatcttaatggaggggttacttataaaagttattccattcttcatgtctctatatccaaaaactactctaaacataccggctttgattctgatgaatataatatttgaacttcagtgctttgttcaagctcatcttcctttaaaggctggtagaaatctgtcaacagaatacaacacgcaacaaccatttgtaagattacgattaccctcattcatttgtaaattgattttgaaaggaaaacacaaagtttgagaacatacaaggcaagcaatattcaaatttcttcagacggtctatcttcaagtgtttcaaagcagccctgcaataaccatttgtgcacataaaaaaagtgagataacaagttaatagagctgcctgacatagactcctaaatcagaagtgacgttgactatgcatactggggtatttaagttaaagttaaacaaaagttacatcacacgtgcagacatgatgtgaaaagaggaataaaacaattaactgaacatttcaacacaagttgatgaataagcacagacaacaaattaatcacattttgatcacacgtgttgggacttgagaatacaatcacccctgacaaagctaatctaatacacttctcacctatgatatactaaggtattgatgcataagcataaaacatgagcaacgtgagaagccagatcatttcaccatgttgagggatcaaagggggccaatactaaacaccaaagctaacactataataataacaatgcactacgcaggacaggactaaacaactattttaattgctagacaatcaacaaatcagacattacttctgggctggaagctcaacagcattctcactggagataaaaacaattcacagcccagcaaaataacctctcttttggcaaaaattcacatgaatggtaatgagtttcaaggtaagtaaataggataagaaatgtaatcatatcacattaaaccaaaagtctaatgggaaacaatatcataatgcagcataagttaaaatgacaatgacaataacctcataatcatcctagtttacaatacaaaactggtagtaaatccaaaatctagatctcccactagtaattcaacaaaaaaatcaatgacacagagtattaaacatattgcagtatatgcaacaaatgtggtagcaaaagagagaataacagaacagcaccttctctgagtgcagctcaatatgaaaatttgagatttaagtctatcaacttgactgtctctgtagaaaattaaagagcacaaatcaggaatccacaggaaattctaatataattcaaaaagaaagctcaaacatttcagtaagaaagcactagtattaatgtacctcttctcaagaggaatatatggaacccagtccattttcatttgtttcatgggaatgatttcttcagactctctctgaactgagttaatcccaattttatcagaaggcgggaaaggtgatacaacctatagagccacaagaaataaaaaataaacaaaaacgggtgatagaaatgaaataaatcaagcaagcttctcaacaaatagacaatatcatttgcttgaaataaaataataataacaataataacaacaacaaaataagaagagacagaaacaaactaccaagtacaaaagtaaaagaaggacaaacaacatttagagcatctgcaaggtaacaccaaatatgcagatgcagtccaatctctcctccaatgtagcactatcttaacattaaatttgatgtatatatcgcagtacacggcatatattgccatgtactatagagaacggcaaaaaaccttttacactactttatattattatattgtacataatattaaatatattttttatatgtatatattattcatatttattaaaaaaataatataataataatgaatattttttaagtgttgcggccggagtggaaagagtttttcacactaaatttggtattagtgtaacaccaaatttagaccaaatttagcgtatagattggaaatgctcttagcaagactttaagacaaacttatacacaagctttaaataacttacagccaccacaacaggtatgcagataactttattctcccccttcacagagaccaattgagctgcaggcaacatcaactaagtaaagcacaatccaaaagcagtataaataataaatttcagagagaagtagaaagtaaatattaaatggcatgcaacatatgacttgatttagaaaactgaataacacgttgggatacttcattccttcttaattggcaattaaaggcaagtgcctgtctattgggggggaaatcaagtttgaaaaagctacttacgctcagtgcaaccaaagagataagctttcttcccatgtaatgttccaccctcttcaaacgctttctga

SEQ ID NO: 37033 - DNA, 4128 bp, Cannabis sativa
ggcaaaaatcctaattagccttctcctttttattattcaaaaatataattttttttaattaaaaaaataaaaaacaaagaaatgactaaaagcctccataatttatgtaaaaaaattacttgaggccatagtaaaaattaaatttttacaaaaccattaattttagcaataataaatatgtttttttttttttgaatgaatatgtttttaaccttatctaaaaatccgaaattgattggattcattggatggtctagtaaattctcatattaattttggttgacgtgacgtgagtgagcacaaaataaaactaaaactaatgatactcgaggaggttaggtttttgccattaatggagattgaaattgatttgaaaaatatatatatcacattccattccaccaaagaagcaacattgtctaatttttatttatttatttttaattattgtgtaataaatacttaaatagttagtaggtgtgcaagaagaagaagaccagttacacaacgacaaagaaactccaatggtggcccatttggaaattcaactgtcaagttcacatgaagctcacaacccaagcacagtaaatatatatatattttatatgaagaaattcctttaagaaaggaacccaagattttgggctccctttttctctagtcccaaaacgaaagaggaggagaggactattttccttcttggtaaggagtcagcgtcatcaaacccagatccaatttcctcagaagtatactacccaacttctgcttaaccctttttccctttctccaactctctgaaaccaagctttttcttccatgtctggaaattcggcaccgcttttacttcgactgttttcaggtttgattcttcaacttcttcttcgcttatggagcccgcatgtattagattaggatttagaattaggactttaggagttttttctttccaatttcttaatggtctatatttttattttttcattgcgttatggtcgatgttgccaactctgaattattcatttttattttattttttgtactatatttggaaaaggatttagtgatggtggagttgttggagatcgaatcttaattgtaattctactttaatgactaactgttttatatttttccaatcaaaatttggttaagttttgattggaatcagatatgggactaaatttttgctcaattatgcactttgagttggattctgatttatgcaagttagtgaaataagttaatttagcaggattgggaagaatcatcttttttttcctaaattttttacatttttgattgttaatttggttcccataagcgttcatgaaattaatattcttcaaaatataggttagcgtggttgtgacctatatttggtcaagtttcattggatctccataggctgcatttttttagttgcagcattttgttggaggtaaaaataaaaggaagagaaaatgaggatgaagaacaaatacaggaaaccaaccactttaccttgcaatgcagggagcagatgttcaatgtctgctgttgtctggagcttggttggttgtgttcttatgcttcacctctactcgcttgttcgccataaagatgtggttactggggagattcaatcacatacagttcagaacccgcaattgcgtgaacttcagaaagttgatgaggaaaaaatccaaatgcctccacctaggaagagatctccgcgtgctgcaaaaagaaagccaaaacgaccaacaactataatcgaagaatttctagatgagaattcccaactaagaggcacattctttcctggtcagaaaactgctatagatccgaggaaggatgggaatgatagcttttattattcaccagctaaaatttggttggatactgatggaaatcctattcaagcccatggaggtgggattctatatgatgagaagacaatgacttactactggtatggtgaatacaaagatgggccaacctatcatgcacacaaaaaagcagctgctcgggtaagttgcatttaaagcattgtctggtgctcaaatttaaatagattttagagtatttctttttgcttaaagagatatgcaagtgtatttattggtctagagtttgagcttcaactaagaacacatattttcttcaaagtatcgcatgaagatttacacctcatagttcatcattagagaaaaaactatgtttgacaaattagagggagaataggagggatgtatcttcttaacattgagcttcataaggcaacaaaagttgtgtaatatgcatcacgcacaagggtcaccaaattgattgtactaatagttctggttttgtctgtgtataatggatttgagatttatttggtagataggatcagtgcaaagaacagagagtgtagtttactaataggaaggtttgcacagaatatataatttcagctctctttctccaatcatttctttagtttgccatgttgaagcgagatgaggagtaaaagtatcttgagctaggaaaactatgtacctatctctttctgcttatcattagatcatgggagtgttacaactttaaattgaactaagattaatgattagacactgaagcttgcatactggtcatatcttttattttaatgttaagggtcagaatcatatcctagtcttgagattatatttgtgttgctgattacactttttggtctcttatactgagcttcgtctatctgttatctgtcctccattttctgcctctgttttcttttccttttcagttatccatgttatattttgccttgtgtcaacctatagcattagtttttcggttgtattacttgattagaattcacagttgtttaacacggtacacttattttatttaggttgacataattggagtaggttgttattcttcaaaagatttgtggaaatggaaaaatgaaggtattgtgctggcagcagaagagacggacgaaactcacgatctccacaaatccaatgttcttgagcggccaaaagtggtttacaatgagaatacaggcaaatatgttatgtggatgcatattgatgatgccaactacactaaagcatctgttggtgttgctgttagcgattaccctactggtccattcgactatctatacagcaaacaacctcatggctttgaaagccgagacatgacaattttcaaagatgatgatggggtagcatatttaatatactcatctgaggacaatagtgagcttcatattggaccgctaacaaaagattatctcaatgtgactcccatagtgcaacggattcttgtggcacaacatagggaagccccagcattgttcaagcaccagggaacttattacatgataacatcaggctgcactggatgggctccaaatgaagcacatgcgcatgctgcagagtcaatcatggggccatgggagactatgggaaacccatgtattggagggagcaaaatatttcgactgaccacattcttttctcagagtacatttgtagttcctctgcctggattgccaggtacatttattttcatggcagacagatggaacccagctgatctgaaggactcaaggtacgtatggttgcctttgatcgttggagggccagtggatcggcctttcgactacaattttggtttcccattatggtcaagagtgtcaatattctggcacagaaaatggagacttcctcagggatggcgtgtcatgaaatgaatgtagggtctcttgctataatctgtgtataataatgaaagcgttttaccattttttttttctcactggctcaatagcttttgccaatgatttttctttgtggtagttttgttcataatagctttgaggaagattactagttgcctagagaaaaggtttattgtttggagattttaccaataatcacctccacttttaacatcatatatcatcattcgtcacttaaatttgtcatggtgctcttttcatacttcattcataggcctcgtggccacaaaactcgagattaaaatcggatggtctagtttttgggcatcatatcaaatgtcctcattgttggccaaagcttgggctttgtgtggaaagaaaaccaaacagggcaggaaaaggcctagaaaagt

SEQ ID NO: 37034 - DNA, 10451 bp, Cannabis sativa
ttcaaggagctggctccttatgacccagattggtactacgtcagagctggtatgtggttgattttatgtcctttgctatataattttttgcagcccctttacctctctgatatttgcgtgtgtttttcttcttttttgtgcagcatcggtagctcggaagatttaccttagagggggtcttggagtcggagctttccgtcggatctatggcggtagcaaacgtaatggaagccgccctccacacttttgccggagcagtggtgctattctgagacacattctacatcagctccaaaacatgaacatcgttgatgttgaccctaagggaggaaggaagatcacttccaatggtcgacgggatcttgaccaggttgctgggaggatcgtggttgtatctccatgaaccagatttttcaaacattcggaatactaggattttctgagttttctttagtttttgagagacattattttggatgattttggttcaattttcctggatattgtatgagattaaacatgagttgctagttggtatctttgtttattttttttgagtaatctacaacacaagttattttctcgattaactgaatttattgttgaatgttgctttttttccttttgttctcaagtctcaacccaatgttttatccgttgccttaagtctccttggcatgtggtattaaaaagtccaagacagtaatagccgtttctatttatattcaataacaaggattataaacttatataaacataaatatatatgatcaactcatagcaattcctttgtctgtgggtttgggaatgatagaagatcaatcttttaaaggagtgattcgctattcataaaaacactggataatttagtttgaaaggaacaaaatcactcatgatagacaagcaagatcaacctcatgagtgatttgattggttttctatctttaaacaattttctaagacttctaatatgatttcaatataatatctagttattcattgtgtttctacttctttaaaaatggttttgtatcctgttctatttttatatgttggatggggggtttttctttgaaaaaagaaaattattttctctttatttttttaagaggaaaatgatacaaaaggtaacaacgttacacaaataatggaggattttttttccatctataaaattttattgtctattctaagggcataaagttatccaagaaactagccaataaaaccttaatatcaaaaagaaaacttcaaaagtatgagttgtgacttccgtcccactaatagattacatattaaataaagaaaaaaattaattaatattattactcgtaattttttgatttaaagattagaatttatatgttcttattctattgctgaaggtggatacaatatatctaatgtattttaattagaccatattaatcttacaaattaaaactagccatattgacgttgcaacatgaaaactagctatattgatcttacaaaactaaaattagttgtattgactttataaagccaaaactaatcatgatgaccttacaaaatcaaaaccaatcatattagtcttataaaatcaaaactaatcataatcttacaaaattaaaaactagacatattgacagtacaaaacaaaatcaaccaatattgatcacacaaaacaaaactagtcacattaggcttacaataattcaaacaagttacttacaaaatagtcatgaccttacaaaattaaaattagttacattggtcatacaaaacgaaattaaagacaaagactactggccatgaaaggaatggtgattgtcgtaaagtaatgtctccaactaaggcatttgaaaataatgtcgcatgtgaatgtttattgtcgttggtattattcaattttaattctccacatctctaccagaaaaacaattcttcacataaggttcgcaaatacttttgtttcacacgcttattagatattctttttgataaaggaaactttaatatctaaagatgatgtcatcttattatctttcttcctaagttgtcttttttattttcaaagaacttctcttttttatgctctttctttaccatttgttgtaactgagaaccatggctttggaattgttggttgcacctgttgtctctgcttctgttgatcttttggtgaaaaagattgcttcttctgatttggtggggagctttttaaggggaaagactgactctggtttcgataagcttcttgacaaactacagactactttcctctctcttgctgaggtgctcagtgatgcagagcagaaacagttcagaaactctagagttgagaagtggcttgacaagcttcaagatgttgtggaagatgcagaggatctcgacgaaattgagtatgatgccctcaaactcaaggttgaaactgagtcagaatttgatgataaattcaaggtaagtaagctatcctccattttcaattccattgataggaaaagaaaaacagatatggaaaagattttggaaagattgaatacttttaaagaagaaagatacatccttgatctaagaacaaatgtcgagaagatccaatcacagagaacaccttcaatgtcttccatagatgatgctgagttttttggaagagatgaagaaaagaagattttgaaagaggtgttggtggaaaatgaggtgactaatgaaaaattatgtgtgattccaattgtgggactgggtgggggcaaaactactcttgctcaagctgtatataatgatgatgaagttgaaaagtattttcaactcaaggcgtgggtttgtgtctcagatgagtttgatgtttgtaaagtaatgaaaactgttcttgaagcagtgactaaaagttcttgtaatgttgagggtttgagtgtgcttgaagagaagatacaacaagtgttagacaaaaagaagttcttgatagttttggatgatgtgtggaatgaggagcatgatttttggaatacattgaggatgctttttagagttggggcacaaggtagcaagataatcgttactacaagaagtgaaaaggttgcatcaattgtgggaactgttagatttcaacatcttgatgtgttaaaagaagaagcttgttttcaattgtttgtcaagattgtatctgggaatgaaaatttcactacaacagattcaaacttgggaagaattggcaaagaagttgttaaaaaatgcaaaggcttaccgttggcagtgaaggcagttgcaagtctcttgcgctttacacatgttaaggaatggaaaagaatagcaaagagtgatattttggatttatcaattggagagaaaaatattcttccggctttaagattaagttatcattatttgccatcactcttaaagcgatgctttatttactgttctatgtttcctaaagaccaccaattttatagggaagagttggttttgttatggatggtagatagtttattggagcattcgagtggaaataggagaaataggactgtgaaagaagtaggaaatgagtattttgatgaattggtgtctcgatcattttttcaacctattggaggtaggtccaaaagatatggaactggtgtatttgaaactgtcaactgtttcgttatgcatgatcttatggttgatttggctaattttgtatctaagaaaaaaattctttacttagagaaagacaagatgtatgatattggaatagtgaaacaactgcgacatgttggatttgatatggtgaactgccaaaatttacatgagatatacaaattagtttctgatgcaacttgtttgcgtacaattatgcctgttactagaaatttatttgctacagaaagattacaggaagatgtgtcgaaagatatcagaaagttaaagcgtttgagatttttatctttggctggttacatgaatgttaatgaattgggtgttaagtcaataggtgaattaagacatcttcgtcatttagatttctcttacacttcaatcaaagaactacctgaatcggtgtgtttgttgtacaatttgcagtcacttcaattatttggctgtaagctactcaccaagtttcctaaaaagtttcatcatcatctcattaatttgagatatctctacatgagttgtgttaaaatttgtaccttgccaccacttggtcagttaccggctctattagctctttcgatcgaaagatgtgatgcagtagagatggtgggggttgagttttatgggactagttcttcccaatcatttccattgttggaatccttgacattcagatttatggaaaatttgaaagaatggtcgacgccaaaagcaaatgtggaagcatttccaaaactcaaagaactatacatagagagttgtcaaagattgactggagacttgcctggtctcctaccatccttaacaaatcttgaaatttgtgattgtccagagcttgcttctcctctcccaatgatgcctttagtcacaagaatacgtatagaccggtgtgagaagattgcaagattcaaatcacttagtagtcttcaaagttatgatgatttagaagacctctatcttggggtttgctcattcaaattgcttcctttacattccttttcaaatattaggcatgttgaggtttatgattgtgaaaatctagagtctttctcgctaacaaatactctaaattctctatcttttctctacattcgatattgtcctaatttcacattatttccagatagcaaccttcattgcccaattcttactcaactttggctcgtttcttgtgagaaattgaaatttttgcctgaaaaactgcctagtctcctcccttcgttacaagaactggccatctatggttgtccagagttagagtcgcttcctaaatgtgggttgcctttcagtttgcgtatgctcaccattagcaactgcaacaagctgattgcatctcgaaagaattggaagttacaaacacttcctaatctgacattctttcgaattgaagattaccaatgtgaggatatggagtccttactagaacaagggatgcttccgcctagcattacctcccttgaaattgttaaggttgcttgtcttaaaagcttagaccacaaggggtttcaagaaatcgaatccttgaaagaactatacatctctgagtgccccaagttggagtcacttccagtaaaagggttgccagccgcttttgaaggtttacttccaccttctttcgaaaccttcttcatgaattattgtccgttgctggaagaaaagtatgagtgggagtataatagcgataatcataaaggttggatgatgattcgttgcatcactcggcctcaagatgtcagcagtcaacagcccttaattaagccattcttaagattgattgggcccaaagctgtagtgttgcacatcctgcttattctcttatgtatgtatctatatgcgtattacaatttgtaagagaaatgatttctaagactgaagtggattgccctggttccaaactgaaccttataatccattccataggaccatctcaatctgttgcctactgtgagtttctctcttacatgttctttgttgtctttgtcatgatctttctcctttgatgattgttgtgtgctattctatttaggtatttttgctgatggcagaggaaaagttggacccaaatgttgtccccatctgaacaaaatgagaccttagatgctgcaaataccagtgatgacaggttggttatcttttgtttttgttgttgttgttgtgcattatggtctaatcaatgtcatggtgttaaatgcatctttatgattgtatatgtggattgccatttaagactttggttaatcttggcagttaaaagaatttgaaacttgaatggagatagcattgagaggtggaggaatacaatagaatcctcaactttgatccaaatagtctggtagtcttcgatgtgtaccaaggcttggaattaattggaggaagtttgcatttgcgacgtggctcgtgaggctgctaagcctaagactaccatagaaaaaatttggtgtatttgcatgcagtgcaggtgcaggtggaggttgctataatgttctgtcttttttattaaaaatgatacaagattttggtaacagagaatatcattttctcatctgatacaactaaagcacacatatattatatatttagtttgtaaacttcaaaaccaatagtggtttggattgaagttagatttaaatctctttcttctactctgtaaacatattttcatttatttcttaaaaaccatgcttaacacaactatgatcttgatgtttaattcacattaatacatggtgttctttgtttgggatttaaaaaatgacgcaataccccatatattagtttgatcgactgcaatgaatatattactcgaaattactatatgggctcaatctagatgatttggagtttggcaactaaatttatcataaataatttaacaaaaaaaatgtaagattactcacaacaaaattataaactctcaaaattttcatttaatatagtaattaccccataattaaaaatttattgaaaattctttttcactttattatcttgtaaaacagtatcaatgaatatattattgtatagctttaaaattaatttttttattaatggaaaaaattgcattgtgaaggattggaatttacataaatattaaattaagagaaaatcaataattatatctaaaaaatttaaatacagtgaaaatattataagacagacaaaatcaattatagaaattcaaactaattaattaaaatcttaaataaatttataaagtaatctgagagagagattcagtagttacagagaccacatttaatatcttccattaatgattctgaatttgttggtggaaaggttgaaaatatgaatttatgatgatctcatataaagtgacaaaactataaataatattaaaattatctaaaataaaaaacattaaaagtttaaattaaatattatttgtcaaaaacaagaaaaacaaaatatgaaaccctaaagaacactcttcttcttcttcttcttctaactttgttgtttttgcttttgtttgtgtttgttttaatgtagttgtaccatttctgcttggagattaactataaaattatgtttccatagtaatgatgatgagttagttgatgaaattgtgacatttatattagttattaaccatttgtgtttttattagttattaccacttgtcatataatcattttaaataatgtagttctactacctcaagagtattattttactaaatccagtttggagatttaactataaaataaatgtatctaatctaggaatgatgctgaatccagtttggccctctcgtctctatttgggttgaattttttgcttaagaaaatctgttgatgtcagtaggcttcttcacaaactagagaatacattcatctctcttaatcagctgcatgcttatagatgtgctgaagcagattagaaaagctagataagacttggttggcaatgacccttcctctagaaaggagtaatttgtacaagactagatagataaacattgttattgtttcaactttgctaagcaaagcacatttcattaatcatccaatgtcactccccaaagaaaggaaattaataatcgagtagtgttgattcattgacaagctttattatatgtaacaagagtttgtttatattgcaacttaattaggtgttaaatttttaatattgtagaacgatcgatgtatgtatgtagttagtaaaaatctgttatatttttttctcgccttgacaacaaaaggttgttcaactaaattaaactgaatgtgggttgtacaacattttttcatgacattattaattgacaactttttcttataattaattttgttgattaacttttgcagggcctattaataacgatcagatgaatcagatgatgaccttacaatggtggtagtcacatactatagtagcataagtgcagccaagatgtgtgtcacgtgattggaagtaaaagtggaagcatcactaattagtattggagcgtattgtcctacatggattaaatgtgaaagtattgagccatatatataagaacatgagctactccactcattgccaattggttttgagatggaacctcataattctcaacatggtatcaaaccttactcctttacatggtttaattgctttgtttgacaactgtctctgatgagatttagttaattaaaatattattatgtaagtaaactataaattaagaaaaatgatattatttaaaattttaaagaatacattttttcacctgttaatgcacaagagctaccaaagtaagaacaatttgtaagctaaatactagtctctaccaaaaacttgtgagaaactataatataataatataatgataaatactagtctctacagggattgcatgaacgaggaggcggccgccttaggctctccaccgctcaggcccctatttcaaaaaaaataaataaaatataattagtaataaaataaataatagtacttttaatactatatatgtgttgtatcttagtaataattaaattagcttaacaactaagagatttagagttaaaattccaacaactttacttttttattaggctctaattttcatttttacctaaggttcaaattagcataggccggccctgtatcgaagttaaatatccaaatccaataacattagctttttagaattaacattaaataaacagtttaaaacacttggataaacaaaacttcatatgcttcatattctccaaaattacaaatgacaatttagggtttatcactaaaatgacaagcccttctgacgccgcgacaagcccaagcacaaataaattagcttgaaaacacaacacaatacaacattcaataatttgataataataacaataataaatatttattaattagttaaatgatagtaatattttaattataattattataattatttttatatgattatatatgatgaaaaaagatataaaaataattaaaaatataaaatatatacatattttagcatttagttcatcaattataataaaaatacaaaaatatagagcatggatttgaactcatataaaaaaaaaaacaagttggtctatttaagaaaaacggatcggccggacttgcggaccgtatcggtttaccctataaaattgttgcacgacacgacaagacacatattattttatggtatggcacgacacgactcatattttttattgatttaacatgacacgacccatattttaaaaaacacgaataatatgagcctaactagcacgatacacacgtatttacagctatgttaaaaacagtgatttaaagtaaaagttgattttacttgagtataaatagagctacttacgtttttactgtacactattagagcatttaactttgttctttagttgggttaatagtgacttgagtataaatagagctacttacgtttttactttacactttttaaagcattttgggttaaaagtgacctgagtataaatagagttacttacgtttttactgtatactatttagagcatttaactttgttctttagttgggttaatagtgacctgagtataaatagagctacttacgtttttactttacactttttagagcattttgggttaaaagtgaatacactatttagagtatttaactttgttctttagttgggttaatagtgacatgagtataaatagagctacttacgttgtttactttacatttttcagagcattttgggttaaaagtgacctgagtataaatagaactacttacgtttttactgtacactatttagagcatttaactttgttctttagttaggttaatagtgacctgagtataaatagagctacttgcgtttttactttacactttttagagcattttgggttaaaagtgaccactgttttttgcttatactatgtgatcttcctctttctctataagaatgtcacgttttcgaaaattactaaaattagtttagttgtaacgctcaagctcactctcactattccaatcatcatgatttttgaaccaccttaaatctcaatctcattctcagtggcaaaggtttgattttctttcttctcgatttttcactcttttataccccaattattgtattgattctttagttattggggcatgtaagttatttctgaaattctagaaatcaaaaccctaaattttgtttctgaaattttcgcttccatattatttctgggtgaaaataaaaattaaatcttgtgcttttttaactgtttaagaataatgtctattacctgtttgatgaagtgccattaaatcttgtctttttttcactattttatcatggttgctgtaagtatctactt

SEQ ID NO: 37035 - DNA, 4393 bp, Cannabis sativa
aattagctaaacaagtagtttaataagcaaaaacaagtggaacaggggcaagtgtcaacaactctgcaattccgaattcaccccaaatttccctaaattattttaattatttaatatcatcgtaattggaatcaaagggtatttcctttaaacaaaaggattgtaattaaaagattatttttataatcttgaatgggtcgaacttaaattaataaaatcttatgctataaatttagcataaatgaaattgtgttttgtatttatttttaatattctaaatgtaaaatttttgcttaatagtgcttatccattgcctttattaagagaaaattatatgtaacacaaatatattatgacaaagtacacaagcaaattgttcttgaagtaaatcagtataacctaccagtttgagttgtagaaagccttgtaaaaagacccctagggactgagaaattcttattatctttctctatcgatattaataataactaaagttgagaattaggcacactgtttttaacctttatcaaatactgcaaaacttattgctctcacttataaccttatagacaggcttcaagacagagaactgtaccagcaatgaataaaggaatattattcatgtttcagactttgatagccattgaaagtccaatattaggaatcctcctttggtccataaaatctatttttccacctatacttagaaacaacttgtcccacaacccttgctgaatcatagcagcaacctttccatgtgtgtctacctttgcttttaacactgtcaagggcatcaaagcatgctgagccccaacagaaaaagatgtgtcactcgttgaaaaactatgcttcagctctgctgcaatggctgtcttcgtgagcgggttcactgtgtagtaacaagaagctttcaaagtgtcaagcttgtccctgcataaatcagggcaatactttagcttcaatacgctgagttgcatcgattaagtctgtgaacagctataaaaagcacaaatgcaaagcatttcaatagttttgtttgtctaagttctatcaggattgctcacaaggttaaggaactaataagcaagtcattggtgaagctcaaaccagtgtcgaatttgtcaaattctcttgttcccaagtcaaaagaaaagccagtcccaaaggagaatagactggtgcccactacacctgagaaattcagtattgggctaaatacaccaatgggttctgttttcagtccaatgccaccagttaccccaaagtagtcttgcatgtattgcagctcaacctgttccaaaaatcactttttatgttcttgattgaattcaagtaaagtaactatgtcactaattacatgatttgcatccaaagaaagatcacatttttagtaccttgccagaatggggtattacaagtccaacaagggcacttagtccagggataatatcttgaactgtaacagtcacagaagccaaatcatagtcaaacaaccaaatttgatttcaacaaacacatgagcaaaaacaagtatacatgtagtggtaaatataactatgcgattacaacattgtcaaatgtgctcaaactactattgagagacattgcacattcatgttcacattcatggtaatgaaaaaagaatattggaaagtaaacctgagctacatcacgcacaaacttaagggaaagattacttttacaagagatatcaaagctccaatcgcagccttggtagtttgtttcattagttttcggttggtgagaaaaatccttgtagagaacatctaaataaaaagtaaaacatgtcttaagccagtaatcaacataaggagaagaaaccttactaaatgaagaggattaaatggttacctctagctttcttgccaatgtcaaagtataaaccggggcagtagctcattttgtttaaaactaatcaactaatctgttatttttttatcagtcttgattggtattaagtaaactaaaaaatatttataagacaatggtatgaaaaaaccaaagaggaagtttccttgtgtacaacaaagggagcatagtagaaaaatgaaacttccaacaccctttttgaggttttagttttggtgatgcaaacatataatagtccagccactcctgtcaacagtttatatgtattgcttcacaaaacagcatattcctcaacaaagaaagcatcaatggagtttgtactaaaagaatttttatagagctttgattaagtcataatcattgagtaaaacttcattaatgtggtattaaataatagtcaattctcttaatggtacggtattgaatctggaatctacaagagatgtaatgtaatgtaactactattgggtattactatagatgactttgtttaacaaactagttacaaagtcataatgttaacacaatttagctagacacaagggctttggaccctttggtcacttatttgtataatcaactgaatattttctcaagaggggtcaaaagtcagaccaagtttcctgaagttaacttgttgttgatggggctacttgatcagcttctttgatcagtttcaaaatctcttccttcttggccaccaaggcctggatcttggtttcgatcttttcgagcttttgtttgagtttggcgccatccttgttgtcttcaggattctttttcttcttctccttcttatctttcttcttcttgtcttctccttcctcatgtttctctttcttctcttctactttctcatgtttctctttcttctcttctagtactttctcatgtttctcttctttttctatatgttctttctcaacttcaactttctcttcatgtactttttcagcagagtctcccatttttgaagctttgtaactgtttttgagttatggctatttagattttctctgcaaaaaagaaagaacaaaaaaggttaagtaatttagaagaaatagctacaagaacatgtactaacaaataaggatacaaatactagttttgtctaggatttttgtacatattaattttgtcatgaacagcaatacaatgtttattttttgtttttttgtttattttttctttttcagcttcatttttaacaattattacattcaactttcgtttttataggagtaaatttctcattcactaggtgccaattttcttttattcctcgaagtaatatttttcaatctccaataatttatcaccagaaaatgaacacaagggttaaattaaatatacaaatttcagagtagtaatactaataaatctaaaataaaaaaaaaatatgaataggcgtaaatgtaaaaaaaaattggaagtaaaattaatagtttatcaagttaaaaagttaatattaataataacagaaataaaagaaagaatagaagaaaagagaagagaagagaaataatacctggaatgttgtagtgggaatgaaatgattcgatgaggaagagtagagaaccctttcttataatcactaattgactattatcactattggatatcatacaattaccaaccgaaaaacatgtttatcctcatcttattctctacaaactcaactacttcatatctacctttcaatttctttccaatttaaaaaattaattagaagccacataaattaatttgaaaaaaaaaaaacatttgaacaaagtaacttatacttattttaataatttaattttcttttttacgcatatatggagaaattcttaacgttatatttatttatttatttatttattgaaattctcgtgtgaaaatcagtcaataaaaagttcgaaaatctgcggtgttgatcatatgctcctaattctatttaaactttatatttaaatatgtttaagtacacatttaagatgggtgccttcactcctaaaacattttttttagcaaaatttatggtttttttttactgtatttatgctttaataataattgaccatcaacttcattaaaatatttactttttgttttgcatagaaatggtttgaaatgggtaggctttcttttttttttcttttttttttttttctagaacttcaaattggtaggttaatgttctggattggctagttttgagtgtgtgtgtttttcgaaacataagtgcatgtttggcatcataattaaaaaattgtttttttttatttttaaaaatagaaaattatttttttttttttaaaacaatttagtttgtttgacctttatttttttttaaaaaaaaattcagaaaacaaagttacaaaaaataagaatttaaaaaaaaaataaaatgttataaactgttttaaaaaccaattcacttttggtcaatattctttttaaaaaacactaaccaaacatgacttgtgttttaaacacttcaaaaattattttttgttct

SEQ ID NO: 37036 - DNA, 5341 bp, Cannabis sativa
cccctgatctcgacccgggacccaatcctcggctcacggcctcaggcccagaccctgacccccaacctctgcctcggactcaaacccgagctcgaaccctggaccctagccctaacgcaaccccaaccccagcccttggaccccgaacctggaaccagaccccgccccgagcctaatcaacaaccctagacttggcccggacccccgatcctaaatcggtacccgaaccttgatccttaacccacgaccccggaccccaaccctgaacactgacctcagccccttactcaaaccccgaccctgaccccaaccccgacctaggaccccagtcctaaccccaacctttggaccctcaaccccagccccaaccctagaccgagcactctagcttcgaactatttctaaatattataatacaagctaatatgaatcatttcttatatattaaataatacaattgatattgcattaaaatttatgatcgtaattaacataatacaaaattttatccaaacatagtttcttatttgatacaatatgatccctatacgacctactaaacgagctcttatattcatcaaatagatatcaaaacgacacttctaaatggagatcaagatgggtaggtctacataaaacaagtagaaggtttgttctaaggaacaatgaacataaatagtgcaatcttattaaatcattagttttaaacttggtaatgggttgtttcttggggatctgaaaaatgaaaatgcatttcatgctcaatcatggaagcatggaagctaagtttaaggctttagtgtttactcacaaagaagttgactagttaagggatctaggggtctcgtgttgtatgtctctatctccatgaacacaatcaacagtcttgatatcttgtgataataaagctacacttcctaaagattataacaacctatataatgatatttctagatatactagtctaagacatgattatgtgatacaactgatttaacatagaactgtttgaatctttcgagggatatctagtgagaatttagtagtgcccttcaccaaaccttccaaaaaaaatggttaatttagaggaataggattgaaacccctagagtaggtgtgttcattggaccacatccaatgttttataacctatccaaatctaatacaactaaacgatggatttttgttaacctatccaaatccaatcctattatacattaaatgatgaatttgatcaattgagtagaacaagcatccagaaaataactaatatgttgcaagaaatttttcacttaaacgaacttacaattggtgccatttctaataaaaaatttagagtttctcccgagatagttcatgaatgagcataaggtcaaaagaatgctaagcaagacaaatgtgaatattggctaatcaagtggaggcatatgaggtgttaccagctttgtcacaaagaataattaattcaatggtatatgcgaactagggtttgatagggttgtaataatttcactaaggtaaagttcaaataggaaagatatttcggtttatgcatcaatattgtttgagttggagagtgaagttcatatttaacatagtgaatgaatattgtcttacataagtaggtacaaaagtgagattatatactgagaatcaaaaattaacaaacttgggtctaaagtgatagcatgaggtatctaagaatatccaaataggtttgagaattttggaacagtctggccctagtgatacatcgctcaatttgggtgacatgtcacaagggttttcgaaatagaatacatgtcatctggggttgtaacatgttacctagtaggtggtgacaagtcacttcctagtgatgtatatgtgtttaaacacaatgaagaattacctatgacatttacaacaacgatataaatgagttccatgggttcaagggccttgatcacacttttgaattctaactctctcaagccctccaagatcaatcattctctcttctctaagaattcataatgatcacatcccaattctcatttccttgcggtgaacctcaaacaatctcaatagagggtttaaataaagaatttggaaagagtttctatcttgatcaagcctttccaatctctttttgtgtttgttcattattttgttgttttgattatgttattgtattctttatttcacattgttgattgaagttctctccatccccaccactcacaaatgggcaaggaatgccataaaggtagaagatgaataatgtcgtgatgagtacacactgaaacagcttaacatgatgtacaatatacaaaatgtaagaatagaaaaactcatattggggcttttaccaacttcctcataatcaaagcaagtaccactagattagaatttggcatttttaggtctctacattgttgattagttagtcctacaaacaacactatcatgttgtcaataacctctctagtggtgaactatacactgctcaaaattcctacctaactgccactagactttgtcaagcatttgaagactactcaatcaacaatgtatacatttgtggataaggtttatgctttatttgattcaaatgtttcaaacatatctcaagtgggatttgtcaacttttcttgggttatcttcagtgccaccctcttccccctataacacttttaatcatcagcagtagaaaaggaagggacaaaaatacaacattgataacaagaacaaaggttaacttctcctatggcattaaaatgcccattctcacgttgaccctaaacttcatatagagtatataacccctaaaatttgtatttccaataagaaaattcggaagaaaaaagttttactagaaaggctattgcaaatgatctcttgcatagtctagtacaaagactattgcaaaaagtattgaaatataggcctttaataggaattactatgtaaaatgtattgtactacaaatcactagaatatatctattagtcaaagacctatactttttaaactctctttcgcaatctacatggtcaaaaaagactaaaacaaagagtttgaacacgtaagtcttttataagatatcaattatgaaaattgcagtacctttaagtaaatttatttaaaaataataaaaatcaaacatataacaagacaacaaatgcatgagatgatagctaattttatgtgcatgagaaaatttacctttgcaaacccaattttatctcaattaagatgcatgtcaatgtttttttttttttttttttttgagaagataggtttctagattttaatggttaatgatatatgttgaactgaccctaaaactactaacgcaataattcaagcttttcaagttttctttcgaaatcaaagttatatcagtaaaatgaaatgcgagtaaaatgtaggaaacataactaccactatggctgaaagacatgactggactggttgagaattcggggtagcctttcattcctctagttgcaccagttcttacacctgaagcttgcctatcccggaagatcccccacaaataatatcttgaatgaaacactgcaaagcaatcgatctatggcgtaactacgaggtgcaaacagtagaaaagactacacaccaaaaaaaaagtacaacaaataaagattcttaataaatgaaggcttactcttatagtgaaaaggcaaaacataagatgtgaagaccaagagttctacgttttccaacaaagctctcatagcgaagtctccattgatcatgtcattaactagaatgtcataagttttgtcatctctgtggcagaatgcaaagatcaagcaaggaaagtaaggtaatgaaacaaagaaattataagatagcctgaaagtgtagagactaatactacctgtcttgtggcaaacaaaagagaccaacactgtgaatagatggcccccaatgctgaaactttatgggccaacaatgagatcgggtagataattctacagaaactaactctggtaataaatttctcatctcacacgctttagaagatgccaagttggaccaatgagctgcaactaaaactctgcctatacattttgactctatgttatggataacaaaacttcccctgtcaaacaaatcgaatcataatgttacaaaccaaaccaaatacacatcttcgtcataaatacaaaatgagaaggaaaagaacatgtattacctccacattggttcgagtagaggttgtggttctacatagcaattgtattctaacatatttgaaggatttgggtcagtaggagttacttcaatagttttcaaaggttcagcagcctctacactctcaacaagtgatctctgttttgtttcaaacttcggattgcacttctccttgttcttcggctcatcaccagaaggactaatagtaacgtcacgtattggcacctctgttgtagctacagaaccaccaacaaccttttcttgtaatacaattgaagacatcagaccagcgttggaaatttctacagatcccaccttttcaataaccaattcctgctgtgttttaacctttgtatcacaagtctcgttgttccctggctcattactagaaggactaatagtattgtcatgtattaccacctcttttgtagctacagaaccaccaacaaccttttcttgtaatacagttgaagacttgagaccagcgtcagaaatttctgcaggtttcaccttcttttcaataaccaattcctgctttgttttaaatttcggatcacaagtctcgctgttctctggctcattactagaaggactaatagtactgtcacgtattagcacctctgttctcgctacagaaccaccaacaggcttttcttgtaaaacatttgaagacttgagaagagagtcagaaaattctgaaggcttcaccttctttttaataaccaatctccctttttttctaagccttggatccttatcaggattcttttgcaacctagctttcgctaaagaaaccgaagtaacggtatcttttaagaaatctgaggacttgtgattagcagaaaatttcaaacgtttagactcttgttgatttttaagctttggatccctgcactgcttcttcctgctctgtagcacattattaataggcaaagaatcattcatgtgcacctgcgatttttctgcatgaccactattaacacttccttccacaattttcaaaggcttcaaaacactgacagcaaccttggaagtgttcagatgcttagtagtgtcatcttcacgaaccaacttctgtcgttttctgaacttctgatcctcattgtcgttctctttgcattgtagttcattataagaa

SEQ ID NO: 37037 - DNA, 4170 bp, Cannabis sativa
gtgaatgaaactcttaaaacccataccaccttctgacttgggttggcaaagtgtagaccaattcttccaattaataccagatctagaagtgttggaaccccaccaaaatttattcatcatgacttcaatttggtgaataagagattttgagagctggaagcaactcattgcatatgtagggatcgattgagcaacagctttcagcagaacttcctttccaccgatggagaacaattgttcttgccaagcggataaatgtttccaaagtttttctttaatgtctccaaacaatatttttttatctataccagagtaggatgggagccccaaatatcgttcatggtaaggttggattggcatttggagaatctgatgcagtgagcttgaaccgaaaggagggtatttggtgaaaatgaaagcacagatttgtctaagttaagtttctgacctgaagctcgacaataaagatcaagtgcattcttgatagcagtagcagagcggttgttggcacggcacagaagtaaactatcatcagcaaagaataagtgtgatacacttggagcactacgggcaaccttcagaccttgtagattaccccttgtttcttcatgttgtagcagccttgaaagtccttcagcacaaattataaatagataaggggatagagggtccccttgtctaattccacggctaggaacaacccttccttgaatagaaccattaataaggaatgaaaatgagacacttgtgatgcatcttgtaatgagattaactactgaagaatcaaaacccaaagatatcatcatatgctgaatgaaatgccattccactcgatcgaatgctttgctcatgtccaacttgatggcggcataaccttcttttccccttcttaagtgcttaagagaatgtaaaagctcaaaggcaatgagaatattatcagtgattaaccttgattttaggaaagcactttgggattcagaaattacatcgccaagaatctgttgtaaacgaagaacaattgtcttggagaccaatttataaagcacattgcacagacttatgggacgcagctgagtcattgaagtgagccttttcacctttggtatcaaagtgattactgtctgattgaagcttgaaggatcgcccccatcattaagaatgtttaggacagttttagtaacaagatcaccaataatctcccaatagttagtgtaaaacatgacagacatatcatcaatgccagggctgccatcagattgcatagatgaaatagcgtcataaacttaagatgtcgtgtaaggtcgagttagaatctggtttatgtcaactgttatgaggcatgggacagttgacataatctgttgaagtgcagcagagtagacacctttagtactgaataaagagtaaaaataggtctgaacaacatgagcaataccatcaattgaagtatgttccatgccttggtcatcagttagcatgcggatggtgttattggtctttctacttgaggctttctgatgaaaaaatcgggtgtttgagtcacctaattgtaaccaagagattcatgatcgttgtttccaatattcttcttcttgagacagcaaatcatctagaatagactaacttgatttaagctattcaaaatggctattgttagtatcgtgtttattgtttagtgcttctactttttgttgggaaatcatgattttcttaggaaaatctccgaacttagaacgatgccattgttgaagttgagtagcacaattggaaagattgctcagagctcggctgatgagatcagtagtagaattttgtcaatgttgagtgatgatctcaagacattgctccttttttagccataatttttcgaaccgaaagcgagatttaaatttctgaacaggtacaacagaaggtgcagatatggtgactcgaagtgctctatgatctgagccaaaaaaatcaaaacggtcaattgtggggtttacaaaactgtcagaccaagagtggttaataaaaccatagtcaagactttccttaacatttgaactttgagcgtgcttgttgtgccaagtgaatctatcacccatgaaatccatttcatttaattcacaacagccaatggcagttcgaaagcatcaatttgatgttcatcacgcaaagggccaccaagcttgtcatgattagataaaatttcattaaaatctcccatgacaagccaaggaaagagtggtgcagtatcttttagttgttcagcaattcccaagtgaaatgtctttgagaagcacaaggagctccataaaaacaagaaaagtgacaagaaggaccatcaacaaaacccatgtaacagtcaacaaagtttttaccataattgagaatagatacatttacattggacttccaaagaaataaaatacctccactaagacctactctaggaacttcaataccattaggaaactttaaagcatttctaaacttagtagtagaccctaattttagcttagattccataataaaaataacatcaggacaacactgagaagtgagcaaatgcagttgacagaacgctctcgggtttctcaaaccaagagcattccaagaaacaatattcatggcgattggcgaggctgggatgcagcctttgccaaggaagcaacacattcttcatccacccgtgagttgtgagaacattcagaagatgaatccgattgttgatgcagattgagattggtagtatcagcaagaggagagcctctggtacgacatcttttcaacacatttcgaacattcccccctgaagttgttagttgtcgtttggtgaataaagaggatatccgattctctgttaccataggagaatctgctgcagaagttgagatggtaatggaagtggacattagggagggtgaactaaattctgtagacatgtgtatgtatactggtggaattctcatgggaatggagactgattttttcaaatgtggagttgtaagtgggggatatgtggcaacaggtggagaggctaatgtggagttgtcgaacttaaatattcctcccccaaggcctgctattaatcgcttaatctgtaggatcttctccaaaaagggatacaaccccaagacatttaagaatttcataactaagcaatgggtaggtcggtgtgctatgaccatttcagattatgatgcttcaacagattcctaaacaatttcattcggatgtgaaggtgatattaagagaattctggctaaggagccttggcatttccataaccaacatatgatcttatgcccaccaagtggcctgcaaaatgcttctatggaaacttacactatcactccattttggattcaagtgttttggttgtctttccttagtaaatctgaagcccttgcaaaaattctaggcaacatgatcggtacctttcttgaagtccatgaagactctctaaatgaaggttgggggccatttcttcgaatgcgtgtcgaaattgatgtctcaaaaccccatctgcgtggtcaatttgttacatttccttggatggctgatgaagtttggatcgattaccgctatgaaagactaccagatttttgttatgaatgtggaataattggacatgtctttgacaaatgccctctgtttttagaaaaattagatgaaggtattgaaccaagtctgccatatggcccttggatggaaggatctccccttccaaggtctagttatgatcggtacacgcaagacttttttaaagagggtccttggccgtttatcactcaacttgcttgaaacacaatcaatccgatcctttcgcactcaaggcaactatctgctgtccctgccaatgttaccaattcggagaaaggaaaacaaatattggattcttctaaaatcattgagtccaacaacaaatacttacactcgttgcaactcaattgtctctcttctcagtctccaaaaggtttctctttcaaggaccaagcatcttcatcgcgttgaaaagaaattaaaatggataagttgatgaacacaagcagcattatcacctctgcaactaagtctacaactgagaatccctctcggtttgacaccatcagccccaccatcacaaacactttatctcctaaaaattttaaaaggttgaactttaaataaaattaattattaaga

SEQ ID NO: 37038 - DNA, 2669 bp, Cannabis sativa
  modified_base (1080)..(1081): a, c, t, g, unknown or other
  modified_base (1743)..(1748): a, c, t, g, unknown or other
  modified_base (2463)..(2474): a, c, t, g, unknown or other
gtgtataaagctattaaatctgcaataacacagaagtttgataaccgatcttctaaccccaaataacccatattttgtataatccccaggatttgacagttataaaaaagtgaaggtgagcttctgtcaatcaagctattcgcagtttggtaatacctttgcttctaatgtctttaatgcagattctagcaggaaatgccagaaaggtcagtgccgttcgctttgaaagattagacaatgatgatactgcaggggataccaaagaggtgactcggttggtccccaaaattgtgaaaaggaagtggagcggtgatgaagactcagacagtgcagaatatgatgaagattcattccagagaagaccgcagaatagtctccttgatgagcatgaagagagttatgatagcctaactaagcattgattatgattcttcttgctaccaattttacagcattgccaagggaagcagttaaatttgaggaacaaggtacggttccatgatcagcaaatgaagaacactttttcacgggcaaggcaactctcttcatccaaatctttggtagttatgtgttttgtgcacaactatcttggagtattctcaccttgatatcagcatgagatctattctactgtctaaatctgtcttggcaattggtaaaggggaccatagatgagatggcaatgccataccctttcgcataaacaatgttattttattattttttttttcttatgtgaaatgtgttatttttgagaagagattgatgtgattgtctctccaaatagtctttgtatgtctacttgtgtaaatcatgtattttgaaataaatactattggttctcaaaactatcttaataaattcataaccaagtgaagctgggacatagtggatgggcagggaagggactacttaggaggaaagtgttgacagctaaagccaaagagaagggaacctaaacttttgaaaggactttgttatcttggtttagtggacatatgaatagttgtcacgactttaggcccccctcttcccaatcatctttttaagtgtgctcgttgttattattattattattannattattattattatttattttgttgtgatattggcggcaaaattctttaaattttgaagatagttggacttagatcccaatcaaatatttgacgacaaaagtctcctatttataatttagtgcatttgccacgcttaccattaagtccggccaataatctgtgataatttcttactggttcaaaatgatttataattaaaaataaaatctaagagagtgttcttgttaacttgttgttataattttttagtcaatttctacattcgaaaacatatgggataaaatctatgaggtatatataatatatataaaacggagtttttttattggagttttttttataaatataggaaaatgtgatagaatttactttttttatgacatatataaataatgcaaaaaaatatgggattaaaaaataattaaagtaattaaagtttaaaatatggtaaataaataaaataaataaataaatttgataaaacttgtaataataaggttcgctggaaaagttgtcgggaaagtcatcggtgccggaaagttggcggtaccagaaaaagtcaccagaaaagttgtgggaaaagtcacagtcgtcgggaaaaatcactagaaaagtcatcagaagtaaatgtctcagacataaataaaaatagaaccggttnnnnnncataatgaataaaaataaataattcaaaccggttataattgaaatataaccggtatcataacataatgaatataaacaaataacacaaaaaacttcatcccagttataattaatatagatccggttctataacattgttataatgaataaaaacaaataacacgaaataactcaaatcggttataactaaaatgaagctggctatataacataatgaatacaaacaagtaacaggcaataactcaaactgattacaattaaaaaataaagaggaaatcagttcctaaaagactgaaacataaattaaaagcaaaactagttccataacaaaatacctcataaaaccgattataatttttttttaaaaaaaatgggaatcaattctaaaaaatattgaggcataaatatgaaaagaaccagtttcataacaaaataaataaacacaaataataacacataataactcaaatataatattttcaaaaaaaaaaaaaaaactcaaatataatataaagaaattggttatatttatcagctagttaaaaatttaagacaaaaaaattggttccataaagcaactaggataaaaactcacacacaaaaacaagttaaataaaataactcaaacaaaaatatcttttcaacatgctccaacccaccaaataattacacccataccatatctacccccaaaatactcattcattatgttatnnnnnnnnnnnnattttagttataaccggttttagttatttcgtatgatttgttttttattcattataacactgttatagaaccggttctattttaattataactggtttgagttattttgtattatttatttttattcattatgttacagaacttgttatatttcaattataaccgatttcgattattttgtattatttattttta

SEQ ID NO: 37039 - DNA, 2140 bp, Cannabis sativa
aaaacaacagtagaacaattaaaaccgtgaaaacttaacacaatacacagtataaaacttacacagtatttttttaaaaaattctactccacaataaaaaagtaaaataattagaaatttcagtatatgatataaaaatctcaaaattcatattaattctaattacttgggtaactatcttaaatgtaaacttttgggacccgaagagcttatcgggttcccttcttactacaaatcgcaaaggacttaattgcctttgaaaaatgccttacttgcatggggcatttaaataaaacgcgagtaacatattcataaaaaaaaattaaaaaaagaaaaaaaaaacgaattacatctattattataccatttatctgaaatatgttggttgtgcttgttcttactcaaaatatattacattaattatgaaagtatttactcactatatttatttattagaaaaccttaattataaatgtcatttttgaaagaaaaaaagaaaaattgcaaattgacaaacaaaaaagttgattacttataaagctttgaaagaagaggtttttataccacgtactaaaatttctaacttttttatttttttcattgtggagcaaattttttttttcagaaatactatatttttttttcaaaaatattgtgtaggttttatattatatatattgtgttaagtttttacggttgtttcacggttgttttttagctgttctactcttgttttaattattctgttttgttattttactcaaaatccactatttttgtaaaaacctcttgaaacaacacaaggccacatatgggccgtagcccataatcatgggccacagtttggtctcataaattcaatatacatttttctaaggacaaattacaatattgacacttattccctaaaatattctcaatatgtaaataatttattaatgacacaaactctgaaattaaatatccaaactggacagcttgatctgcatggtataattaagttgaatttattatctttacatgaccaaatcatatatatatataggtataaatatatataattattcttagaaaaagtgcttaattagtattcactcaaaattattaagtttcatgatgttgttaatgaggtgaaagtatatacatcttacatccatgaggaccaacataagaactcaatcgataactcatatttcttgacacaaatgaatgctgcaaaaaataaccacacacacaagaaattagctagttactaaattattaagtttactaaatatttagtatgtaaatggtatatatttgacattttattttaaattataagaataaatggtatttttaaaaaaaaaattaaaaaaaaggtagtcggtaaaaattgagaagttaagagtaatttgcagcataaatacttaagtttaactttcggctctaaataaatatctaagtttaatttttggcagtaataatacctaagttatatttttagaattttgtaggtacctggttgttacatgtcaaattattatccacgtgttatttttttattggtatatttaaattatttttttaaaaaaaaataaaaaattaatggttggactaatcaagaattgtcacgtagcaatttagttaacacttaacaaccacgtacctacagagtttcaaaaatataatttaagtattattactgctaaaaattaaacttacgtatttatttgcaactgagagttaaacttaaatatttatgaagcaaaatacccttttttaatattattttgcaaagtgacattttttgagatttttttttgaaaaatggcattttagatagtgtgttaaatgtttttttatagggtgttaaattttatggaagaccatattacaaagaattgtatatagaaaataaaaaaaaatcggtacacatgtaaagtgaattaaaaatataaaatgttatttataaaataagttgaattggcaattttcaaaagaaaaagtattggtgataatataataatataaaaataaaggataatggttgtgtatatcttacaagtaataaaagtacgatcctaacaattcattaatgatcacatatctaacctatagaaatatatgtaaactaaataaataaataattaagggttat

SEQ ID NO: 37040 - DNA, 9866 bp, Cannabis sativa
aaaggatgtaacattggtaaaattatttgaatttggagtgatcatggaaaggagtttgagaacactgtttatgatgaattctgtaagtctacaggtataactcatgaattctcagctcccaaaactccccaacaaaatggagttgttgagagaaagaatcgatcttgcaggagatggcaagagtgatgttaaatagcaagaagctgacaaaacggttaattatattctcttccattctcttttttaaacaagcatagaagtaagtcatattttcgtcacctttcttaagctaggtaactttacttctatgagtcagaaaactttgcagcatcttttcctgaatgcaaaactcgttagcagcaaacctttatctctcaatcaaattcacatccccatggttagcttgagcacacatcttagcttcttggtattgacttttctaaaattccatatcagcatttctcatcacattattgttgaaagctttaagcacatgcttcaatcgaagagtcttgaaatataaagctgacaaaccagtatttctcaaaggcttaacccaattttccaaaagaactctcttaaactctttatgttctacctatgaagggtttaattccaatatcatacatgacaatagaggagactattacaaaacaatgatccgataccgtttcccaaaaaaaagtagcacttgaatttggaaatagatctagccaatactcattcttaaaaacatggtctattttagaataaattctattaagaccctcttgattattaaactacgtataataaggccccatcctcttcaaaacatccatagaaagacacgcattagagtcttcaagatctgaagcagacacaaatttcccctcaactttgtcatcatagtgaaatatggcattaaaatcacctaatattgtcgaaggctaaaaaggataccttaaattttcaaggcctctctataacatcttcttatcctcttgaccattcataccataaacaaaagtagcacaaaaagcttctttgtgcctagctaattttacataacaatgaacatattgagtagtttcttctatcactatcacctagcaaacactttcttcaaaataagcaaaattatcccttctatagtagagctggagtaaaagtcctagccaagaaacttattaaaaaccatttcctacacttttattccctcttattttggtctcaagaagagcgccaacacccaatttctttattctataaacttctaaaatgacctcttgtttattagtactattaaggactttaacattccaactcaaaatgttataataattcataacaaagaattgatagaaggcttaccaatttttgaacctccatcttttccttgcaacacctcaaaatgattcttcatgttttgatccccaacttgactaataaccccctcatctctttgcttagcttcaagcagttgagaccttctaggaatctgacaaatcacccatagattccttcaaaccattacccctagcatacttaacaattccaggagtccctttagtcacctgacctaaaccagcaacaatttcctcatagttgctacaacagacaacatcttcaccctccagatcatcttcaatagcaagtttaccctcttcaatccatatagctaccaaagtttcacttccagacttctgaccaatcttagcaggttcttcttgaacttttttaactttccgagtaccccttcttccttcttaacccattgcgcttctttacctttcctacaattcgccatactatgaccaaagcatccacaattcttacatttgacagggagccactcatagtcctatcccctttcaacaatgctcccatgatcattgatataatgaatcattcttgaaggagagtcagcaatgtccatctccactaaaacttgaggaaacttaaccatcgacctttcctttgtcactttatcaaccattactgatttcctaatggtactaactaaagcactcaaacacttacttccccaatagtgaagcccaagatcatgtaatctaatctagagagggacaaacttaactaaccttagaacatccaaattggtagtccaaggcctagtactaactagcttccgttcgaactaaataactccatgctcaagagtgtgatctcttgtagccacatcattgaattttactatcgtgaagccttcattcattcacacaatctgatctacgcccgaatttccccactttctttgaattaatccttcgaagacaataaaaggaggattggcccctaagaccatacaaatcacaactaaacttcaattaactgcctacaatcgaatttccttaacatccaattgagtgatcttcaacccttctttaatcgtagtctcctcatattacaaattagcttctcaaaattagaatttacctttcgtgaaattcttccagtggctcttagattgagcctagaaatcctcattatccactttatctgcccatgattaagtttcaacacccatcttttcatctgtcatacccagaactttctctgattgcatcttaaaatcaactaagatatcccatggttgtaatgcttcagcaataaactcaattcccttaatgttttcctgattagaacgagcctcatcctcatcattatcaactgaatccatgctcatcgatcataaaactagcttctagagcacccttttcttcttcaccatggaagagagctagagagaccacacacacctttattgaaggcttttcaaaattatattaaaccctttgattagtaaaggttagcacaataattaagaaaatatagtagcatgcctatactggtagggtgttacaatccttatcaataatcctaatagttatcaaattgtattaacgttcttcatcttttatcatttgtgaagctggcctatccccactcctcatgaaatcaaattcttatgtgatttgaaaaggagtgctgctctgaaggaggaaggcttttaccatattcatcagtttagtgtgtatatagataacatcattaaaagtaattgtagcctctatcatgaaatatatatctatactctcattataacctcaaggtatgttaccttccaaaaggctaaccctttcaaaagacccactctgttgattgacatgaaatggagagcgaatgccatgtttagtaagattaaaatatgggagagagatggaaagattttgctctctaatagcaaccttcgtcgtgttgggctgatagtgacttgtcagcgactttatgttaatgctcgctttgctgatgattcttggaccatgccccttgataatgaagaaagcagacatcatggcactgtaattagattcgaagtgatgttagaagatgaatgctctttttgtaatgacttagaatattatgagagaatatccatatctcttaatagaactagtgaaggcattggttctggagatgaagccaatacaaggcttccagatcacaatgaggatcgtgggcctgaagcagttggtgaatcagtaggttgctagttcgccactcattgaagcaactgacaactagattgcttacctcttcttactttttgtatttttcttacgtcctaaccctttgttcttcttttttgttttgcagacaaaactgagattccttgatgccatgtctacttgttctaaatgaaagaaacctgccaccaaggtcgatgagccacttatttaagaggttgtgcaagccattcctgttgcttcttctattccttaaaagaagtcaaagaagagaagtaagccactatgactgaagcttctttgctagtcagggtcttgcgtaaagggaaagagaaggttattgaaattgagcaagaccttcctacttctcccgatactgcttcaccagaataaatagacgttgctaagccgagtacccaacttcaggtgagtcaaaacttatggaaaacctcatgcaaaggacactaaaactagcaaagacctaatttcttccaagacaaaaaacaaatttttggggaagttggtatcttctaaacctccttgtgtcattgctcagaagggcttcaatgatatctttagggtgattattcatgcttttgatttcatctttcccttctttttaatgacatcctctgactttgttatgtcatttgtaggcttgcatggtgctttgcttatgctatggaaaatgagcataagaaaatttttgaactcacgaaaaagctatcgtccactgaacaaagggcttctgatgctaaaaagaaggtgattgacctagagaacttagtcagttagtttgaggtcagtgtttctaaccttcaagatgcagtaaatagtgcaaaagaccaagaggacactctaaaggaattagggcatcaaggagaaaggcttttgatgtggaagagtctctctgcaagtctcttgattagaagaccttaagtattgctaaattggaaggtcaagttcactgtctggaggaaaaaatggtgaccctagaagagaaaactactacagacatcgtaacctatgatggttactgttttgatgccatttacaactcttgttcgaccaatggagatgtggctggcttcaactgggtagctttcccaaaggatcaagtcaagtttctctctagttgatgtgagcaatgtgaaaatgagaaaatactctgtgatatcaactttgacttgaatgctgatgctctagatgttggggatgctacaagggttgaaggctacaaccgtgagcacactgactttttcatattagaagatgcaccaggagagaacgcaatgcaagtcgaagagctattacagacttagatagttgatagcttcttaaggacgttattttagtccttttttctttggtatttagttttggtgtgttagttgggggccttttaagtggggatatgccttagtaaaaacttttatcaaaatttgctccaatttaattagactttattccgatttttattatatatatatattttacttattaaccattactgcatgacctctaacacttgcaaagtatttcatgtcttaagaaacttagtcactgggagtaaaatcaacatttcttgatatatctttaaaccatgaaagtactacacaggtgtgcaaattttttgaatacccatgtaaacacactagggtgtatatgcccccaagtgatcaaagaagtgccttcattagtcacttgccataccaaatctcattgggctttcttgatcatgagtcttgaggagttgttacatgttgagcactcatccatttatctggagatttttcgtttggcagtgtttacctcactaaagaaataaccaaagttacctcaagaccaaccctagaagttttactcagcgcttgagagcattgtcatgtttgtgagttatagttgattaataacaatgaagtaccaaaaaaactttactcaatgtttttattcattagaaattacatacaattacatacgtagcttatttgaataagaaagaaattgcatttacaaatatacatttttatcaaaaaatctaagttgatccccattacactgatgccctgttggactaaccgtgtaggggacgtaacttggcgatggacctctcaacctatagatggacttcatcgcatcttttttcctcgagagtcgatcaattcacttgcacatggtaaagtgaatcttgtgaagcgagttgtttgaagacagttgctttattagtaatattatcttagatgctccccattccagtaccttggtattggcactagattcaagtggtagtcataacaagccatcttgtatgttccaggttctagtgcttttatgacgttatatggcccttcataggaggggtcgagtactcctgttgttgcatcatttgtatctaggaatactcatcgcaacaccatatctccaagcttacattttctatcttaaaactgagagttgtagtgtcgggcaacccttagttgatacgcaaccttgcagagattagatttctgtaatctcttctattttgtccagagactcaaccaataactggtggttggcgtgttgatcatatgtgagtctctaatgggataaaggtgtgatttccatgggtatcattactttgtgcccataggtcaaagcgaaaggagtatggccagttactattttttctatagtgcagtaaacaacaacactttggataattcttttggaaagtttcctttggctggctccatgaattttttaagcatatctctaagagtttggtctacaactttgacttcccattggcttgtgggtgagtaactgctgaaaaactctaacgattccacgcctttcgtagatgtcggtaaaaaggtcattgtcaagatgtgtttcgttatttgacactattttttatggaagtttgtagcaaaaaatgatgtttttaactaaaaaatcaagaacttttattgatgtaaatatggctagggctctgctttgacccacttagtgaagtaatccactgccactactgcgtattagactcagccttttcctttaggcaatgagcctgtgagatagataccctaaaccggaaatgaccattgattttacatgattctaagattttttggggaagctctaggtattttggagaatctttggcacttgtcacatcttttgacatactccatcaagttttcaattgttgttggccaaaaatacccttggctcaatattttctttgagagcctttgcccctagcatggttgccacaaaaaccttcatgtactttgatcatgagcaacttgcttcattttgcgtggcacaacttagaagatgcattgagtagttttttctatacattattccatccataatgataaaacaagttgattttctcatcaactttttggcattattcctgtctgttaaaagaataccttgctctaagtattgagctatcagagtcacccatgacagactattgtcgatcatgagaatgggctccgagtcctcagtgatgctgggatgagtaaggtattcgacaagaactatgcttagggtgtcaaagttcgttgtactagctagtttagctaggaaatttgtatatgcattctattcgtgtggtactttttgaatgaagtagtgttttagtagggctagaagatttttagctttccttaagtacactatcattttgagcccgcagacttaatatttgcctaggatttgattgcaactagctgagagtcactgtagatatctagtgattaaaatttaatggccaatgccaataaaattcctgctaggagtgcatcatactctagttcattttttgttgcagagaatttgaaccataatgcataatgagtgcgaaatcctttgagaattatgaggatgagtcctgtgccagagccgtgcttgttggaggatccatccacataaagcttccaaaagggtctagagtccttttgagttgcagtcttaggtgtgggactttggtcttcatagagcataaggttgtcttgtttcgatgtcagtgcattccacggtgaaataagctaatgcttggcctttgattgttgtggcttcaccaggacttgcctgagtggttggttagtcaacactttgattgaatgggcttgaaggtacggcctaagctttctatagtccagtactaagcagcaagctagcttttcaatgggggataccttgactcaacctcaatatgacgcttgttcacgtaacacaccaaagattctgtcctttcatcctcatgcaccagaggagaactagcagcatgctcgttgataactaaatagatgaataattctttgccatctataagttttgaaaggatttaaggtttgcccaaatgatgtttgagagcctaaaaggcttgtttgcactaatttgtccatttgagccctttttgcttcctccctattctcaattttgatcggcgtagacctaacccaccttttggagaaaactaattctcctccatgtagtagggttacaaaccctttatcataaatatcatatggtctacccaatttatcaaaaattatggccaccacataggaatgagtggctccaaagtcaaacaatacagagaagtaagaattgttgaacgagagctgaactgtaacaactgaggggctagcttctgcatcatcttaggtaagagcaaacacccttgatggagcgggctttgctactgccttctgttcatatttcttgagttgcggaaagtctctcttaaagtgtcaaagcaacccacactgcaaacatcctcgccctctacactcacccaaatgatgcttcttataacttggacattctgggtaggtgtatcgggtgtcagaaccaccctgacagttgccttgaccctggttcccttagaacctcttgttatgacttgagccactagatgcagatggtgccctttctcttctgattggcggtcgagtcactaccacccctaccataaccatgggtaggaggagtaggggctctaccaacaacctgtgtccctggggactcctaggtgcactcaactgcacccttagcttgcaatgcctttcccaccatatcagcataggtggtgttgtcatcagtggtaatcataagatcgtgttttatctttggattcaatccatcaaagtacttctctttcttactaaaattgattggcataattctcgaggctaacctagccaatcaatcaaactaagttgtgtactctagttatattctctttctgagttagctaggtaaattctttcctctttgcacttctgactgcctcattgtagtacttggcattaaacaattcctagaactcttcccaggtaatggtagtaacatctcaagtcagggccaacatgtcccactaaactaaggcatcttcctggaattggaatgtggcacatgccactttgtcattactggtgactcccatgaagttcaagatttgagtaataactttcagccactgctcagctttcatcacattaggacctcctagaaagactggaggtgcctatttacggaacctttcgtacagtggttccatctagttcactgcagcaatcggccctgcctgcatagtaggggcaagagccacctgcatctctagagaatgcattgcagaagcaccctgctgcctcaggtgtctgatttcttcatcttgttcattgattcaagcttgcattactacaaacctattttccactcctggacagcctgtggcgggttgacatctccctgaccgcatgccctgcctctaaggcctctgcctcggcctcgtatattctgaggaatctgaactccctaactaccactggatccgaccaaattaccctaactcctcgtgttttgcttggcttccattctattagaatagcctatgaaactaaaagctggcctggtcagatcaaaatcaagaataatttactaattatcgcctattttggaaattaaaacatgcacctattcagctatcaggctactaacattcatcctatcacgcttttcctataacatactaataagataaactactaaggcaataaaggcttactaaactgcgggtcaagctaatcgctgatcatgattgtacaagccgtgatgatcttcggatgacaacctgatggctctaataccaaaatgtaacaccctactagtttaggcatgttatcatgattttataccaattgtgcggcgcattgctaatcaacaagtttattgaaaattctgattaattaaaactttgtttaaatacttataaataccaaaataacatatatgtgtgtaattgggatcatgtgtacaaagtccttgtacaga

SEQ ID NO: 37041 - DNA, 4889 bp, Cannabis sativa
ttttgcttgtacaaaaatagattaagtaaatgagagccgaccatggtccatgccccacccactcagtcattaatatgattatatttaggccttatgttgtgaatgttgtagcatcaaagtcaaaaaccatgagcttagttaggggtagtcacagtgtgccaacatcagtacccagtttgtattgtgttggccacaccacacccccacaaactccttgcataacacacttcgctcttgcttacctatttgctgaccaacttttctttttttcttttatgaaggttctttattttatttgtttttttaaaatatttatatatatatatatatgtaaaacatatataaatatatataaaataaaaatgggttttatcattgatgcccaatttgattgccactgtctaaattttccatgttcaaaatcacaaaagaaaaagattttaaatgcttttaactatcatactctattgaccacccactaaatattatattcttattttggagcgttatttggttggaatgaatataaatacagaaacagaaataaaaattaaatcaaatttaaaatgtataaaaaaaaaattaatgaaaagattattaaattttttttcatcttgcattagaagtctttcttattaaaatgatggaaaaatcatttatcaagcaaccaaataaaaaaatagaataaaaaatatttcatatctattttactccatttcattacctcaaactaaacactacctaaagttcttagtttgttattcaaaaagttttcctactttggacatttttgaaataaacactgacgttaaatttaagatgaacctttaatacgattaagtgctatattatataaagaaaagaagaaatcgaaatgaatatagaaatgataattgtctttaacaaatgatgcatatgtaaacatatactatttttattcaagtaaatttgacataacatcatgatttatcaaattcgttggtgttaaaaggaaacgataacgctgatgaatgagaataaagattaattttttttccatctgtcttaacatgttattttggtacataatggcacctaatccttcctttggttatctatagatctaactcagttgatagaatgtggatcagatgactcacttcaaagaacaatgtgttcactttatacccctcgacaaggggcgaaaatcataccctaaatatcggtttcgggtttcgtttgtgctaaaagagtcttaagactaacctgcataaccaaataaaaaggaattttcaacattactaattcttgttaacattactcctaactttttattgtacataaaattaaagcccaactaatgaaatgaaattcagattatagtataaaaattttaagactcccattatattaaactcaagtcatctagttgtctcgcagaacagatagtcttcaatatgcttttgttgaaaatcatacgtaactaaatatttaatcaaaagttaataaaagctcaaagtaaactttctcaccttgtcataggtccatgggaactctcaaaccgtcatgcgcgagctgcacgtgaattccttccctgtgcacacaatgataaaattataaacattagtatgtttcattataattccatctggttctgtatttttacaaccggggaaattcaagatgataactcctcgacagaaaatttaaacaaaagggcattaacattagttggagtcttggagagttcatatgttaaaggtcggccagaacttgtacctcttggaccattcaagaagaaactcattgtccttgtggtggtcaaattcatgagtcattccaattaacagggctcgttttggacaaattcgtttcaaagcttcaagagtctgagaaaacactaatcatttgacataaacagcatttaaatattgcaaagttactgtgtaagtgagtgtataactaacctgtggaaggcaaaagtgaacattatgggatcctgtctgcattcagagaaaataagtccatgatataaaaagcatacacataagcataacaggcattgtttaactaaacaagtttgaattaattagtggcagatgcatttattgatatttaaagaccactcttggtgctagaactatgtctagatgtttataattaccatgattttagatgttgaatggtattatgtgtccctgctaatatcaagagaggaaacactaatccatttctttttttttgccgaatagattaatcctacttgctaaccttataaagcgtgtccaatatgagtaaatccaattgtccagccccatctttcgaaataactgcaatcaaacatccattacaagtaacgggaattacagttagcattaagcaaatattttgatgtcaaatgcttccactaaaaaaaattcaaaattcacagcccagcacaaaaataaccatcaactttgacagggcaacggctggttgccttagacactgtatatcttaggactaaagccataatatattcactcaattgggacataaaatgaaaaaaaaaaaaaaaaacaagacacagacatttacttaattgagatcaatcataccaattaaataacaagttactcaacaattttcatgaactctgcaagagttgccatgtgagtgcacactcaccatattctgtacttgcaataaaccgtgaaatatcagatatataagccactctacatttttcaccaaatagaaaacccaaacagatataatcctctccatgcatcacctacatcagataagtaaccataagaaaacgttaacattgactaatgacatataattcatgaaggcaaaaggattcgcagaggctaacgggcaatggaacaaatttcaggccagatgcaacaaatggtgcctcacagctgctctcaattacagtccaattaagctgagaaactcgtctcacttcttggccttcttttaattttttctggaccaaataaggaaacttctctgcaatgctgtttcaggaacattaagaaatggttcgagaaaatttcagtgaaattcgcatttttgctacacagttagaagtgcaaaagacaataatatgtttgaaaaatacaaacgctcaaacaatggaataaacaaacaagctcttattaaagcaacttatagcttaatatgtgagaacgtcccatttagttttggcacagatcctatatacataccaaatcatcatgacaaggatttgccacatacaaggtatcataaatcaacaccaatatttcattttttttttcaactttgaacatcattctgtgcccaatctaataatctttcaagtgaattcttaaagaggttcttgttcatactgattatactagctttcattcagacatctcttctatgcatcttttctatgtgttcacttcaagtgggtcttaaagttgcagagcagataagaggttctttaatataacataaaaagtaccctatcagtttaacaaaggaatagttaacggcagtgtattaaagcacatacaagctacaactttacggtctctatattttcttcaatgtcagaattttaacttcagtttcaaagcatgtataatttaaccctggatctctaataagcaggtaacaaaaatcacattttagtaccatatggacacaattttgtgatgaattctgtaaggaacataactatatactaaaagtgatcaagtggaaaatgataatagcaatatacatattcatcccacagttttaatacctgtccattgcatactgagtcaaataaatgggagtgggatcaatatcatttgttggactatgtggttgaatagcacgtatatcatccaaaccaagaactgcgtcagcatgttcatgagtcaaaataatctgcagtatattaaaactagtttcagtacaactggaataagaaagcagttccagcgatcaagaagaattgcacaaataataaaatcacgagcaactaagaaggcacgatactcctacgctgggcagcacaattacattaaaatcacttccaattgccataatttgattggcctttcacatgccatggagtctaaagtatttttattatctagaaaactcaaatgaaaaaacagatcaattatgccatcatctgattagcgtttccaattcagttgctatatagtattgttccacgaacactttacaataaaacagctctcactaataatatcgtatatgcgtttttgactaagaagaataacgcaattaaactattgcacaaaaaattagagcaatcagtagacaaaaccaaaagatgactcaccgaatccaccctaggaatcttatagagagagaaccatcgaagtacttgctccctaaatgttttcccaacatcaatcaaaatatagctgtgtttaccctcggtttggcaataatcaatcatcagagatgtattgcacctagaaatcaagtcatgatcatgagatcagtactcaaatccaacattttccaaatcttgattaaactttcttccctaaatctcataaacatctctccctgccacaaaaacaagagaggtagatctacgcattggacgactactattcaagatcgaaaactcatgcattacctgtaattagggttttggtctggggaaacggacaatgactgataacaaacggagcaaggaggatcagaaggctggatgagacacctggcattgggaacggcgctggaacagccggtgccgagaaatatcaaggtcgatcggggcgtggaagacggagaggagaggttcccgttggaggtgagattgaggtccgccattgatatttgataactctatgcacagaagaagaagaagagagagaaagttgaggaagtttgagttttgaagaatctgagtgagagagaga

SEQ ID NO: 37042 - DNA, 5756 bp, Cannabis sativa
ttttttcttttttttttcttctgggggcattttactagcatgattgcattcctgtcttgcataaatttgattttcttacttaggtcagccattctttttccctgcactagtaaaatatctttgcattaggggggtctaaaacaagcggactagtttcctaaaacactctctttaggatttgtctatttgcatcttctcttaaggttttggctgacattaaactgattgatttcattgtcactgttcatttgaattgcatatttcctatgaattatcaattgaactttttttttttgtatacagtaattcgttaacaccatttccgaaatgtcttttcttctcttttcttatcatatcttcaaagttaatttttttgttcgattcgtgtctgcatagtttacagtagtagggattgtgattaccgcacaccaaggctagtgaaagatcgaatcctatctttggatttagtttttgtgagatttttccttcttcaatttaaaggttttagaaataatcatgatcttacattttcttttacaagttttgcaggttcaggtatccctgcttctcaggttcaagccatgttttcaattgcagcttaccatcgaatttgtttacaggttgttggtgcagcgtgtcaggaaattggaatgcgcagttcagcaggttatcgaaaaaaaatctggttttggaaaggcaccttcaacggttgatggtcaccgagcagcctgagcaattcttgtacaccattaccattatagctttaatcacttgttagttgcaggttaagatcatcagttgagtaggggtttgatgtttatggacccaatttagtcttaaatttttaagtctttgccagcgttggccactgacactgtttgctattattgttgtttctgcataagagttatgatatttggaacttatcatcattgtgttgtagaatagaactcattctatttagagtggaattttgtttttaatgcttttttcatcaaaatcggaagaaagaaattgctttaggcaggatctgattgtccactttcaaaattactgaaaaaacaaaatgaatcacatctgaacaagatatccttagggtaatgcaatatttgatctttgtcattgtcgtgatatgataatattaattagtggttagaattagtgttgtacatacggtttggctttttcggcacaaagtgtcaggctcaaaaaaatatatgtttaggcacggtatgtaggggtgttttttggttcacatctaatatttttaggctaaccacttgaggttagttcaactggtcattgaaggatgtgtgtgtattgtaggttctaagtttgaatctcagattatgcattctaatatattaacgcttaatttaaaaaaaatgtttttaggcctatttagatgtgatttaattatatattggatgttaaattttattatttgatttgattttaattaattttagtcattcaattgattagatttgatcgattctatccatgagatgtattttatatatatttattgatttaatttcgatttatttaatatgctaaacttagtattttttagatcgaagtagatccattcaatattttaagtccatcttggattggattggatccatccaatttaagaaaaaaaataaaattttaatattaattttcatgtatacatataaattttacgtataacgatataaaatttaattactcattcaaattaaatgaaaatactacttatttcgattggatgttgtatgcattagatttttggacactccatccaccactcgattcatcataattggatatttaatgtttggtaatcggttgtaattggatcggtcgattcttattggattggatcaatttacccacactcctaactgtatggcacgaaaaaaatattagtttatgcacgacatgatacgaaaatataatacgaaaatataagcttagacacgatacaacaagcttgcaagcacgaataaaatagtttgagaaagtcagatgtttgttgaatagtgcagtgttaggaaaattgttttatttagggtaaagctttgaaaactgtatgctatttcatcaataagtgttcttcaacaacactaaaatttaaaacacctcaaaaagtttggacaagtcatgcactagggaattgatcacttagagaatcttcggtgcaatcacagataagacaagataagctagaacctagaactttaaagtgttgtttcattgggaatccagaggaatagttacaaactgttatgtagtcttcaatgagtgaaatggccatgaagaaaacatcagaaaatgatgctcagacaaaaaaaaacacaggtagtgttcaagtacaacttgaagaatcacagaatgagacacaagctaaacacacataacaaatcaaggtggatcccaagatagagacaggaaaaggaggacaatcaaaacaaatttggtttcacaagactgtactacatcaagtagcacattcagttccaagtatacctattatgacgttaattgcaaagatagaaaagaattgtcttggaaatattgatgaagagataacattactcaagaagaacaagacatagaccacctagaacaagaccaattggatcattcccatctgttgtaaaattgatataattatctcattttattcaacacttcgatattcatccatataacaaagttttattcaacactttgatataatctcatttgccaagatttttaagttaaaagtagtaatttagtatagattgagtcctttataattaagttgcaaaacactaattatctaagtaaacatatgacgaaaggcaagagtaagtaatcttaataaaaaatactcaagacaataatagtaagagtaggcataacaacaaaaatgtaaagataatatataatacgattgagtaaaaatatcaatccattgaaacctaaaacaacttaacataaaattcataatacttgtcccaaacaattcattccaccaccaaaaacaccatcatccctttcctatagctttatgtcaaaaattaaaatccaaaagcaacctctactctctctccatcttcagatctcaagcatgttttgccttagtgtgagactcgagcgctttatcggaattaaaactcctgatacattattcaaaaaagttagacaatttactgcaaaataagcatacaatcaaaaatgatttcaaaattcgggatcccaaatcttacttggagcaagttttgcaagaaacgttgccagcagattttggggtctgtttcgatttatcagtagcaggtgtggctggagtcttagctgcagacttctttgaagggtgtggggtactaacatgagctaccttcttaccatctgttaaaaaaaatcattaagaacatgggatgagtatacaacaatatcactaagaaaaagttcattaaatgatgcagttatttcggttttaatgcataaagcttcaatgaaaacaccatatgtaaatgaaggcaataccagatttgggagaagctgctgctttagatttctttaaagaaacaggagtcttcgaaggagaggcggctggccttttcttggacacttcaggcttcaaaatcgaaataaagagtaaaaataagaaactaaagctaaagcttagatcaaaacaaaaaacacatttacatcaaacatgtataggaagttaattaccttcacaggggtctcttcatcatcttcctcatcgctgtcactgtcgtcgctgtcatcaccatcaagcatgtcctgcaaccgagaattaaaaaaaatgattaattaaacacttctataacaatcatcatcaatcaggtctattgaggattttagtacaagccgggacaatatatacctcatcagaatcaccttctgaatcaatttcatcagaatcatcagaatcagaatcatcactgtcatcttcttcatcatctttgcttggctccacaaccttaactttagcctttcctgaagcttcaggtttggcaggagcagcaacacgtttaccggctgcggccttagcagctgcaggtttagtagcacctttgcctgcaaataagtatcaaaacagttagataagcaaaattaatactcctcatgcacaaaccaaagttaaacaaaacactagaataattttacaaaatgtgaaaccaaccattttcaacagcagttacagggacttcttcttcctcatcggatgagtcagtcataaattgcccttcctccatttcatctccctcagtaggagcaacaaagagtcaaggaaaaacaaatattgaataaataaaaaacaatgccttacaatgtgcattgtaaaaatgaattcaaaaccataatatataaatatctaagcaaaggatattatggtccagtaggggcttgatacccacacaaatgaatactcccatttttccagttgtgtgacaattcaacctcttgatcaaaaaccaaatcaaaagtcacttgtgggaacttgtccaaggaaagatttgccaacacaaacttctggtccccaactttaacattaagatagacagtttcacttcctttacttttggtctcacccaaaacagcctaaaacagaaaaataaataaaattaatcaaataaattcctgatcaaaatggcatatatctaccaaaaaaaaaaaaacagttacctgagaaaggtggataaccatgtcatcatcaggctcaattttaagtggctctccagccttaatttcaacacctaagtgaagcaacagagttaagaacatcaaaatatatcaacaaaatgttcagagaaactaaacaaaagcctaataaaaatcataataaatataaatatcacacagaaatagagaaacacagaaaatactaaaccaaacaacaaaacaaatgaaatcatacaagattaaacacgaacacataacatcataaaccctagaggctataaaataatagaagaatataaacgataataagggaagagaaagaggttttaccccagaactccattgcagcagacgagtgtgaagagaaaggaggcgctagggttttggtagggttttgggagagagaagaaacagtcaaagaattgagcaacgaaagaggcggaaatcgaaggttttgaagggtttcttataaacaagttgccgcgccactctcttcttctagggttttcccttttttttttttccttttaattaaaatattattttgtatgggcttgggcctcttttctaaggcccatttcgtttccgtttgtggttttgggaaagtaagaaaataaacactttctaataagttcttccaacggcttatattcaattttagaaagaaaaaaatatatttggaattatttttatggtaaatattattttggaatatctgttttgtttaaatagcaaattgaactctatattttttaaaatagtattaaataatatcataaattaattttttgttaaaataaaatttaaataacttgatgtagatgtattatgataaaatttggttacattttttatatttgttcatgttaagaattatcttcaagatagttatattaaaataaaaattattaaaaattgagttcagagtattatttatactattttggaaaatatatggtttattttgttatttaacaaaacaaagagtccaatcagtcatttttgcaaacgacagagtacaaaatgatattatcctttcttttttataaaattccttataataggga

SEQ ID NO: 37043 - DNA, 4257 bp, Cannabis sativa
  modified_base (87)..(90): a, c, t, g, unknown or other
tacatcagaacaaaacaaaaacaattaaaacttatataataatatatacgtggctcgccacgtaactctcttctagtatatatatannnntatataaaataaaaaaaaatacaaaggaccaccatcaaaatctacttaaataaataaaattaaattaaaatttttaggattcaaataataggttataaagaaaacatatttaattttgttaaataaaaatataatcagatttacacgctaatattcatttctattttaattttgatttaagcttgtcaatttttttttgcttaacttcaaagcatattctgaataagaattttattttattttttattgggaaagatagattctcatgtagagatttataagtttttgtataaattttaaattcttgacttttttttcttctcttcctatctattatttgattttaatcttctataaacgaatcattaatgggtcattattggttgtcacaatttcctcacataggttagatatattatgttgtgttactaattcttcaaattcatccacaaaagtcttatgtaattattgttcacctatatggttttaatttaaaacctagcatttataatgcaaccgacgacaaggactactacattcttatcgatcatgtataatcattctttcaatttctagtttctaaatcaatatttatatgatgttttcatacaaattaaaacagtgattcaagatagtccaccttccagcattacattacataagtatgagtatgaggggtgttcaaaataatttgattaattaaaataataaaacaaaaaatataattgtctagaaacttataatggtatttagttatgcaatagttaaataactattaattaaattgcattgttttggttgaacacaagaatctacaatttgaaatattaatatatttaattcattgtattaagattgaaggtgaaatttaaaacccacatttttgaaagtatttaagattaacctcacaagagattaatcgtatttccataacaatagaaaaatctcataccaaacatagtcgtaaaagattttactattcttattaaaacattacctcatacctaatacctcatgctacttcaaataattaattaatatatataacataatatctaattagaagaatgaaattatattaataattacaataaaaaatttcttttgcctcaaccttgaagaaaattcctcccctttcaaaataaataaataaaatagtttaaatttcctccttcatctctagaagactaaaaccagttttgaatggactaaaaatgtaaagacttttctgtattctactgtgatccaatgaatgatgatagcatacatatatacaaaatggatttatatatatgacataagtggattagttctgtaacattttagaattagagtacgtacgtaatgaatgattaatatatctttattttatatatgcattgaatattccataataaaatacaaaaagaaaaataaagttatgacaacaatatctaattatatctatctactcacacacatataatttataaatattgaatgatttcaaataacatgacatttaagaagatagagatatatgagaatagtacacttaccacaaaattatgacaattattaatttatacacatttgacacttttatcttcaaaattgattactctttctttcttacgttactatactagtctagtgtaccaaattgatttattcatttaaaataataataataataataatgatgatgtgtcaattgaattggtactgttttactcactgacaaacagctagattcaacttcccatgttattagaaacaagaacccattaaatgggagaaaataacttcatagtcatatatacatatgaatcaatgaacaccaataatgcaccactacatatttagatcataaaaagaagaaatatcattaagatatgttacctcttttgtatcatcgtggatgactcgtcatagttggaaaatgccaatttggtgatacataatgttgtataaaataagataaataactatagtattagatggtattgtaataattggatataaataaatatattcaactttagatttgatggtaccaacctactcacccattcaattggggaaagttgtaacttttattataaaataaagtatattattagttataagatttaagaggtcatttggaattaagataactacttttttttttttttttttaatttggatgttatgcaatataattggagttgaaattgtaattttgaatattaaattttgagaaaatagtaactttttactttttgaaggaagctaattaaatagcaacattaataatacataattatggcaagtttgatatccaatttttttcttaatttatgcacgaagtaaattaataagggtgtacacaagcttagccatggtcataaggaggatatgtttgtgcttaggagaaaaattaccttttaaaattacaaatgtatttttatggctaattaagatttttgcccctgaatcttggtatgtactaaatcatactccctaaacttttaaggtcattgaaaatgttccatgaactattgagattattagatttaaggctaactgctaacagaacttgagtttaggaggttttaccaccaaaattttagaattgggagttagttgcaaaaacttgaccacttaaagaggttatgccgcaaattactctttatcatttaataaaattagaaagtccaattaataatttttacaaaatacaatgtctaaaatagtatttacacttattattattcaatgacattgttcacattatgaagttttggttcattaattatgtgtaattgttttcatcgtgaaaagactttaaaatgaagtaacacccctactcccctacacaaataaataagaaaatatgtagccaataatgaataatgatataaatgatcgtaaatatttgtgtaaccacctaacctagtgtacgtactaatgcttctagtgatagactaattcacataatatatatatatctgtttggtctaatttttttattggattaaatattgcgtacaattctgtttggtgtaattataagtgatcaaaacatttttgtattttttatttgagattcgaagaaaaaaaaagtgccatatatatgatatattagtaaggaaagataatgaaattcaaaccactggcctggtatcaatatttacaatcttcattgatatataaatacatttttttatttttttattttgtcatttttttaagttattagaattataaattattcatttattttgatttgagtgaatagaagtgatgagttgtttttttaaaaaaaatgatgaattgcgtataaaattgatagaatactattactgaaccgtaaagtaaaatacattaattacttcttttattattcatttattgatttgaagttaatataggtaagctacctactttttttttttttttagaaaattaataatcaaataaacaaaaattgaataaggaataatgattcgaattttacacgcttgtgtgtaacattattagagatccacacagctacaataatataatatttaacattattattgtacgtataagagttatttaatattaaaatatgtttgaagaatagtttaataccccatttcaaaaaagaaaagaaaagaaaaaaaaataatttaataaccggattcccatcatgatttagatttattttccaattaaaggactcatatggttttggttggtttttcaatatctatgcaccccacttaaatggttatattctaattaatttttaattactttcgcatttataaaaaaaaattagattaattttttttataattatatatgttataattatttaaaaatttagaataatttataatgtaaaaatcaatgttcaaacaatttatttcatacacatataaaataaaaaaaatcacacgtgtaataaattttatttttaacatgctaattttttttttgaattcctcaaaatttagacaaatgtattaaataactaaaacttatacaaccataacaaaaattggactaaatatttttattaaataccaaaataaaagagtacatcaatgcatttattttaaagggtttcaaaaaattgtattgtaaaattttacgtaaaaaaaaattatattttattaagtttgttatattattttataatataataagtgtaga

SEQ ID NO: 37044 - DNA, 5636 bp, Cannabis sativa
aaaaaaaaaaaaaaaagttggcattgaaactgagagtgagtcaaccaaggtaaagctcttctctcccaaaaccccaagtttttgcatatacagctcccactccctccctctcatttcactgagaagctcatcaaaataacccataccaaaccaattacacgtttctttctttgctattacatattgtgaagacgatggttgaacggaagctcttcaagacgaaactctgcgtcttgcatcagaaaggtcggtgttctcgtcagaattgctccttcgctcatggaaacgtggagctccggcgtttatcaagccctattcatggtaaattgcttcagccttcaggcaatgtctaagcaacacatcaattcattaaacctttgtaattccagttttatgcattttgttttgtcgttctttggattggttgtgggattcgaattaggacctcaggtggggttacctctagcctaatgattggaaccaatgaaaagaattctctaacttgttaatttctgccataagatctttccttgttattcgtaattttgcttgacagtgctctatgaacccccttataatagtagtttgcaaggattgtaatgtatgccagaagacccgagctctattgttttcgtgtgagtagagatgccacctgatgtcttggccagagacatgttcagttattaaaactgagagggttgctgtattgtatgttcaggggggattttgctggttagttacaaaatttatggaatttctgtggcaaaacttatcatcgttaagcatcctgagtgtgttatctttgatcaggggtaggttgttgactttttctggactatattttctctgttcttataaagaccaaaaggaatttggtctatgttcaaatatctattatccagttcccgccatttttagttgtcctgtgggtcatgacattcactctacttgttacttattccgagatcacaccatcaagggattcctatgatgaagaataattctgtggtgatcaattaattcttttcttggaatatttgtgagaagaaacaaagaattgattatatatgtcaccttggagaaatctctactcaccacttgtatatattcttattgctcaacaacaagacggaatgcctattcttctattcaatgattctttcttgtatgaagtggtcactgtgtctcaatgtataaactcaaacttgtatgtcattcattgtatgacagcaataatttctatgattactttggaaaaagcaagaaggtaccattgttgttcgttattatgtagtcatgctattccatgtatggtaagcttagatgttgagccttgtttctcatgataaacactgactcatttaaaatctgccttatgataactttttgttccacactttaggaaggaggggatttgaagatggtgacttaagggataaactagatagacggcattctccacgacaaacatattcacctgatagagacgcaagaggtccatctaggtctcttgataaagaaaggtgatttctcttccccagttttgcttgtttgtttacttgtgtctgggattagtcttttaggaatgtaaagttagttcttttgatgtggtttggattataaatattaaataatggtagaatataaaatatagaaaataatgaagtgaaaagtcaaacagtagactacataaaatttagttttaaaaaggttgcttaagcaagagggggtagctcaattggtgaagcatgtggtttgctcaaacaaggtctgatgtttgagtcatccttggtagctacgtagcaattgctgtagttgtctaattcttaaatactgtcgggttaggtggggatccttgtccaaaaaaaaagcaccttgccttgcttgagggttgatctcttgtacgattgtagatgctcatatgctcatatatgggccatacacacgcacacacattaactcactttaggatgttatctactggtgcagtcctcttgaacaaaattagacgtgaatattgggcatatgaaattacttattgccattacacttggcagatttattggaggctgggttttgtctcattgtttgtaaaggttcttctgtatatcattggtgaatagtgtatacaatgaactttttatttttctttccataaaattcttttgagtgatgttcttttgttagtgttactcacttaattgagtttgagatattaaatagtgacagaaaacataagaaaaggcagcggttagatggtcagagtgacggatctggaagtttgagaatatcagatggtgcaaacgatcggggtaaggaaggaaagtttgcaagtgattcaagaggtgttgttgttgagcaggtatattttttatttaatctcaggataagacacattcctatagttatctcaagcttttctgttttactgaaaattctcatatttgtgtggtttctggggtttgtttgcagctaaagcaagtgcaggaagatatcaacaggcttgatcaccaaaaatctcaactgggggtctgtttcagctttttaaagttgaatgttgtaatttattttgaaatgaaataatttgtggtctttaattgaaattattagtggggatgctgattagtttcactaaggtattattacctatagctattactcatcataaacttagtaaaatttactcctgactttctcatgttctcgctactttagctgtttacaatctctactttatgttattctctggtcaatctctgtctttaaaccccaaaataaatgtgtctgaatctgcaatcctttcctccttaggagtgttcaattttaatttggtatatatttgctgaccactaatacttctgttgttcacaggttatagtagaagagagggttcaagaagtggaaagtcttacatctaaaattcacgagcttgaggctcagctacacagagaaaaagaggaaaatagaaggtataacaaacctacgtggaatttgaaatttggtgcaatttccccccattgatggctagctgtcttccttccctttcctaagctattgtaatgtgcaggatcttgtcaaaaatcaacaagtttgtcaaggcacatgatcattgtatacagatacgagatagactgaagaggtaagtcattattataagttattattttgttgtcgtagttatctaccatttgtgctccaaggaaaattttcagtcttgagttatgaacataatggcatattggtttccggatttaattaaaatttcgagatatagatcagaaactcggcttcataagttggcggatgagcttggctccgatatcaacaaaattggtgccaatgaagaggattcaaacattaatattgtgagtgatggagaggtagctggtttccctgtcaacccacagagtgagcaacagaataatgtttctccaagcaacagaaggctggatggtggttggggtcccacagaacaatatggtattttacttaattttgtcaaccattaagtttctttagatttctcttttatccggtttctaattaatcagctactggaaatttgcttgcatgattctgaagtatatgcaaaagtttaatttactaatttcatttgctatctggtgaagtcaattcactgtaacataagaaatagatttttcagttcttagctcataatttgctactcttcaatcaatgatgttctagctgcatgcttatatgtgattttctcatgttacattccacattcgcttaaatctgccattattgcaagtgttatttttaagatggttttcaacctgttacacttggtacacaccagccgatttagaaaatctgcatacttatgtgacagccacagtgaagagagcttctcggtggaatattcctgctcaatcaaataatgacaaggagattcaggctgtggctactgggaatggcagaccaagacccatctcaaaagaaggaaaacatgagaacaataattttgtcaatcttgggtcagcagataaggtgcatcttttgttctttgttgtgaacttgttcttgcagtatgaaaagatggctgtcttattttccaatatgggagctgttttaccttccagcatagtctgatgcaaagtcttcaggatgctctttaactttagaactttgtaatttatggtatgggttggatacatgctctccttgatcgcacatttgatatatttaaatatgctgagtaaactcagttatgcatttttaactcttgctgattcccagaatgagattaatactgttgctattgtgctgaggttaagctgttagttattgtttctttaccaatctttgcattttactcttgtggtaattaaatctgcagcagaaaaagacattggaatcaggattttcgcaaccatcaaccagcatggctgcccatgcaattgatgaagatgtcgacattgaattggattttaatgttgaagcaactgggactgattctataagggttgtggatgcatatgagatagatggcttgccacttgcacttcccctacctcctctgatcctaaaaaacaattactcgcaggtcagcggttgcacactttcgtttccttccatgaaaacctctttcttaccgaacgagacttgtttctggcttctatgtcattagaattttccccagtgtacctatgaatcattctaattcaattattgatgcttttacagtatgagggtaacgatgaggacatagacgtggatggtgtcgaggagatggagcatgttgatattttaatttaaagattttgaaaggtcaaaggttctttgccgagcagtgtacaggaaatatgggtttttaaacagcaagttaactaaatcttttgttttttttcgacaagcttcagtgtagtctggattgatgtttgcgttcatattgtcgatcttactattttcccttgtcaaatcctttatgaaggttccattttaaaatatataaataaatatatgtatatatatcctttatgaaggggaaacttgattggtggtgataaaaatacagggttcaagatttctttccataaccactcaacctaggccttttacgctagtcatttgactcattttctcaccaaataccaatgatcaaaacaaaacttaaataaaaattataaagtaagcaattatgattctatgaagggaacattctaaacttgtgtactacaactcgccacttctcttgaacaattgaactagtaccaagagaacccttttgaggattcataatctaactctttgtactgtataggcagatatcaagaatgtagatcactgaatatagcttaagtttcttctgctaaacatttggggcacgtacatctgaaaccatagtctgcaagtgatgcctgcctctcttcaagcgtcagatcttcatctacatatgagatggtaatctggaaaaggaaaggactttcaaaattaaacatattgaatcataaaacagaacaagaccctataaagatggactttgactaaaataacacagcattgttataggtgttttttcttttacctcttctcccttgcagataggttttaatgcaagtattgttgcttggccatctttgtcctgcaatgaagaacacacaaaattgtga

SEQ ID NO: 37045 - DNA, 4569 bp, Cannabis sativa
aaatctactcttttgaaaaaaaaaaatctacaaagtattaacattagcaggcccgatccgaggctaaggcggactaggcccgtgcttatggcccactttaacctaatacccacaatttttatataacatatttttttatattgaaaaaaatagcctttttgaaaatttttgtaatagaggcccaataatatttacattttactttagataaaacacaaacttaaatttttttaaagcccattattactcaaggtcgacgctaaacatagagtatttgaactacaaatatcttttttggaaaaaaacttattattttaataaattatatttaatctataattaattaatacaaattcccacataaaaaaacaaaacacaagaattatcaaatgtcatataattatttaaatgctaaaatttgttccaatctatataataattttatctgagatttaagtaaaaaaatataatatatattgtttttaaaaattattattttaaattttcagtataaattttagttagcccaccctaaaattatattctaagtccgccactgaatggttatacactagtatagtatatacatacatattacgtaaccttaagcgtgctgcgactggattatgtattgattttgccgaatcaaataatccaaccggtcatgagtggcatgagtatgcacatcgatggacgcctcaatttgcaatggtagagggtgcaattcacttggttcagatacaacatcttcctcatctttaccttcttcaccctcagttgggtcattctcgttatgaagcttgcgagtctcttttggaggagtgagggatggctgggggaaatcatagaaatattttcgcgaaatcatttttgttgattgtaatgatatccccatccatagactgtgtgccacgttgacagcgcaaggctataattagagcaccatgtgccattctacttgcggttcacatttgagaaatgaacttgaaatttctatatatgaggcggccaatgtcacaatctagcttggtcataatagcaaacaccaccaaacatcaatccacagaagatacatgcaatgtgggcaacaaccaaacatttacgaagtacacccatgccctagcttgctccaactctccatcaccatttttttgaaatctttgtgttcagtctagaaattaaaaaatctgaaaggtttgaaacaaatatcttagactacagatgaaaagaccacacaagaacaataattagacacagtctttcaattcatattagtagaagaattaggaaacatatttaaccactctttatttttgagcacatgctcaattctcgagtatattcggtccttagtatcttgattattagattaagtaaaatgtgatatggatctgtgcaatctgccagccaaccctaaagccagcaattgttcgcatcttctatttcagctctagtgatctgattagccctacatttgtcaccatattcaaatactgcattaaagttccccattataaaccacgaattatctggaaactgaagcttagacaagccaatctaaagcaactttctctcttctaaggtatttgagccataaacaaaagtagcacaaaactcactcgtataacaagccatcttaacaaggaaatgaacatactgatttgtttcttctaacacagagactctaacaaacttattcctccatataagcagacttctatcttcaacaatcggactagaatgaaagttctagccatggaaattagctaaaattgcatcaatcattttattacctacccctcatcttagtttcaagcaaagcaccaaacccaattctccttattctacacacattaatcatagcctcttgctttttattactattaaggcctctaacattccaccttaagatattacaattatcattagttgaactctcagtaacaatgtcacttttatcacacccatgctgtaaatgcagaatatcaaaatcattagaattaagagtcttacctcctacatcattcaccaattgaacacttttttagtcttaccttccattcttttctcactttcccttttccctccaaactagcttctcccttagagataatttctccttgatcaaaaacctcatcaacattaggagcttctttcaaattttcctttgttatcaatgactcatttaccaactctggacttgctacattgtttcctggagcatcaaatatgatccctttctctatctcatcagctttggaagactgatgcatagtttgagcttccaccttctttaggcctgaacttttttgtgtacttcctacaatcgaccataatgtggccatagccacgacatgctttacattgaacaagaagccactcctagtgtacctcatgctcaataagtttaccatgttcattcaagaattgaatacttatcggtggctcatttgttatgtccatccccactagcaccctagaaaatttaaccatgtaactctcccttgtaaccctatcagccatgattaatttaccaatcatgctaactatagctcatagacacttactttcccagtagtaacgtcctagatcatgtaatcaaatctagaaaggaactgattttacaagacacaatgctgtaaaaatggttgtccacagtcgcacaataattggctttcaatcgaatcggagcactccatccttaaaaataagatctatgcaatccctattttacccatttgcatttaataaaatcttcgaaaacaacaaaaagaagattagctcctaacaccatacacactactgctacgctcctcattgcggtttgcaatttaacctcatctaaaactacttgagctattttcttactgtcttttaaaatgggttctgtataggtcagattaggttctttgaaagaaattttaccttcagtgaatttcttccaatgttgttgagagttcaaatggaattcctcctgttcgacctcttcagcccaactagatttctcatctcaaatctccttctcaatgctattctcttctgtcatatcatgatcaatctcgataatacatctccagattgtaaagcttgagtaaccaactcaaggccttccaaaccaacattctcctctgaattattcaaatcatctcggattgaagggggtccacgagattcaatcgagttacaggctttcgaatcactcttttcttctttgccatggaagcgagaaaatgaccacaggtttgtgattgttgtggtgagtagtctttcattttttttcctattaatatatattggttgttgcattacatcaagtataacggtgaacaataaaataagataataaaaaataataaacaaataagaagttgtggctctataaaattaaataataaatagatgaaatatttttcactcaaaatttttttgatcaatctcgattactgtagatctcattcacttgtgatagttatgacaactttaggtaattacagagtgtttcaaacatgttcaacaatcgaattgtcactttgggtattttaagatcaataattgcaatataactaagattgtatattaactctagttatcaaaagtttttaactggtctagaaattattgtcaagtgagctcatttgtggtagttcttactttagttaaatgattagcgtggtacaattttttttattttttatttttagttgaaaaatttagttaattaaatatttataaatttctctccaatacaaaaaataataattaaaaaaaataaaattaaatgtatattatacccttaaaaaatgattcaaatacaaaaaaaaaaaataataataataataaataacaaaaaactataaagtgaaaatgttaaagactcaacttatgttgcctaattaattaggagaacttaccaaatgtatcacaaaaatttattagttatataaattgattcttataaatttatattttattgtgtatgatatataaataccaattatgaataatttaaaaaggcaaaaagaatctaaataaaaaaaaataaataaattatatgttgtcaaaatgtgatagttataacaattttagataattatgtggtgttttaaacatacttataacagataaatttctagtctaaatattttaagatcaacaattagattgaccatgatactgttactagcatactgaaagggggaaagccttgtggtcaggggattgatagatggatttggaccaaggaagcgagcggccaattcacaacaaagtctgcttacttaatacaggcttctgagagagcccctgcctgtgtggttgcgcctaccttgtggaacaaactttggaactccaaaattttagaaagacataaatttctttggtggggtttcctttcgaatgctctacctgtccgtggtctcctggcaagaagaatcctgattgatgatgacctatgcccattgtgtggggagacgccggaatctatggaacacctgttcctctattgcaactttgcttaccatctctagagatcctccccttgggggttgttcccgatccctgactcgggag

SEQ ID NO: 37046 - DNA, 10666 bp, Cannabis sativa
  modified_base (5281)..(5292): a, c, t, g, unknown or other
aatgtgacaagtgccagagatttttgaagataccttgagttccacccaatgagctcacgatgatgcaatctccttggccctttgtagagtgggggatagatctaattggtcaactgccaaagggaaaaggaggggtacaatttgctatcgtggcagtagacgccttcaccaaaaggaaagaagctgaactcctgtcaataatcacctccaagaaggtccttgactttgttgtcaagaacatcatatgccagtttggccttccctagaagattgtgtcaaacaacggaaagtagttcgacagtgatatgttcactaatttttgtaactgacatggcatcattaaaagcttctctaccgtggcccatactcaagcaaatgggcgggtgaaagctgtcaacaaaaccctcaaggacaccctaaagaaggaccttgaggtagcgaaaggcatctggcctgaactgctccaagaggtcctatggtcgcataggactaccgagaagatggccactgggaaaactccatttgctctagcttatggctataaggaaatgttgcctgtagagctagtgccaccgtctcataggagaacaacctatgaccaacaaacaaatagcaccctactggcagagtcccttgacgaagtagaagaaagaagagaaccgctacaggcctactggcaaaaggtggcaaggtacttcaacaaacacgtcaagagcaaaaaattcttcataggagatatggtgctccgaagagtgttcgtaagcactaaagactcagcggcatgagtgtttggacctaactgggaaggcacttatcaagttacagagataactattaagggagcttaatagctaggaaggtacaacaagaatatggagctcattctgctaccaagatactcgaatggagagtaccttcccaaatactatcagtaaccagcttagagaactctactttaaagtaccagttctatctactcaacattagagtacaaaaagcgctagcacccacgaccctttttgggcgtgatctcccagcgttcttcaatagtgacctttgctttattaggcgagcaggggtagccacttaacatccagaagctaattttgtgtaatataagcttgtagattcaatttatgtaagttgtacaacaacaaagaccaattaatgaataataaaaatatttatattttatttattgtgtctatgaaccacttgctcatagattaacttcttaaagttaatcttttagttccacatgcgtactatggtaccctcgcaagacagaactcaaacgaagtctgtaaaacttggtgaatagcaagtgaccaagagactagtctgtatggtcacttgggggcacccatactgtacaatgcatcgaactagcacaaagaacttatgtagagaaattttaacacttagtattagctactaaacctgcctctaagtcgtgcaggcatacctcgacttagcaaagtaaatccaaacccttacttgtgaaggccataagaagacagccaagattaaagattgtctggtcggtcacacaatccatgataataaagtaacatggccaaatactagtagtgttcaaaaatagagggcttatggccaaagatacgaacatgaaggcactggggctgaaaataaaagtaatgttctaaaaaggcctcgggccacataggacatggaagtaaagttctaaaaaggccacatgccataaaaagccacacgctttgcggaatatgaaaatattgtctatgtgatacatatacaatgatgaatgctactaataaaaatactgtctaaatgtgtgcaggagctgagtctggagtcgtgagattaagatccacagagtctagttcagccccatcatcaccatgcgggcggacctggtggttagtgtcatggctggccacctcctccataggtgggtcggccaactcctcatcgtgtatccccgatgatgacccttctcgataggtaagaacctggtctgtctccatttggctctccagtaatgcctttccttgggccaacaatctctccacaaaagcttggctgcccatgtatgacagtatagcacgagggttatgcaacttgaactcataagtaagttcagaggacatgtcaacatactcctctctaatggcctgttggccatcaagaacctcttgcaacttcttcttgtgatcaacaaggtcaatatgcaacccagagatgagggcagtctgggcagtgttctttgcattcctggcgttaagcatggtctccaagccagaaactattctctacctctttgccagaatgacctctagctcaaaattggctttgtcctttgctacaagggaagtgtccaatgtcttcacacgttcctaaaaagcatctgaagatcccctagagccatcacgaggtgagctcagtattatcagggcctgaaaataaagcaaaataacattagtgtcaaagaccacaacgttggccgactagtccccccttgggactgccatgctctgccagccccccacataagcttccatggctagccagccacatgcaagaagccacatgaacgaccagcctacacagtgccaagaaaagcctgtcaggtccaccgtcacccaactctttcagatcctcatccaagaaaggaagagccctctctatgcaacagttggctgccttagcagccctctatctagagactatccccgttgcattgctgggcctcctagtaccttggtcagtaggccgtatcacaggctgttcggctgatgaatgtcttggtagggcgaggcagtaatggaccggcaacatcctcaccacgggaagtcctggccaccttggccctctttcgtcttgtaggctcatccgaaggatcgtcagtgagtcctctcaacctggagcacatatgtgcaaaacgaaagtagcaaagttagaaagcaatcataaacactcaataaaataacaaaggcacgatgttatcagctatcaaataccatcatcatcagaagagggactattagagtcctcagctacaactttacccctgcccttagatgcgggcacgggacgagtgggtctcccagaaacctagcctctaggcccgatatgaagagaagcatcacctaccggaccctcgccggcgaggcactggtggagagccttctctctcttctccaaattccgtgaaatacgagacaaaggtacttcatcatcatctaatccaggagcttgcccatttccagggaacttgtgcaacctaccatacagacatgcataccttattatttgaatctgggaacttgtgcaagtcatacttcaacacttgcgacaatagtaatttttttgccttatttatgaggctatatataccctaactatattctgatgaaagggtcagaaaaaatagtgtaaaacatcctctgtaagaaaaaaagtactatattaaatagaaatgactcgtggactaaggctcgttaatgcccaaattacgtaaaaaatatttgcattaaatctcttctaatcattaaacaactctatctaattagttgccaaaaatctcagtcaacacatatattatgaggtttaaaagtctaaaattatttatttttattcaaaacataatattctttactcttattttttttctaaccctatgaagtcatcatagtgttattattaaaaagagatcatctataattattatatgcaaggtatattattgttcaatttcaagttttttttttttttttaattttaatattactcatggtatattattatgaaccacatttatacttgtgttagtttaatttattgacttggatacacatttttataattttattagtagatggtattttgttttgctgcttaactattattagttttgtattattagcttaacaaataaaaagtaaaaatatccaactaaataaaaattcttaatttttaatctataaatatccttaactaaataattttcttttttcattttttaatctattagttaataaaaataaataaaaaataattttgataataaaaaataaatatcttcattaattattgaataatctgttgtttaaatttaaaattaaaatatcaaatatttatttataatataacaaataattttttttaaaaaaaattatcaaaatatttattccaaaagttttaatctcatatccataaagatatatataaatagattctttctatttttacactaaaataatattacaaattattataacacaaataatgcttaaccaattatttttatgtaaaaattattgccatattatatatttattattttttaacccttaaatatcttattaactactataaaaaatgcttttatttttatcattttttttataatattatgaaaaaataattaaataactaaaactatatatatgtatatatatcgaagccttttggtgtgtttatataaaactatttttttttatttaattggtatttggatattattacaatatcaattatgaattcttggaaattaaaattatacttaaatgaaagaacttttttagtttttaatttatttaaggctaaatgaaagagtcgagttcatggtttatgtaacttacttcattatctttttctccctcacttaatttaatttcttttgattataattattttattttgacaagaaataattacatgtgtaaatataatgtgtaaatatatgggtgggtctcctccacaaaaaatcatacataagctaatttaatgtatattatgaactataaatatgatatgatgattgtagttggagagatacaaatgagatataatgattacagtaaaccagatataaatgagatacagtgataataacatgaagagatagaataatcgataaagactttgaataatataaaaaatgatgcattataagaaaaaaaaagtgtttaatgaaataataataataataataataataataacattctaatttttctctataacatcttattttaaaattttttaatttattttttgttacctaaattatctttctaaattgtaccacacttttatgttaacaatttaaaatttgatttttttaaaaatatattaaaaaaaacattatattaataaatagtaaatgataatataaggaacaaaactttatcaacctcatagaaatgataaagtataataattattattaatattaataatatagtaaataatcttaaagataatcaaaagattttttctaataataataataatnnnnnnnnnnnnaataataataataataattgttaacgtagatttttgttgatcaataatattgagcctttttcattataaatttaacacaaatcttataaaaattaataaaatataataataacaccaggtattttacgtggttttgcagttaaatctgcatactctacgagtacatcttattccagatatttttgagtgtttgatacaatgtataattagtaatcatttttccaaagatttttttctctcttttctgtcgaattggcccctatttaaaggaataaatgttgatagttatttacatttaaatttgaattacataactgtttactgaaacatgagaattgatcacgtttcatttaatcacatatgaaaaataattgataactgtataactgcttatcattcttatatttacaaatggtttatgttgatttgaacagcgatatctcggtttgcctatagatgattaatgctgacttggttgatcatatgccttccagcaatggcatgagcactagtgtattgagcaaacttaagaacttctctttgaccataaggcttcgcagactggataatcatatcctgcatatttccaagttgatacacttagttgttataatgtagaaaatacgctaagtgtttaataaccgattcacctcgtcaatattctctagtgtatagcgaggtggatgcctcgctatatattgtccgtgattgattcaggtaacttcacttattcttttgaatcttgtccatgaatttacatattctgaggtagaatgttctctcgtcaatacatgaattaatagtttgtgtatccttgtctcacctaaaactatacagtcagcaagttatgaatatactctattaattctatatttaatgagttattccctttttgcattaaatgatataatcgttattatatatggcggttcacattccacttaattgacacgtgtcactctctgaagtgtagctgaattttggatataacaatttccccttaaaaaatattttttttaataaaaagagctttttaaatgattataatggtatatttgtcttaacccaatttgaaaaattacatgtttttaaattttggcggttcatgattttgaggcacatcattagcatttatgacccatcttttccaattcttttttgttcctatccgttggatctttattttttaatctaacggtgatcaatctcaaggtataaaattgaatagaaaccattattccactatttctgctttccaaaaacttcaatttgttcatgcgaaaaccatttctgatttctctaagctttgcatgccctctttgtcattgacatattttctgcgcatttcttcggatatactcttcaacctcaggaatttatagaatttatcacgccacccatctcaacttcagctgcaaagctttttgtcgtgcgaaaaacccacttcgaatagtaagtaatttatccctttttctctggtcttttcttttcctgagttacgacccttattttgtaattaattgcatctttgtttgttccgtttggttttagcaatttcaatttaattttctaggtaattttttagggtttaatcagagtaaaacttaggtttatcgtatttacaagtttctggttttaataaatttcttctatgaattgagattgcttattttttttgtgtgtaaaaatgtcctaatctagttttgaagtttattctccagaattcttagaaatagataaagaattagccctcccatttaaacccagaattcttaaacctcaatccaactgaaataaacgatgcaaaaatttggcaccatttaatgaaaaccaatcaagaggaagttgctagtcgctataggcattttctacaagagataactgagggtaaacgtcgttacttgcgagatgcaacctggcctgaacctttgtcattatcttttattcctttggctacacccttatttttacacagagtcactattgctttttcatcaggtgacctcaattttgaaattatgtctttcaagcctcgtaaattaaagactccctaggaccatagtgtcacatttgaggctgagcttatcgagtctagaataagagccattggtgattatgttggtggcgttctaaggatttgtggcatcaaccaaaggcgaggatgccatgttagatttgttgcccctggtgaattcagttgctatccaccagaacgcaattaccttcgaggaatgtggtgaggccaatactagtagctcggttgggataggcgcttggagcctcgagtacatcaggactagagcaattctccccctgagagagtaatttaaagaattcattaatcatattggaatcactcctttccaattggttccaatctcctatagaatccttgcaagtctaaaggttctgtatcacattttaggatgggagtgtcccactcccctggaaattgtttatttttattcagttaaggcagttcttgtgaggatacattgtgcatgggacttttattatctcgggactcatacaaatgatcataggatcatcgtagtattaccaaacatgaccacttttaaggaggatttcttcttgacaactagtctttccccaatcaacacaaccacatttcgcataatacgtaagtaagctttgtctcaaaaacttggttttgagttatttcatatttttatcctcaaacttgctgatttatttcatttatcatgttgatagcggtcttgaaaaggcgaattcctactcctgagatggagatgtaaaattctactgggtcttccatttggactgcgatcgactgagttttttcttaacgaagccaacttgaaaactattagctttcttgcctcagatgaatacacttgtgattacaagtttccaaagtattcttcgtgagagaggttcccagttccagccgacgaagagagccaggattacgtggctcacatacactatctcgagagagtagcccctcgagaagctgaggaaggtgcctcccgaggtaatcaatgcggatggtcaccaaataagcttagggaagaacgtacctcgttagtttcctttcaagatagtagatataatttttatacttggaaccctttgttaatatattgcataccccataggtttgatagctggtacccaaggttttgtgtccaatttagtttaactagttcattctatggaattgctgagcaatatcagaccaacttggatagggcgaggcactcagattcagattgggatgtaaacccaattaatccttacgaaatattcatgatcacaggatctaggaaactcagtgaatactatagtcctccttcttcatcacctggtgataatagtaacattctttaagagggaactaattccccatttttgtttttatgtatttttgataaagtattgatgtatttcgttgtctcgtagatatggatctagaaaatcttttcaacacttcaagaaagaagggaaaaaagaggatcgcttcctcggaaacttcattagagaacatagaacccctcaagagatccaggttcaaatccacactctagccattgtacaaatcgagcaactagctcaaggttcaactcatcaagcttctcatcctcgggtaaggggcagaaaatggttctacttgaaccttcttgccccttgccccttgaggcggggaacactggctcggagtactgcttgcagttgaccacttcctgctagcaccattttaaatccttctagtctggtgactgtaattcgattaataatggtagccctgaggagatgcttgagagaagcctcaacgttaacctctcggttagttcccttctccttctctttttttttttgacaattctttcaaattttcataaaatttcatatgcatatttttccttgcaggcctcccttttatctcatgttgcccagcgtcgggttcttcagaaggttaagcagtcagaaactgaccttcacaaatccattgaacaacgcaaggttgtttccaaataatggaatgatgctcaaaaggagatcacccgactgacaaaggaagctgaagaggaaaagaggaaaaataaggcagaacttgaggtagcctagaaataggccaaggacaaaggtgaggcttgccaaaaacttcaagaagaactcgatgcagccaaagcaaagcttgagggagacgagactgatgccaaggaaaggtgcaacgtcattgcacaacggtccatttatagagcatggatggcaaaccttagcatggacttgagcttcctcggtaaaagtgctgaagaagttttggcctactgcgtgcgggcaaagaaggcagaagaggttgtagattttgaagaggaagatccgtccaagtctcctacaatgtagacttggtttttattttgcatatatttttttctttagaaaaatggccttttggccgagacaatggtttgccccttgtggctttatttattgtaaagacaaatttgtattgttggacaaccaactttgctttttaatatctatcttctctttattatctcgaatcttctgtttgaattcaatacacttgtttatttgcgttctatttcacaacataaacaattatattttgatccaacttaagatattagaagaatgcatttccattgatctcactttctaagtagttattaatctactatgtttgggtgcgagcagttatgttcttcctatgctttttagcttgcgagcggttatagtctgccatattatatgtgagtggttcattttttatctaatattatgtaagaagtttatatctgccacatataacttaaaagcaaacttaaacattctaataattcattttggaaactactttgtacattttttttgattgcttatatgaatagttaagccttctatcaatattttaggttaagtattattttttcaaggcatctttgtgcctcgtttataatacatgactaaataacacgagtcgttgaatattcaacctcgcatgtagctttatgttgttttatgagttaatcttatttacaactgctacctcgattttcctttttgatgaaaaggttcaattttttgattttatattgttcatagacaattttaatcaattaaatttttttaaaatgggtgggttgcaatgtatcatttatttctagataaattaattccagttgatgtacacatatatatgcccctcaaataattttaaagaagattttgtaattacttgaataaaatttaactttattaataatagaaatttacattctagatagagaaatacaacatggagattcaaaatttactagtaatagggtctcaaatgttcactgttctagtggttctttattagcga

SEQ ID NO: 37047 - DNA, 2056 bp, Cannabis sativa
  modified_base (31)..(69): a, c, t, g, unknown or other
ttaggtttaagatacaaaataataataatannnnnnnnnnnnnnnnnnnnnnnnnnnnnnnnnnnnnnnataataataataataataatcattcaaaacataaatatctctttacttatcattttttgactatatttttaaaatatgtttaagagcacgtgtctttcgtatttagtggactcggatcgtcatggccacacgaggggagccaatcgggtccctttcgtgccaatcaggtcgttgaggtaatttggtagctgaggagctctttgtgccttagcaactgatgcagcaaggagcttagtgcacctaatgtgctccattggtaggaggtgtaatgtgccaaagtgttccattggtaggaggtacaatgtgccaaagtgctctattagtaggaggtggaatgtgccaaagtaagtggaatgtaccaaaatgttctattggttagacttccatatctaaaacaaaaattcatgcataattatcttagattttttgaagaataacacttgttattaatttgagatcccattatttctttctatttttgacaatgataaggttattataaattttaaatatacgaagtttgatgtgattttttgataaaagtagggaaaaattttcaacatatgatgtaaaatatagtaattgttttctataaaaactataactaattattatataataaaataaatgtaatgaaaaatgccccacatgctaataatactaatataacatcaaaacaaactcgaaatgacaacctgaattgtcaccacgtgccctatcccctgtagaatgatttggttcgaactttctttttatactataatttttttcttctaagagaatgaaaaaagttattgttccttcagttaaatttctctttcattttttaaaacaacaatatcacttaattaattcgtccgaaatactatttatttagtacaactaaaaatctttgtagaatatcttttacggtctcccccacactaaaataatcgaaccttttaaaaaataaaaattaaaagaaaaaaaatcatattacttaaaataattacatatatcatcttatttattatttattgttaatcataattaaagtgtgaagatacatacatacatacatgcatatgcagtagtgtagtagtactagtaccgtctcaactctcaagactttaaaagccacacacacacacattcaagtggacatttattgacatttcttgggggttctttttggcttatgttaataaatcacccacaccctctctatggcaccccatttcggtatgcttatataaatatgggatatgattttgtacattaacagaatgtattccgtattatattagataggtttcagggtacattaaatgagtgtcatggtacgtttttactttttaatcctaattacccctagatcaatctcaaccgtcagatcaaataactctctcatctgacggttgccgtacatcacggattacaatccgtgaaagtataataacgggacaaaatcatatcccatataaatatataggatttttcttaggtgagagcactatttttgctcttaccataagagtattttatttcagttttaattgatttaaaataaaggtatatagaattaaaatgagatgtgaaccatgtaattaattatttcattattattttatttttatttttaactagcttttaaaatagttattttttttataagttaaaacaattattcacaaattaaaataggatcattttgccaagtttctaagacaagtaattattattattttcttcttcttcttccttcattttatcatttctttaaatttagatattgtatatgtataaaatggttttctagattttctctagagcatgttggcataactagaaaaactaaccaaatcaaaggatgtgtatactaatcatctaataattttttttcctattcatttctattttttttaataaaaatgaagaatttgatttaaaaaatgaaaaacaaataaacaacaaagtaagaagtaagcatagtgttctttttcatatt

SEQ ID NO: 37048 - DNA, 5286 bp, Cannabis sativa
atcttcttctttgtttcatctttttcattatctccacctgcccatttccttatacaattctatgaaagccttcccaagaaatctcaacatcttttaccatggaaactctccaattctacttcttcttcttcttcttcttcacactgtcaatggtttggagtttcttgttacacaaacaagagttttcaatttcaagtcaaggctttgaatttctcaggcttaatcttgtctggtgtgttgaacaattccattacttatctctgtctccataaagggttggtctctcttgatctaagtggtaacaatttcagtggtgggattcctgaacagcttggaaacaactgtggtcaactcaagacacttcttcttaatgataacaaccttaatggaacaatcccaattaagctttttcaatctaataagagattagctaagcttgatttgggatataactcactctctggtgatatacctgctgaggtaagcttctgtatcaaactagagtacattggttttcataacaattacttcacaggacaggtaccaagtggagtcttttcattgccaaatttgaagttttgttatctaaacacaaacaacttaactggttctttaccagattttcctcaatcttgtgaaatttctgatctttggattcatgagaattcattttctggatcattaccaaacactctgagcaggtgttataacctcactgcttttgtagcctctcataacaagtttggaggagttattccactagagatgttcagtgatcttttccaactcgaaattctttatcttgattcaaacagtttagaaggagaaatcccggaaagcttatggggtctgagaagtttaaaggagcttgttctttcagaaaacaagcttaatgggacaatatctgagagcattgctaattgctctcagctgaatacattagtactctcagctaataacctttcgggttggattcctcattcgattggagaactcgagcatttgaagagtttgttgctctttgataacatgattaatggctctttaccatctgaacttggaaactgcagttcacttactgaacttaggcttcagagaaacttcattggaggagtgatcccgaaagagattttcaaactcgagaagctcgaggttctttacatgttcaataacaagttggaaggtgttattccacagaacatagggacaatgagcagccttgtggagttagctctttataacaacagtttgagtggtgaaatcccatctgagataagccatttgaagaaacttgagtttctttctttggctcacaacagactcaccggtgaggtacctttggagcttgggaaatacagctctcctggattagtgaaactggatttgacaggtaatttgctaactggattgatcccttttgagatatgcaacgggaataacctctcggttttgacccttggacataaccgattcaatgggagttttccaagacagattgcagcatgttcatcactcaaaagagtgattcttagtaataatcttcttcaaggaactataccagctgatatgaatcataattcaggaatttcattcttagaggttcaagataacttgcttgagggaacaataccttcagtatttggtgattggagaaatctcacaatgcttgatttgtcaagaaacaaactatccgggtctctaccttccgagcttggaaagcttcagaatcttcaaattcttagactttcatccaacagattgaaaggaagcatccccactgagttaacttattgcagaagcatcataaaacttgacctcagcaagaacaatctttcaggaaagatccctttagagatcatcacatcattgacaaagttgcaaagtcttctcctcgaacagaacagactaaccggtcctattccagacactttctcttctcttcacagcctcaatgagctgcaacttggtaacaacatgttacaaggctccattccttgtagtttaactgaacttcaccatttcagtacaattcttaatctcagttataatgggctctctggtcaaatcccgaaatgtgttggcaacttagacaagctacaaattcttgatatctcaagcaacaacttctctggtgagttaccaactgaacttagtaacatgatctccctaatctttgtcaacatctcatttaatcatctcactgggaaaatcccctctgcttggatgaaactagttgcttcatatccgggttctttcattggcaatcaagagctttgtttactaggaactgaggttaagaactgtgaacaggccaaagtttccatgaaaagaagccaaattattcccggtgtggttataggcgtggtgatctcggtgacacttctttgcactgtcatctatgctttagcagttcgcgtcttgacacaaaaacataatcttgatgagtctttgctgcctgaatgtcaaccaaaaagtgaattcttgccaaaagatttgaactttgaagaaattgtgcttgcaaccgaaggatggaacgagaagtatgtgatcggtagaggaaagcatggaacagtttacaagatacaatcgaagaactcgggaaagcattgggcagtaaagaaggtgaatttgtctgatagaaactttataattgagatgagaactttaagcatggttagacatagaaatgtagtgagaatgacaggctattgcatcaaagatggctatggttgtattgtaacagaatacatgcctggaggttctctctataatgcactccacaagagtgaacctcatttgtttttagattggacaacacgatttcgcattgcttttggtattgcacaaggactttcttaccttcaccatgattgtgtcccacaaatcatacatagagatgttaaatcagacaatgtgttattggattctgaactggaacctaagcttggagatttcgggacagcaaggatactagttagtgatttggaaacaagctctactcggtctgcaattgtaggaaccttgggctacattgcaccaggtaaaactgtttttctcaatcaatccaaactttttatgtaagaagattcaaaacttaattcatgtattgttttgttttgcaattcagagaatgcatactcaactcgggtgacagagaaatgtgatgtatacagctatggagtgatcttactagagcttgtctacagaaagatggcagtagatccaagctttgaagaaggtcttgacattgtgtcatggacaaggaagagcttagaggaaagcagtgattgcttgtgcttattcgacgaggaaataagtcattgggatgaaaacgagcaacaaaaggcgctaagtttactcgatttagcacttgaatgcacagagaaattgccttctatgagaccttcaatgagagaagttgtaggattcctcatcaaaatgaatgataggaatgagtagtaaatgaagtaaattgttttgtttatcactttggtaatgaaccaaataacattttggaacaatattggcccggcatattatttgaacttgaatgaggttgttgctattctaataacatttaaaaccattaaacatggtgtgtagtttgatctttttcctataaatttaattacaccaaacactacattaaattcaaaccttaacacttagaaactaccaaaccttaatcccatgataaaattttagtgatagaacaaatgttgtgtttggtgtaattaaatttatcaaaaaaagacttttgtgatgagttctactctaataacattcaaaacaattaaacattggttataatgaagttggtctcaccctaaagggaattcagatgtgtaatttgtctcaggttatagaatggtgatctccaaatgttgtgtaaggcaataaattaacaagtgatgcatatttgtatttctttctcccacaaaaattactaataaatgcatatgcattgtacattggcaatattggaacaagttcaaatgtaagaactaatttaatctgatgtaaaatgcagataatagagacatcagataatgaagacacaacttcattttgtttcaacttttctattgccgaaactcgtatatccagtgacctgtacagacttttcatttggacaaacagagagacgaaattaaaattaaatgttgtatgtgttttgtattgatatctttgctgatttgaattaattctagcattaactactttgacatcttttttgcttttgttgaatgaagaacaatataataactcttaaaatttctacattatattaactataaagtttaagagaatatgtataccaaattatttgaactttaataaaatttaaagaagggattcttttgcaatttttgtcacttgttaaatcaaacaaattatacaaaccatttttgtaataagagatgtgggacataacacacacaagtctttttctttaaaaaaaataaaataaatttaattacaccaaacacaatattaatccaaactataacgcttaaccgctaccaaaccttaaccccatgataaaattttataattgagctaataatgtgtttggtgtaattaaatttataaaaaaaacttttgtgatgagttctacactacatttaaaaccattaaacattgcttataatgaagttggtctcatcctaaagtgtaagtgaaccagtcagatgtgtagtttgatactaaaattcaagtcttttgtgaagagtagaaaaaaaaaaaaggttattttcagccataaatgacatctcattgtctcaggttatggaatgttgatctccaaatgttgtgtaaggcaataaattaattaagaaagcatatttgtatttcatttctcccaaaaaaattactaacaaatgcatatgcacagtgcatttgcaatattggaacaagttcaaatgtaagaaccaatttgatctgacacaaaatgcagataatgaagatatcaagtaatttgtaatccagcaagtgtcttcatacagtcaaaggttgtaattattcgggtactaaacgaaaaaaggtgagacaatggacttttagtttcacaacatcaagaaacagaagcactgtcaaggcacctagtcagttgcttctgcaggctgcaaagcttcattttgtttcaacttttctagagccaaaactcgtctatccaatgactcgtgcagacctttcatctggataaacagagagacgaaatcataattaagtgccataggtgtactaaaaattttaattctcctcctttgcttagtgatcctaagt

SEQ ID NO: 37049 - DNA, 5704 bp, Cannabis sativa
  modified_base (36)..(56): a, c, t, g, unknown or other
aaagtaaaaaataccgcctaacagtatttttgtaannnnnnnnnnnnnnnnnnnnnaccatgtaaatttccctataaaaaattataattataattactcaaatataaaaaaaaaaagaaaaaagaaaaaagaaaaaagaaaaaagtacatcactacaagaaacaccctaaataaaagtatttcattatttttagaaaaaaaatcattcccttaatttcaaaattataccaaataataatttttttttaaaaaaattcctcactttttctgacttgagaaactgagaataaacaattattacttttttgtaattttaaaataaaaaaacaaaaaaaataaagcgtcgtcaaatattcccaccactagcaaacgacatcaaaaatcgaaacggcgccgtttcaatagaaaacgacagtaattgatggccgcgttttaacttttaaaagtcgtcttaaacgactttactcactccactctttcatttctctcttctttctctctctactttctctctctactgcaaccaaaaaaagcgcagtttctctctctaaaaaaaaacaaccactttctctctctaagcttctcactcactccttctctctctaaacgccagaagcgtggtttgagatcgagtcggttcctggtttcctgtggttttactcggaaggtctttcggtcatggccatgaaaatctggtaacagattaatatataataatatatgtttattgtttattatattatatatattttttgtttggtgtaataataattaataaacattattatctagggttaggtttttatgggttgtttttgtgatttggaatttattttggggggttttttgactgagaaatcttctttatggccttggatttcggatcttctccttgaccttgatactgtcacaaagtttctctatttttagggtttaggaattggattaaggtcagtatctcactcttcttatgttttattatcagattgaatcgattttcaggtcctgcttctaattctgtgaaagaaatggttgttgccgtttttgttttttgtttgttgttaaggttttttgtgggcttgttgtatgtcggtctgtcggtcccaatccaaaaataatgtgtctttgaaaaattagtgtgaaaagatgtgtgaagtgttatatatgtatgtatgtatgtattggttttttttttcaaagtaagagagtacctttattttgaaaatttggggttcatttgactggtaaccaatgcatgtgttgaccatggaattgtattgtttgttcttgttgaatttatattccattttgaacttcaattaggaaagtatttgagacccgtgacgcgttttaaattaggaatctttttattatgagctaaatggtttatataagtgtgttcatttaattgtttgtcgtagtgattacgggaatttgagaagctattgttgttggtctggtcatttctattaatgggttcgtttctttcattgtaatttttcagaggaactgcttttgagagaatgcggagtaagaggtgacgttttatgattaggagttcaattgcagtgtttatttttgagcatgggagctgcttgttgtgtggctgttaaggagaagactataacaaatgggtcgactagtgaaattttgcatcggaatattcgatgttccccaacatggagctttcgatgggatcatagaggacgggttgcgggagaagagacttcaatgagttggttttctgatggggtcagcaggaatgacggatctgaatctaaatttgaatcagcatatgtttcagaggaaggaagtccattaggtcattctcgaaggcgtacatcacagaagtcctcattttcggagggagctgctgggcagtcaaggactcctgcctcaggtaatttcccagaattgcagcttcttacgaggaaactgtgctatactttcatagatgccaaaaatagaatgtgggtatttccatatttgaagttatatgaccaaaagcaacacgtttatacatgattttgttcaatatttacattgttttcaatcgtgggcaaatagtcttatatttgtgctgatcccatttgctagagtttattttgacacagtaacaataagcactgtttcttaatatgtttaatccttcacttcttctagtgaaattggttgatctgccagcccgcagctgccttcttttctcttctctcttaattgtttcactgtcaattaaatgaattttccattttttgttggataattgtagatggtaatcaggcaacacaactgctttctggttgtggtgcttttagcttatttttttgtgcccctgaacatatttataattttatttggcaacaaaacagcttgattgtgttgaacttttgaaattttcaaatctgtacatgttaatttgtattatgctgcattattgtgattttgtatgacttttttcaatgtatatttttatggcagataaatctgttagaagaaatgcttcgatggattcaagtctagagcaggtagatcttttatctgttgaggcaatctgtttttttttaatttctttagtgtagatagtcgtttgcttgcatgctttcattttgtgtcatgttttgttcatttgtcgggtcctgtagacaaaggagctgactgaatcccctacagtctcatatccatctcctgcaaagttgtcagtttcgataccatctacttcatccttcactgcatcccctttgtcatcacaaggtcaagttcctcctgccaactcaactcctttgaggtggcctcgtcattctcctggacatcagttgtcaaggcaagaatctgatgcacaaatcccgggatttaaatcaccaaatagctattcagtttctgaagaaagggcagctcttccctcttggagcaatgaatcaactaggggatctcgaggagggtcttcagatggttggtcaatgaatgcgttttctgagctaatggctaattcaaatagagaaaggtggtcttttgacagcgagtcatttggctttaatcgtgagaagatgactagagctggtagccgagtcttagcctctccttctgctgatttgcaaacatgcggtgtttgctcaaaacttttgactgagagatctttatggagcagccaaaagattattgcttgtaatgaactctctgttgttgctgtcttagtttgcggccatgtttatcatgctgaatgtttggaaaatatgacacctgacattgacaaatacgatccagtttgtccaatttgtacttttggggagaaacaaacccacaagttgtcagagaaagcaataaaacacgaaatagattcgaaggctaagaacaggaaattgaggaaccgggttgtcgatcttgatggtgatactgtcgtgtttgatcactctaaaagtagtggaaatcaaggaaaaggtcctacaatggcatccagctcaagcatgaaaacctctgtggggaagccttttttgaggcgccatttctcttttggttcaaagagtggtcgagccatatcagataataatcctgctacgagaaagaagggttttttctgggcgaaatcaagtaagatgtgagctactatactatgaaaaaaaaagctttttgtgggaggttagcatctcttttttcccacgcaatattgcttacatcagttagattaaacacagtagagattcttacttgttgcttggataattaattagttcacacgcctctgtatcttattgtccctctcggctttgtcgggaactgagctatgcgtagagctaaaaaaaattaatgattttatcaagtttacaattggtttctgaatctggagattgtgaagaatttagaagtcattttattcatatctcccccccccaaaaaaaacttgcattagctttacaaaactcagaattcaacatgatttggcttgtgggactgtattgtaaagtttgttggaaagaaaaaagtattattctatagaagaaacacttctttatatatggtggggaaaaaaaccaaaagaaaaggggtcttaaattagagagagttgaattggttttcatattgtgagatttgtagtacaaatctcattcatgtttgtatatattattattattaataataactaataatttgtttttgatgccctatgctcacgcatgcatgatctttctttattaaaatgaaccttttgtgtaggtcatcaaccttttgacccaaggggttactactacaaacaaatgccctctctttcttttttataatgttttgttttgtatattatgggcaatttaatgatcactttttaagatttagtttatggctaatgaatttggacaaggtagtatgcaaaaactccaactagtagttttagttttagggctagtggatttgtcatgcatgcttttatttatgtaagttttgtgtacttttactacttgtttttgtggaataaaatggctcaccttatatattattagattagaattatggggttgaatttaagttatctttactgctcatggagaaaaatgtgtacaaaaatgttttttttctttgttttttgttttatacatccaatttagggtaattaagatttttatttttaaattttaacatgtattaaattatgttttaatttttcagacacttaaataatctttttgaattattgaatttgttcaattaaaaaatgtttgtttcattcaatttaattttgctaatgtgactactttttatatactaaatcatatttttttgaactttaatatttatttaaaaaatttatcaacttttattaaatatgatttgatacataaaggtcatggaaaagaagaagagaataatagagaagtggaaatttaggtgaaccgaggaatgacctaacaaaagtttgggcaacataaacagtatttctttgtaacctttctatgataagaatagaagaagaagaagaaagaatagtaaagaaggttatggatctttggtacaaccccatttaatttaaactaataataataataataataataataattaattattaaaatgggagggcctaccctaggaaataatagtagtcataatccaaattagtgctacgtcgttatctttctataaactgacacgcgtaccaaaagaagaaacaaaacaaaacaaaacagcatctattattaatttatacatacaaccttagctatctaaataaatatatctatatagtgccgacctcttttttctcttttctgccaaaacgattcgtttctcatctctattattgtgttctgcaagataagatttacataattattattattatttttatttatttatcaactactgtgcaatagaaaattgattttcatcttccgattttcttagatatggtatggtgcaatttactagtttattgcattagtattttgttaaaagatagtgtgagaatttaatactatacattagttcactttattattactgagataaaagagtaataatagatacactacacatccaaattccacatttatcatctactcatcaagagagtttattaaaaattcagatttttagtactaattttatttttttacctcactttaaatatagtattagagctaagtaaatttctaacgaatatttgatccacttaataccatataaagaatgtatgagttaatttactcattgttga

SEQ ID NO: 37050 - DNA, 3513 bp, Cannabis sativa
ttttataaatgagggtgaaaaaactgcctctaaagactaatattgtagtagtgtttcttgtagtgacaagtacaaatcaacaaagcgtacaaggcatactaacagaaatagacagcagaaccacaaggaaggttgaggagaacaacgagaagaaaaactgtggcctggaacattgccacgtgcccccacgtgccggcgcgtgagaataatggtagtggaatgatgcgacgcgtggggcccacttatgggtcttatgggcaccaaactccagtggctagcagatcggtggctaggcttccttcatgtgtgggtggtgagaattaagatgcactacaaatagggttttctagaagggaaccctaaactcaaatcttatttttttttttttacatatatatgaactctacttttgattttaaaacacaattctaaatatgttctgacatcatgaaaaaaatagtgaatgaattatgtattttattcatagaataagtatatatctatatacaatagaaaactaactaaattagagtgactaaataagaaattaactaaatacaattaatatagctaatatattataacgaagggcaaggtgccaaccaaacatcataagatcgagttggtatatgtatttcaaatatattggatccaacatattttatttaataaattatattaaaaatcgttaactaacacatggtacaatgttgagctaaggtaccaaatagtaaggctctataatacactataattattgtatttatgttatctacatacttgggtaagtcattttcactcactgtattgttttcgatggttttaaatattcgtttatcttattaaggacaattcatgaatattatttctttgtttttacacaacatagctatatcactaattcacttgcaacaattttggaaagaaagataagaacaagaatcacaagaacaagaaaataattctaaaaagggtaaaaaaagcaaagataattaagcggtgtggtaactacatgtatgagtcctattatgtatatgtgattagataagaacgggtgtttttttaaataggcatatgtaataatatgtttatacagtgagttcatgatgaactagttaagaaatgggcaagagctgattctttgtaggatgaagtggcagaagatccctggtgtgaataaagtactgtactcttgttaacagaagtattagcattgctcttattacccaaagttttcatgcctctgcaagacttcatatgcgagtgcagtttctctggtttgaatgctttcccacattgcctgtaacaacataacacatttcaaaattttgtcaggataaaattctttgcattttaatattgtgttttatttagttaagctagactatttgttcatgtccattttaaaggagtaatttattagcttcttaattatttataataatgatgagcattgactttgacatggccaaactcatagtaattcatggataagcatgattcatttcagaaagcaaaaaaaaaataaaaagtccacctcttaaaaaattataacaacacaattcatcctagcaagtagccaagctctatattatatattatttgttatataatgaatatcaaataatattattcttagttttaaaaatgtttttttattgctgttgatcttttgacttttgtttgatgttatagtgtcacgtaccgtcggcagttgggaaagcttgttctcaactgatgttatataacgttgttttaattaaatatttaagcagatttattactttttggacttaatggttaggatttttctagaccagtgtcctcattgaactaatatgtattcatttcatagagaaaaaggtgtatgtagtctttatttatataaatgtatatattttttaatttggtcaaaaattaagattataattttttttgtttgtttgtaaggactatataattaatcttcagttctcttaatcatttttgtagttatttaattataacacatttttcatataaccattatagacagataaatcattccccctaatcaaatcattaattttttttccattaaaaaaaaacattaatttctctaatataaatttgtattatatcgaaaagaaaaaacaaaagcaaacaaaaataaaatgaagaaagttaattaatttttaaaatgacttacgagcaattgggctctctggctggcctgtaagctgatggaattgttctttgtttagagaattcgctctgctgctgatccttctttgatgagcttgcagtagtactactcctctcatcacagcttcttctgtaatacaaataaccgcaccagctttaatttaacaaaattaattagcaacattccatacacatgtattacatggttaaataaatatgaatctactctttcgtatacggacaaatttaattaatcttcatttatattatatatatatatatatgtttatatatatatatgtttaatcataaagttgttgagcagaatcagtactacttgtgttaattaagatatgatagaatgaaaattgagataatttttaaatttcgtgtacctagcattgtaattttgaggctgttgtacttcaaactcctggtacttccaacaagtatggaaagaccttcgcccacccgtgaaaacgtactgatcgtccttctcattgttattattgttatttggttttgtattacctttaacggatccagtactcttttggaagccgccactgcatccaccgtggtgttttactgtaactaaaacggtgtcgtttgtatccacagcgcggcaagtaatgaagctcttaagtacgtttgaagctccaccagaaaagctctttctctttgcagataaaggtactgatttagaagatgatgatggtgatgagaaagatgaagagccggcggccctcatactatcatccagttcgttgttgttcttcgatctcttgaccttgttgttgttaaataaaggagtagaaatttcaagtttcttggtggtggtggagtgctgttcttgattgtgatcttgttttatattacaaatactcaactggtagttgtcgttctcctgcttcactgaatctaattcatcagtcaaagaagatttttctgaacaaaaactagacagtgatgaatcctcgttaatttcggagaaagtttttgttgttgttgctgttggttgtggagaaatttttggagagcatgaatttttacaagagctaatttgtttatgagctgctttcacatcatcttcaaccctcataattgtagtctttacagctttattttcggtacaataatgatatgaactggcgttgataatatctgttttctcaccatctacaaattaaatgaaataattaagtatagcagatcaaaaaatatatatatacgtaattaagggactagtatatttctaaaatttttattttggaaatggcacgcattattagtagtcaactcaagtaagtgattttttttttttttttt

SEQ ID NO: 37051 - DNA, 9479 bp, Cannabis sativa
  modified_base (1786)..(1787): a, c, t, g, unknown or other
  modified_base (1895)..(1904): a, c, t, g, unknown or other
  modified_base (2318)..(2322): a, c, t, g, unknown or other
gcacaataaaatgtaaaatacttatgattgatgtacaaaataattcaaattaaacatatgtaaaattgatctttagaaccaaagatatttacaactcattacaataaaaataaaaaatgttatatatttatatgaaatcataatcagaaatatgttaggtaagtggtgcctaaatggttcgctgaattcagaccattttctttataggcctttatcaatatggctgaatattgactaataatgaccaacacgatcatggataataatctctattaaagttttatgttgcttatagtaatatttttaacaagtggaaaaattaggtcaaatgcttacttggcttaatttctccaaaaatcattcaactttctcatctcaattatcattttcttttgtgtctaattaggtttccatgttgattttgcaatatccaatacgtggctcaatttgtaagaacctatggtgcctttgttttcacttttacattttaaagtttcttcttaatcaaactcgaaatgatgtttaagttatgttaatactataattaaccatataatcacaacacgtatgctctagtttaattaaatactagtaatgcctttttttttaaaataataaaaaaaaattaaaagacaaatctatcctagaaaacactatttcgatctagtaaaaaataattgaaattgagaagacaaatctatcatagaaagcactatttcatctaataaacaaaaaaataattacaatttttaggagctgcaattcagttaatttaaaatattttgattacttttcttaattacataaatatttaatgattctaatttctatttttctcagcttaatgtacaatataaaatgaataatgattttgatcattttatattttattctcatttctatttttttattaatttatataaatttggattataatttaataaaagtattattatcttatccatggcacccaccgaccaatattttttcttccgagaaaccaatgataatatcatgggaaatgatagtaaatggtcttaaatcatatgattatgttagtaaatgttcttattttaaaatttgtaagaaaatgatcattttagactatttattatttatattgtcttttatcacataaaaaatcaataatttttttttcatatgttttttagaattagaagcaaattacttaaagattatggtatatctatattagttttgttaaaatattttttatttgaaagttatgtcgctttttttttttttcatttttcgtgagttgttgtgggttgttggtacataaatttagttgtacaatatatttctgttttattgtatgatatattattattctagatgatatttattttttattttactatgtataatagtggtatataattttgttagcataatataaatattttaatgtatgtatataattttattggcatgttacatatatttaattattatttttatatattttaattgtatgatacattatttattttaaataatatttaattagtttctatattattatatacaatggtggtatataattttattgtcatggtatattattttgtctatgtattttttgttatacgatatattattttttttaaaataatatttaagttatattttctattgtacttttgttaacatgatatataattttattagcatcctataatttttatttttatttgttattatatatttttattgtaaggtatatattttttgctatatggtatataagttttattgtatagtnnatcattttattttagatcatgcatatttagtttttattttattatatatagaagtggtatataattttgttaatatagtatatataatttttttaataatattatatnnnnnnnnnntattttattttttattgtaggtatgtatgttttgttttatagtatataatttttgttgtctataatatattatttatttaaaatgatatttagtttctattttattatacataaatttttttatatatatacatattttaatagtagtatatatagttttgttaacattgtatatattttgagtattaatctagtatagttatagtttctttataatatgtaattttattattacggtatattaatttttagtaatatgatatattaaatactgttgtatatatttaatgatctaatatatttattcgtttttgttacaatataataatatgcaatactaaaattattaaataacttaatttaattattatatattttttaaaaaataatatatagtaaatgtatttttataannnnnattagctaatttattatatttgatcattttttaattttttttaaaaaatagacatttactaacttagtttccaaatttagaattattttgcatttcatccctaatatcatccaggtcttcatgccacaccctgaaaaattctccaactctttaattataataatcccataaacatgaaaaattagtaattaattaatattgtagcaacttatagaataataagtgaatttagaaatgaagacctgttattagaatatagacaaatacgatattaacactcaattatagagattttacaaaattatgcctgcggcatatgtatttaatatgtttaggagctgtaatagtggaaactcaacgaactagcaaaactgtcacagtggtatactttagtattttagaggtactgtaaatttttatggaaaattaaaaactatgtgttatgcgggttattagggaaataaatcttatcacttggagttcctcttctccttttcagctttctccctctcaccatctcttgcgcgaacttctccctctcctccttctgttgaagggctaattgtagggatgtcaacttctgaacgacctcaacttttgccttcttagcgggtctgtcaacattttctactgacctcttcaacagaaagactagcccattcacaccctcatcatcatcaccacccctcgggatcacaagttgatcccagatgggtgccgctgaggctagcaaaatctagttcagcggagctaccaggatagtcaaagtagtgaaactggccagtgcattagccgcaacagtggcatccaccacgttggcaggggatgtaattgatttgattcgtggtctagaactgaaagctctgcctttcccctttgatggcctagctgcctcctgcatctcgtcagcttgagtgtccacatggttgatgaaagtcttgagaatgctcattcgtaatgtctgtgggccctatgcaaaagaaagtgaagtaatgtcagatgtacagaaaaattagggctttggatgaaattttctctctcagaaaaattggagctaaaaattcaaaatggcaaaaagtggtaaactttcaaccttgaatatatttatatataaattggggatttgtgtgcttaacatccaacaaccaatatcgcactccaaaaaaacacaatatgatccaacagtcagggcatctgaagggatttcatttaatgccttaatgtaggatcaaggcaaaacaatgattatattcacctcgagaaacttgctagtgtggtcattcgtcatctcataaactcagaagtctcacacactttccaagatgtgtatatttcaaagaccaagaagtcaataccatgtgtattccattcatggaaaacacaaagtttatcagtatccatgacctgatgctcttcctaaagaataaaattatacgtggtttcatctaccacacaaaattcagaagtaaagttgcaagcctcaacgactcatgagccccaaaggcttttgggataaatattattcgtgtttttggtagggtgatacgtgtacctccaagattcatctcactttaggaaggcccattctcgggcccaaatgggtgtgtcagcccactaaggaagttagtttgtggctcggtgttcgataacatattgaactcatccaatacaaggtcagaccgtccaagtttgggaatggttcttggtcagaagaaaaaaggttcaatatggcatattctaatatcctcatggggtattctcggaaggactgtctaaaagacatctagaaacaaaggcttatgtggagatacctcagatacaggatcccactaaattagggattgattcacctatcctctagcatttattgtatagatttagcaatgtataataattgtcatcattaaatggaccccgtaaatgtggatgatagttatcttttaaatcaggtctttcctaattggcccaaagtcaatattaaatatatttgctattggttttgtagtattaaatcaagtttgtagcagaataatagtttctaattatcttcgaaccacatcttcaagattaccatatgtgtatatatattaaatctaaaataaatagatgaaagaaaatttatctcttgaagcttatcagggcatctttatttcttttcgtaagttgtatcgttagatgatgatgaagaactcacacagtagtctttcgaatcttccatcagacacaaggaataatgtgggctatcaggatatgtattgtatattgtgttcttgtttgttctcaacacatgaataagaactcttagaagtgatgatggaaaaaagtgtaattagattaattacttttaggcttcctaaaaataatgcgtatatgtttttaagtctatacggtatatatatatattaaaaccaataaaaaatttatttaaatatatatattttttaatttaaaataataaattgaatcacatttaattatttgaataaatatttataaccgaatctgttatagatatttaagatcgaattaaatattcaatgaccaattgagggaatctctcaaccacttggagagaatctcttaactactttaagagaatatcatacggtcttgatgcacttttcctccacaccattaacttatgtaatataagtcttatcaaaagagaaaatgtagaattcaattgctaacttccatattaacattgtggacctaactatgtcatccacatgttgtatgatattagccgaaatgatatcgtacaacaataatggtgtaaagcatagctcaaggagaagaggttaggatagcctcaaatagagaaaagagacaagtaaggcacaactaggaccaaagtggcatatctagaataatttcatggcacgacaagaaccatacgagtttttgagaagtgttgggattatgaaatattcaagcaacataaaaggcataaagtacgtaaatgatactacaatccactcctaatttgctttatggataatagtataagtatgttcaagtgatcaattaacagggaaaaaacttacaagtgttaattttggtcaagagaggtggtatttctaggttatatattattggaggatagaatgacatcagatctgtcaaaagttaatgtaacgccctatttcaaggaatgccacatgtcgtgattacattatgctaattcttttaatcgggatctattaaccaagtaaattaataatgaaataacttatatatcaaaatagcttgtaataatcttaattcaaaataaaataatattattacaaatctaggatcttgtaaaattcttttcaaaatattacaagttgttacatgtaagtcgacctaagcagtaaaatgagatttctatacaatcttcttgtagggcctaacccttgcggtctatcttggctgaaacatgtacaattcatcattaagccctcgagatggaaaagtcaagtggaaaaacaatttaacttgccaattatatatgttcaagatgattggggggagtatatgccatttaaaagattcttagaagatcaaggtatctatttacaacacccttgtccttatactcatgaacaaaataggagggcagagagaaaacacatgcatattaatgagactggtctcaccattttagctcaatctggtctcgaccttacttactggtggtatgcattcagttttgttgtgttcaattaacaggttacctactaaagtgttaaagtttctgtctccatatgcagtgttgtttgatagcaaaccaaaatatgccatctttaaactttttggatgtgcatcctatccacatttaaggccatacaacaagcataagcttgattacagatccaagaaatgcctattttggggtattcatctcatcacaaaggctacatttgtgagaactcagaaggaagaatctatatggctaggaatgtggtgttcaatgagaagctattcccagcgaaagctactggtcacacggtaacctcaacactaacataggtacattcttcctcacctgttccaaatgcaacttttggcactaaacctgttacaacacatgctaatgattttttctttgctgataatactgagcttcacatctcagtaccaacaactcaggttgccaatactaccccacaactacacacttctcccatcccaactgctcctacataagaaataattgaaccaccacaacaggccaatgaaccacaacctaaccttactcccatctccatacagtaacacactaaacctccacttccatctgcaccatcaccttacaccatgccaccagccaccaatcctgcctcaattaaaccacaacatatacctacaaaaaactctcctgctgccccaaccctaattttacaacaacaattaccatctcaaccaaatccacatgtcctaacaaaacaaacatcaccatctgtatttgaaccatccctacctgtttttaatgatccctcactataacctgcatttggaacacaatagccccaagagttcattctatgagaacaaggtctcaaagtggtattagtaaaccaaaggcttacttggcaacaaaacatcctctacaagaatctcttctgcccaataaacctagaaatttaaaggaagctctcaacaatcctcactagtttacaacaatgtcagtagagtttcatgctcttactaaacaaggtacttggactcttgttccatatgctccacacatgaatgtgattgacaataagtgggtacataaagtgaagctaaatgttgacggttcattaggcgaattcaaatcaagattagttgcaaaaggctatctctaaacaccaggaatagattatgaagatacattcagtcatcttgttaaaccaaccatagtgagaattgtcttaagttttgtcgttagtgctcattggcctgtgaagaaactcgatgttagcaatgcctttctccatggcactctacaagagattgtctatatgaaataacctaaaggcttcattgatccaacaaagcctactcatgtgtgtctattgcacaaagcaatgtatggattaaaacaagctccaagggcctggaatgagaagtttaaacacacactgttttagtggagatttcaactgtctaagtcagataattctctgtttgttcatggaacaggtgcatccctagtttacttgttagtatatgttgatgatatacttatcaatgtatcaaatacaagactcatctctgatttgaacaaagttttttctcttaaagacttggggccaattcattattttcttggtgtggaaatctattgtgatacaacaggaatgtacttaactcaaacaaagaacatcactgacctcctaccaaggttacatatggatggggcaaagagttgtcctaatcctacaagctcaacaactaaactaagtcttaccaatggtgagccatttccagatataacactgtatagaagcactttaggtgcactttaaattctgagttggacaagacctgatgtggctttcatcataaataatttcagttagttcattcatgcacctactaatacacgctaggaggcttgtaagaggttactaaggtatccaaagggaactatccatgatggcttgtggctatgtccaatagattctctatgtttacatggatatagtgatgctgattgggccaattatgttgttaataggagatcaacatgtggttatgtcatgttcttaggctgtaatctcatctcctagtctataaaaaaagtaacagggtgttgtaagatcaaacactaaaagtgaatttcaagcactaacaaatgctactgctgaaattcgatggcttacatctatgctaggagaactacaagtccttgttgttcaaactcctatgctttaggttgacaaccaatctgcaacatctctagcaactaatccagcgtttcatgctcgttgcaaacacatagattttgatcttcattttattcgagatcaaatattagctcaccaacttgcaggttgatatgttccctttttaaatcaagttgcagatgctttaactaagtcattaactactgacagatttaactatctcaagagcaaacttcaaatggcttcttcaccatttcgtttgagggaggatgtaaaatacaatactaaatcagttagttagttatatcggttttagctctagtgttcaattattttttacaacttgtatttagcttctttagtgaatataaataacagatcaagctaaccatttctggttaagctttcttggcgttctctgtttctctttctttttttctccctggtttctacctctggcttagtaccttgctttgttttgccataactaagcttctacatagtgatatagcaaatatttgactttgagtttaaagtaaattgtatttgagttttttaaatatttttatttaaataaatatagaaaatggagaaaaaaaattaaagtagaatgaaattaatttaaattgttatgtcaccgccttacattttagctttatatatatatatatatagatttgcttcatattctttttttctacaagtaaaaataatattatcattaatcctataaatataaataatcatattaataataataaataaattctttaaaaacgtggaggaaaaggaaatagaatgaaaaaaaaaaaataatagttaaattaatggtgcgtttagttacccttaactggaatagttaagaatcatcagactgattatgaatcaaatttatgctcaatcggattagaataagttgtttacttagtttgtaggaatccaaatgagtatgtgtttacataattactttgtaatcggagtaaattattttaagttacaaaaataccctttataaaaaaattatttggatttttttttttaattttcttcaattgaaatagaataaaaatgataatttataattttaaaagaaattggactaaaaatttcaccaacctcgtgagattgtcaatcccattcctaaatcataaattaatttaaaattctcattctttaataaaattaaaaaagtattcattcttcatcaagaacaaattactaagatgacgtttgattggtgttagagaatctcacattgccaatgtgtggaaagataat

SEQ ID NO: 37052 - DNA, 6950 bp, Cannabis sativa
agttcctggtaaaataacttccaacactttcatgcacaaaaaactacgtgcatgcaagagtcatgttaaatttttatatggaaaacttcggcttctgcgagggaaggctaaagttgcatagaaattcaagcaatgacttcgctttaaaagaccaaagggtgaaacatcactgggcgtgtgacagacttcaagtagtccttctcttctagaaaggaggattgaagagtgtcatatccccagtgatttttcatgcacaaaaaactaagtgcatacaagagtcatgttgaaattttatgtggcaaacttcagcttccgcgagggaaggctaaagttgcataaaaattcaagcaatgacttcactttaaaagaccaaagggtgaaatatcattgggtggacactgcacatgtttctatctttcttcaactctcaatgaaagtaccgaatgtttatcgagatttttggcaaccgaatatcttagagcttaagaaagaagtaatagaataaataactaatttgagatttttatgtggttcaggcgttaattatccttagtggatgagtccatcttattaggctcattagtcagtaaatatgagtacagatatatatacaatggactagaactctttattcctctcgttcttcttatagaagaagaaacttagtaggaatgttcttgtaaggtttttccttatgccgatagtatattttctattttccaaaagtccccctatcttagcaaattcatggatatttttgggcagcttccctccatgcgcgtgcttgaattgatcatctttgggtgagatccaactcttagtttggtaggtggccatttaaccatatggcatttaagggtgccagattgtactggttgggtatcatacatgtgttgtcccagggttttcctttttgaacttcctttgttaatggacgttggatcattcagttaggtacgatcgtgtgtgcatgctccgtactacagcgtatcgtgggggacaaactctagcgctatacctgaaaaagcctggttgttcaatttgtagtctaatatgtatcagcagagctttcgcaaaatgaagtaatggcttggtcaaacgtattccatgacacctctaggcatttgatgtgaaatccataccctttgcgggagctctcgacttcagtcctacgggagtgaatggcttctattcctgggaatgaggaagaccctagattgcaaataccccccgcatcgctaattggtagggaagtcccaatcacggaagccctttccacgagccagggccagttttatcttaacctttcttgattaggattcacgttttgagcttacaaaaaattggacaacaggtacggttgtccagagttttttttatggcttggaacttgccaggaactcaaccttttggcttagaacctaccagggactctgtctttttggcttggaacctactagggactctgccttgccttgaagatttagcccgatacgcgatttctttaggaactatgtccatttattctctggctatacagttcttgtagggccttgaccttatgcatttaaactaatttttaattcatattcgggcttgaagctttcatgttcttgatttggcctaaagcactctatttttgaacactactagtgtttaaccttaaagccttttactatggacatatgatcatcctggctatcttcttatggtcttgaatgtattcagatttacttttctttatgtcaagctaaggtatacatgcacttgacttagaggtagtttagtagcttattctaatcgttgaaatttctttgcataagttttccatgctagttcaatgcattgtacggtgtaggtgcccccaactgagcacacagacttacagtcagttggtcacttacaattcaccaagttttatagaccttgcctaaaattttctcgggggtgctcccgggtgtacgcatgtggaactgagaaagagtaactttaagaagttatctttgttagcaagtggtttagacacaattagtcttacgtgtaacaaaagcttacaactcagtgtttgcttttaaaatcatgttgtggctacccttgcgcagtttactgtgcaacagctttaactgaagagtgatgggaggccatgctgaaaagtaatgggtactagctcttttatatttggctacctctgcagggcttaccatgcaaaggccatcactaaagagtgatgggaggtcatcgctaaagaatgatgggaggccatcgctaaagagcgatgggtactagctcttttatggattcctggatggtgaaacattagaggaagcactatacaagttaactagtgagagcacttactgagatgttctccattccaaattttggtagaagagtcaactccaaattctctttatactcaccagtcttgtatacacctttttttttatctgtaacgcgatgttgacctttttagtttggtccaaacatgattgttataggatctttgttgtcaaggaatactctttagggagtaggtctcttacaaagaatttccttaatttgtttgttgaagggcctgataactctttgtaggcaaacatgctggtttgagttggcttggtctcttctttgtccctttcattaagggattctactagcaaaatgtggtttacttcttggtcacagtagaccagaagagtgagagtagactgttggcagatcgggcaacccagggtacagactaggtggccagccacgttggagcattacctggccatttggaggaggctatggtcggccatcctatggaggcactggtcgaccagttagttgatcttatggtcagccaacttgctaaaaccatggtctaccagccttttgaaggccatgtcaatgctgtcatttgatcctatctacaattggttggctttgcccctagcatgattgaagtagagcctttatgcacttatgtcaatagctatttagcttctttcatggtaacactttttagaggtggtattgggatacaatgtctatgcattatagtgcctaggattggacacctaatagccatccccctaatccctactttttagcagcatttttatttggatgtatgctgatgtaagtgtatccatgttggttatccagcatgtctactccttttgaaacaaggattcttaattctttaaagaactgagcagacgtcaagttttccttagttttcaaggcccgactggctagttgagcgagtgcgtcagttgttgcatcatctttggggacctaccttttagtacagcctttgagctgacttgacaattcttagctcaaataggccatcatctttttgcattgagatgtatattcacctaggacatgacctacgactatttgacagtcgtgatgtatgtctaagtgtttagctcgcacttcatgtgttagctcttgaggccagcatttggagcttcatgctcagcaatgttgttagaagccttgaaactgaactttgttgcctcgtgcaaccattacccccaggtgttctgaggcccaagcctgcatcgggaaagtggtcaatgcaccttctaggttgagttgtcttgctcttgctctcacttcttctctggctcttgcttctcaccgaatcttaagagatttggagagatatgcttctatgtttagccatgaagatggcaaaagcttggccttcaatgtccatgtttggatgacaggtggccttataccgatcgagcctcggtggttcacttgagtggttggccaggtgcttcaggttttgatgacacctacgccatggacggttggcatgcattgctttggaagtttggataggagagtgatgcatgcacacttctccttcttctcccttagacttcatggagtaagggaatcgttgaatttcccttttttgccattatgttggtcagaaccatcattgttgcgcttgcttctaacattcttattgttggagaatcgacaaagattttctgtgatggtcagcacaccgaatagcacttggggcaatataacgccctgtgtctatacaacattgacttgccctcttgtttgggtttgccgaacagcttcttccaactttatgaagccattggctctctcaaggaattctttcatgatgcttgttaagatccttctaatatctttctagaagtcggtcaatggtaagatacctctaattatggtcatatatcagccttcttctgtcaggcctttaaccttggcagcctcagccatgaacctttgaatgtagtctttcaaaggctcgtcttgtctttgctttatttcgacaagattctctagttgtgaaggtatttatcttgaagtagagaactaaacatagaactctcaagaaaattcttctcaagaattaaatcttcgtacggccagcttgaaacatcattgtttggctattttagccagggttgccgaaaagatttagcatcggacatctccagatacttgttggagagttgtttggatctcaaagtattttaggtgtactagaggatcttctttcccctgtacatcttccaagttggcatcttgaatttgggcaagggtaaggcattgatgtacgccaagaaaggtgagcccctttacctatccagctcaaggtttgatggtttagggtcagctaagcccttgagcatgtctcgtatttgacctaattgtgcttgcacagaatgatctattactgcaggggccttgttgattggcctttcttgattgagttgtattattggattggttagagcctggctgccaataacctgggaaaggtatgttcaaggctggccaatcttgagtttgccaggtgtccatcgccgcccagccttgtaatgggtagggcctggtcacccactcttccttgactggctagtggagcctgtgtgttgacatggggtaaattacaccaattattgaagtttggtggatctaactggctgaggtgattgtattcacttctcgagttgttgttgtcttaggtgtttcctccaattctcaggcctctccaattaacgattggcctttgggtgatttctctcggattccctagcttaggaattcaccttattagccggctaggggtgcacttctagggtgctagctgaccatgggttggacaattgagggtgttattgtgcccgagactcttagccaacccaccaggcccatggctgccagagtctggatattcttgccatctgatctcatggcaaggcttgtcctccttcaggttaaggaaggtttgtcctagttccaaaggaacttggttggatagtttgtctgtagaccatccccaatctatcaattagtctcccttggagaggatctctggtgagatcctaacctcttctggtagttctttcattaaatagccttattaagtcgctagcttctctattacgacagtctaattctgcctgatgagattggaggatatactcttggtcattcatgcctcttaggaatttgtgtctctattgtgtgagtgtatcgtagccaaagcatgttgttcttcagtttggctgacttggtagacggcctctctaagtatggctaactcgagatcttctcctaagtctacacggggcttgccaattcttggcgtcatctctcttgcatgacatcagggatcagatccaactatggtgcctggaggttgctccatattggtcattccttcaatgtcaggcgctagtggagggcgctctctaagtggcagaagttggccattgagacaaactagattggtggttatgacctggctagttgtggtggccaagttcgtggtgtctgtcgggatggcagagttagccacatctatcaggttcgtggagatttcagttgtgactagaacacgagcatcaagatcttcagacagagggtcttaaggaagacccgatgaggcagaagttgtagccagagttctccttatgttaaccatggcatttgatcaaattacttgacaactcgctctcaatgaaagtaccaaactattgacctcagaatttggccaactaatagcagagtcaaatttaatgttgatgattgccatgttttatacaataagaataataaagtaaataagacacaagattttatagaggtttgacccccttagttagcaagtagtgacctactctcctttcggttatattgataccaagagataataccactcagattactatgatgatgggatctgaagtagctctcttaagattacaatgtatgaatccgtatgcaagtgtcatgagagggagagagagagccttcttggaggcgtgtaaaagataaggagacgagaagattagggtttttagacttagagttgagagcttagggagcttagaggcttaaatgagttagggttttagagataggctaatgatctttatccagtagagcttacatgtctaatatccttagaaataggtaaaataaagtttttatttacatatttaattaataaatataaatgactagattgcccttcaaaaatatatattttcccttgattttcgtgggttgttaagaccaaatctgttgcttgacttattgtccacgaatgagggttgcacatcaatgtcttgccaggcaaaagttggttatagccatgcacctataggatacagcctagccaaccatacaatgtctgaaagtttaggtcttgccagccatgatcctgatagggtctggccagccatgtgcctgccagggtctggctagccatgttcctactagctttggcaagtggaggccaacctttgtaggtgaggctaacctttgtacaccttttccttgcgaaggtcaggcttccttggtgaaacagactctttcttagtctgaaagtcaccttttggcctgccaacttgtgctcaaactctggctggccatacaagctcatcttggcc

SEQ ID NO: 37053 - DNA, 4693 bp, Cannabis sativa
  modified_base (3510)..(3515): a, c, t, g, unknown or other
ggtaattccattggcatctcaagtacatgcctcgcctcctctagtagtacttattaaatttcaagtggaatctcttggtctccttcaattatagatacttgccctaactcaattagcaattcatgaccttcatgcttaatgagccgcatcacggatttcagcgaaacaagtcttatgcatagctggatcactttgtaattgtacccctgtatcttccaatttatatgggtcatgcctagtgtttccaaccactgcactcccataataagatcagtatttcccatttccaacggcaaaaaatcttcaacaatctccacaccttttattgtcgtgagcacccctttactattccttgggttttagtagcctaacctgttccgactccataaggcgttgtctttatattgggcagcttcatgatattaattagcacatttgaacatttgagatgaaattatgggtcacactgctgtcaattaataccactacagcttgtgtgctgatctgtcaaactaactttaaggttttgggggctgtaagatccgccacctactggagaaagacttccagagcctgatttttcaggttcatgatgctctagctcttcttcattctcttctaaattgtcaatggagtcttcttcattatcaaagggaacatcttgcaccaatataacttgtaattctcttttcttacaatgatgccttgaagaatatttttcatcatacctgtaacacaaaccttgggcccttttttgctggagttcagtttttgaaagtctacgatatttggagtcttatcctagagaagtcgtgcaagaagtctctttcggtgtcatgttgtttgaaaatgggttaggctgctcttggttacaatttgtattcaaacgttgggcccctaatttgttttcaatcctttggccaattccatgcgctgttcaaccccatttggtccaaacacacgtgccctatctctattttgggtccattgactccaaaaccaattcagatttaccctccaatgacggtgccaacagctcaaaatttttgcgatattctcatacggtttctgaactctccgcctcagtcatacggtgaataacgaagtatcgttcagccttaagaatccagccgtccgattttgaccgtcgaaggtgggcagttttattcttctgggtctaatgtccaaccttggagccctaactttaggcttatacccaccaaaattactgctgctgctgtccccatattagtatgttctttccctcggcagaagttgtggtgcatccgttcttactggtgcttttcccgttgatgatatttgtccctttcatcaataaccgtctcattctcgttcttcctggagttatataaactgatcaaagtgatcagccaaggcagccagcacttgttcaatggcagggaactttttgagatcgtctttgataatcccaatttcgttctgcaccccactgatcttttctttgagtgcctctactcttccctccattcgtgttatccttggtcccaattgttgctatggtaccaattgatgcactgtggtagtgtatctcaataatatcaagtaacagaaataggaaatataaaatttattcagagaaaagaggagaaactttattgaattgctcactaaaacattctcttccaggatattggagagacctggtttctctctagagttaaggcttgatttacataaaatgtgacatccccaacccctttggtttcttcccttttaaacctcacagctttcccaaaacagataaggaaacagctcaaaaacagatacaaagtaaatgcataattgtatgtagattaataataatattactaaaagtttcccaaaccattcctttgaccagacccgtcaattacctcggttcctccttgcatgggttaactgaattggaggtttatcataatgttgtctagtgtgagtgtctacgtctatagaagactaagtgaaattttccaaacaattttatggaagctatctagtttagtagtagttcattagagggtaaagcttcaatggagaagatgcctcttttaaattagttcattgctattctatttgagtttattttcttttttgctgttatagttggctttttaatcttcttgctgcttcctattatcatattttattttggttcatggttcagaccggagatggttgttgggtggtaccattcacatcctgggtttggctgttggctttctggtgtggacattaacacacagcaggtatttactttctttttatcgtttcagtatagaaattgcacaactgtttatagagtggcattatcaaatgttgaattatgatttgttcttatagatatctaaatcttcaatattcagaaaattattattctctctattaacaaagcaagttatacggacattttgtttctttagactgaatatatttgaatggattgcatttactctgctgactttatgtttgtttttttttttggttaaatctacataaatttaacaatgatgagtctgataagtagcttttagatatagaatgtattttctgacctactttatgactgtaataaagctgtgttgaaaattgaacgtgtggttctgtgaattgctttagttctcatttggtcttttgtaactcttctaagcatggtataaggagtcgaataatgatgagtaggtgttagtcctacagattatttgtgtacaatgctctgatgaattctcctatattaggagtcgaatactattcctcaattgtaatttattatctagacactataattcattgacaaatcttatgtagagttttgaagcattgaatcaacgcgctgtagctgttgtggtggatccgattcaaagtgtaaaaggaaaggtggtgattgatgcttttcgcttgatcaacccacaaactatgatgcttggccaagagccacgtcaaaccacttccaatcttggccatctgaataaaccatccattcaagtgagttttaaggacaaatgactagatttattttgtacttgtaggttatagccttctgacatttcattatctctctcaggccttgatccatggtttgaatcgccactactactccatagctattaattacaggaagaatgagcttgaggagaagatgttgctgaatcttcataagaagaaatggactgatggtttaacacttaggcaatttgacactcactccaaaacaaatgagcagacagttcaggtgtgtggaaggtcgctagtgttagtagtaataatgttagtggttatcttttcaggttaaaaaaagtttcaaccatgtctctgtccagcatgttagagaaactcattatatagtgaaaaacagggtatgattaaaaaaaattctcaaattgcaaggaatatttaatgtacacggaaaaccttttcatgcctgtcttgattttttgatggcatatttactgttggtctcctggaaaagcttaccctattggaccttgatcnnnnnntttttttttttttgaaaggaacattgatcagaatcagatgcttgctttctttacttatgacagtcgtctgattattgttttgtgtatgttcaggaaatgctaagtttggcggttaaatacaacaaggcagtacaggaagaagacgagttgccaccagagaagcttgctattgcaaatgtgggaagacaggatgcaaagaagcacctagaagagcatgtctctaatttgatgtcttcgaacatcattcaaactttgggaacaatgctcgacactgttgtcttctagagttcctaaacagcacaaaagccttaatattccaagatgatcatgtagctctacattctgtttctgcttacatttgtcttactaaaactagtctatagacacgaggggcatgtttggagtgttggacaagaggttgttgtctctacctatgttaggtgttttattttggatataaaaggattggataatatcaattggattagtctcatgacagcattcacatcagtttttccattttatcttctaaaatatattattattatttttatcttaaaattttatatcacactttacattagcttttctatttttcttctccaaatcattgaaatattatatttttatatatattttattaattaaaataaatgagatattgacaaaaaaaaaaattaatttagagataaaaatagaaaaatgaaatgagatagtattaaaaaatgtttgaaggatttctatctcttctctacatgtaaagaatgatggaactgaagagagtgctttgagaaggggattatattaacccacccagaggatgacttaaaatagtcccacgtataaatgttatgtagattatacattttattaaaatattattttctagtttttttaaaaaacatttaaaattttgcattcttctatcagaatgcaactcatcggaaatggaagaatcttatcacgggtatatttaatagtgatatgatttgagtggagacgcctacggctattgtaagtatctttgagcaatattttggagttttgtttacatcttaccaactttttatggatactatggatggaccaggttgcttattgacttaaagttttggccaactcgctcgtaagtatagacgagatgaaagttaaaagtaactaagtaaaatagagagcac

SEQ ID NO: 37054 - DNA, 7713 bp, Cannabis sativa
  modified_base (3363)..(3366): a, c, t, g, unknown or other
taaagagtaataaaagaaaaataaaaattaaaataggaaatgaaagtgggtatatagtgtaatttcttcatacttttatgcattaaaaatatatagaatttttaatattctaatttaccacaagtatttaaaaatttcaaatttatttttacaaaaattatcacggtaagatattcgacatttcaaaaattacaagaataatatcataattataatgaatagtgtcataaaaaaaatatatgtaaaaaaagtaaaccttagacatatatttttaagataaaggttgaaaaaatagattagtgtaattaacacttctcataactaattaactaatgacaaagacattataggtcaagctataatatcaatttgttatattgacttattaggctatcacataatgtttatgagaatataaataatgacttcttatatgattaacttttataacatgtaatctatgatgatgttattgttaattagcaccactagggttttctttgtttaatgattttgtagggtttttggtgccaattttcaaagaacaaatgggcatcactttattgtggggctaaagaagtcagtataggttggtccatttatgctaataatactattaatttctatagtttttatttatttatttatttattttttggaagggttttcataactattttctaaacttagagaatcttttaattcaatacaccgacaaatgaatatgtaaaatggataaataaatagaaagagttaaaagaaaagactctcactacgaaaaaaacagttaaatttagtgataatatattttttttttttactaaatatgacttttagtcacaacaaaaagttacttgtaactaaaatatattatttagatacaaatcgtcaataatttagttttagtcacaacaagtattgtgactaaaaacatacttaaccacaataaattgtaatttttgtaagtaatacattaaatcacatattttttagtcacaatataataatgatgatttataatttaatcacaacttcttttacttttactcacaaattttattgtgactaaaaataagattttttgtagtgatactcttatatgattttttattgtatacaattaattaatgaattttcttcttactcttttcatttttctttaaatagaaataataatgtatggtgtactgcaataaaataaataaataaataatttttttaaaaaaaaccattgttgagaaaaaaaccattgttgagtattttagttaaaatcttagaagtatggtgtaaattttatagtaaatttagcttaaaaaataacttaatgacctataaataagaagttttaaaagcttataaataactttcaaaaattcattttttttacccacaaattcacttaatccgcacatcttgaactctttgatttgaacccaaccaaccatgttcttatgcttagagtatgtggaatgctagtcttaaaactcaaatggattaataagctcattaaaatttgttaaaagatatgactttttatattattattattgagcactagtagtgtctagtattttctagatgtgttgtcttataattgactaacgataccctttaaaagttattacattatgctatatggaacccgatacttaattagataaataactatattaataaacacttctagtaccttgagcatttctcttaaatttaatgtcataagaggagaagatcaatatgatctagaaatcaatagagtttggagtaggcctagagtaaaatagggctcagcctaaacaccacaaatagataggcccattaatgtaaatggactcttgactcccatacttccttccttattagatccaattcaagtatatatgcaattgtttagccaccaagatattggtttagtttagcatcaaataccatgtgagttttttgagatgaagaaaatattatatcattcaccaccctactttgctaagaaagatctaaatatattataactcattaccaaataaaggaatattgatctaacaaatgttgggtaattgtactatcaattgggtggtggagtggagttgtattgtatggatgatttttctaggcatctccttcttattggaccaaaaggtttgaactccaccaagttgccatttaaggggtgtgttatagttttgacttgccctagtaagttggttcaagtgtataaagatattcacattatctttgtggtgtttggtttaccggaatataattgtaatggtaataggaatagtaatggtaatagtaataggaatactattaccatatttgatttatattgtaatgaacattgtaattagaattgaattgacaaaaatattcttgctttatttatttatttatattttcaaagtgcgaaagaaaaaaggtaaaattatctttttattatttagttgtcattgtaattctcattcatgaggtgtaagagtgtaatgagaattcataaaattggtgtaatgcccattacaatagaattccattacaaaggttagaaacacaagccaaacattgcaatggtgactttgattctattacaatcttgattccaatcaacaaaacatagactttaagaaaacatagacttatcccaactatggattttgtactatgtgatttttttttttttttgacattttcaatttactacgagtggttgagaataaaaaaattaaacttatttttaacacttattaaaaaaaaaatcaaaatttactaaaaaaaatattatataactataataaatttcagtatcaaataattagaaagataaaaaatacttcgatatatacttaaaacaaattttgaaataaaataataaaattatcactcctcaataatttttttttataccaatcacaactattaccaataaagactttaggtaacatcactttagaatttaaatacaattcaagatgatgttagaactttatagagaattaagaaaagactaaaatcactaaatggaacttagtctataaaatatcattacacaattcaatttatttttctttgcaagagagggtcaaatgtctacatcaactatcaaaacaaaaacaccaccaagccaaaaaatagagatgggctctcaacgaacaagataataaatgaattcatgataatatttaaataatttacagcgtaaatatttaagtttaactttaagttgtaaatgtctaagtttaatttttggcgaaaataatattaatacttaagttaaatttttgaaacttctgtaagtatctaatcgttaagtgtcaagtcaataattatatgacaatccttaattagtctaagttattaaatttttatttnnnntttaaaaattaatttaaatatatctattaaaaaataacaagtgataataatttgatcaagtacttacaaaaattttaaaagtataatttaaatattattaacgttaaaaatttaaaattaaatttaaatgtttatttacgattaaaaattaaatatttacattacaaattactctaatatttattatttaaatatttacattttaaaattattctaatattaattattttctaattaattatagcactatcactaaaggacaccctccactgacatgaatgaattctcatgcttgtgagttaatgagaggcaataaattctgtcgagatttattattatattgaataaatctgtcaagtagttaaaatatctccaaaaaaatatcatcatcaccatcatcataatccatggaagctaaaactatatctaataatagcacaaagacagtgacatgatacatacacattctctctctctacaaagagctaagaagatctttagcaacaaatgtaaaaatggtcaaaaatattgaagcaataatcaaagatggctgttgttgttgttgttgtcgtctaatcgaaaatgctgaagaagattgaatctggatgatgaaattgcaagttccttgtgaaatattctgtgtggtctctaccgcgagaccttcaaagttacaagccctgtcatcttgatcctgtgcttggtagtacatgttgaaagcgtacgaggcattgccattcgcgtccaagttgttgcaagatgatccataaccgagcgctgtgcaatcagagaaagtgcaggcatagtttatgttatcagcaagtttgctcacatccttggcatttggattaaacatacaccatttgttaggaagatacattacactctgagcaggcacaggtaacttgttttgaccttgacccgaaagatcaataccaaatttaggttgtccatcgtacctaaaaatcccccaatggcgctcgaaacttcctggtgcaatgctcttggcatcctcatcaatgagtccaaacaagtacacttcaatgtttccagggcgcaatggggttcccttgttacttgcaagtctttgtagaagaccgttgtagaatctataagcgttaccagtgttagcattcttgtctccatcggttggccagcccacttctccaaccaaaatgggcatgtttccataaccggctgctctcaaagctgacacgagggtgtcaaagttggcatcaaacacattagtgtattggattcctgtagctgcatccacaacaggattgggtgcaccatcaaagaaggcgaaatcgaatgggaagttgtcattcccatagagactcagaaatggataaatgtttacagtgaaaggtgccttgtttgcatcaaggaactggactatctgtgtcatcaattgattgatatcagttcgaaaccttccagcagatggaacagggttgttttcgggtgagttgtaaacatctgcatttaagggcacggtagcttttatagagtctccaataccagctgcattaagggccttttgaatattttgaagagccgggaaagtggtgtttaagaatgaaccattgtacgacgataggaaaggttcgttccctactgctacatatctggccagagattagaaaacttaatgagaaccagtatagcataatgataaaaacaagcacataaccaaaacaaaaatgccaactttccaaacaaagattgttgtataagagactagtttgtgaaataatcatggagaagaaataaattacgaaacaaacacaataatagcatcggcccagttgtttaagttcacgaaaaaagttgaagcagattcttcaacaagacatgaatcagtaaaatttaaagagaacatatcagaatcatgtctttggtaaaggtaaagttcaggatttcgggtggatggtaatgcacgaaaagaccattacttcaagaatttatgcatagaatttcaaactgaaaagtgtttaaggatcattccatttcttctattattcatttcaggattggggtgattattttccaactgttgtgttttgattgattctctcattgcaaaagtagtcattcttgtttatgaggcttctaatgacaatccaaatgtactaaaacaaaagcacatgctaatatgtcttcaaccataaaaaggagactaagcttcatatagttcttttcttaaaaaagataagacagataagagaattgtaaaaccaataccatattgagcaacaagaacatgttctgcaaactttattattgatcttcttttcaacattctgtctttgatcaaacttttccactttccagaatttattgtttcaaaaagatcatattttttttctttttttacagcacaaagttttcctcaatattcccactcaccattcctttacaagaatcaaatactctgatcaaaaaaaggaaactaaaagtggggtaaaaaagattctcttccttccacaacaaatcagaaagataacacaagctttattccctcaacaaatttgaaaagaaatccaatcaaacacgattcaatctaagtatggacaaacaatacaatgattttaatcaaaccccaagaaaattaaatgtgaattcaaccaaagaaaaacagccacttaacaaaatcaaattcaatgtatgctatacctacctacctacctaccaaccaaaatcatatcatcatatataatataaacaaagattaaggcaaagatcaataaacaaagtattatatatatatatacacacaacttacttgatgttaactccaccactaaagttgtaacgagttacgtttctcttaacccattcttgagctcgtttatagctattcatagcttgaagttgatcattgggaatagccaccataacctcaagaccacttccagtcagagctgtcatggttgaatcttctgaatcaaaaagcttcactttttgaataccattgtctttcaacatctgaaccacagttttggggggcaatttatgtgtagcttgagtcccccaattcacaccaagtccctcaacaacatcaaaaccaaataaaccaatgaagaagaagaggaaaccccagagccttataaccaatacccacttagaaaaattcatcctttccatcattttcccgagaaaataaaaaatacccaataactaaaaactcttactttcgctaatggagggaaaaagaaacggtttttaccaggtgggtttgcaaggatcggcgaaaatcctgcgatcctgctttcctcaacctcttttattttcccacgaaaattaataacgcgttgtcgtgtaacaaaaatcaatatatatttatgtgaaagagtatatgaaccactccttttgttctgtgaatataaagccgattacgacaagtctaagaatctcaaaacaattaattatgaaccaaaataggaaactttatcagaaaaataggtactttatataaacgatctaagacgaatgagagagtcttgagatcgaaacaaaaactaataatgaaaagtgaaagggaagaattcaaaatcagaaaacagggtatttcctatttagattgaaagagagagagagagagtgagattgagattgagagagagagagagagagagagagagagagaaacagaattagagattttatagaaatgaaaaacagagatatttttcgtaccaaaaatcaattagatgtcggtaaattccaagagaaaaataatatccgaacaggaagaatcgattttgagaaatacccaaaagaaatatggaaaaaggaaattattgtgtgaagaaagcgacggatatggttatggaggttctgaatctgagtcgctccaagtccaacggctagaatttttgacaatttttgaagaagtaggaaaaattaatttgtggggtattattatattctcagtcggtgaactcaatctataaagtaatctaaatttattattattaataataattactttcaaaacaaaaacaaacatttttttttaatttatttttataatttttataattatatttatatatgatttttttatatttttatgttgtatttttattaattttttttgttatttgtataactcttatttttatgttatttgaatatttttatccggttatttttataaaaattttaattatttttgtattatttttataaaacacataatactaataataagaaataagataaaagtgcacaatttttactaaatataatatttgtgtaaatttttctaactttcttttttgcaaaaaaacataaattgttattggttatcatagttttttaagttttttaattaaactctct

SEQ ID NO: 37055 - DNA, 6865 bp, Cannabis sativa
tcgtcgctggagaagtataactcgtggaaccctctggagattctctcgtcgttttccgacaggcgcagcattctcgacacctgggtctgtgaaacaacactaaaaaaacataagaaacgacccaacccgataacaacccaaacgagaaaaagcttcatacgagtatagcttcttcgttctcaggagtcagagagcgagtcccagcgtagacacgaacgtggagacactgcggacaatcttggggttgggagacgtggaccatgactgaatcggaggccgaacaatccgcctcctcagatgggtcccattcgcattcatggcggtggagggagttggggttcagccgcagagggcggaggagggtcttggaaattgggtcccatcggttgggggccatcatgaacaggccatggctgcaaacgacactcgccagctcaaaacgctccgctgcttcaccaagtggtaacattaacgacacccactcttgtctgtcactttcaactctgcctcttctatgcttcttctcctctgtcattttgtaaatttctatgttcgacataatccaatgatgttcatttgtctccgaataaaaaagcctctttctagtttgtccctttttgtgtttatatgtatgtaattttttactagcattgaataatattatcctattttataagtaaacaaaggaaaagaatagttcttttcctatctctccctgtggatggataaagagctgtatcttaccttgttttgcattggggccttctgagtattacatgaaatggcattagacccttttgtgtttgtctgttgggaaaccttcaaaattcctttctaagcagtgcatgtttgatgtgagttgtaagtcctcttaatgagtgtaatgttttggtgtatattttgtgtgcacatacatcattattataaataatggtggagcaaaatcctagttagaagaaacaaaaatgacatgttgggtacaaaatattttatgaataaaaaacaccttctaagccaacttataagttgtttctgccgtctatctttttcttttggaaggtttctaccagctcaggccttaccttgatcaacaacaataaaagaagaaaaataagatagtaactctttcatttttcaagctattttctcatagtttgatcttttgatattacatggtggtttgcttaagtagtttgtttcaaacattcatacaaaggtttgagtcttggtttccttttatttttcattgtacttgctctattgataaaaattccagctgaggatatctttatgtgatgttagtctgttggcgaaattgtgaggactagtttttgaagcctcgtctgtttcgaacaatgattcatagatctctggtgcttgtgctgcttgctttgaaccaattgttacatgtagcaggagagacagagccccaagactgtaagttctattcaaactcaattttgcatatgaaatacactttcttttttcactaaaaaaatttgctatttagttttgtttgtatgtattacagacctatgagtctaatattcagctttctttgcacctcaagcttttcggtacttgcacaaaagccaacgtaaactagtttcagtcgtgttcaatttaaaatattattctctaatatctgtatgtttaatacccgatgaatagttttacttaaatattgtgctccatgcagatgcagtagtgctccaaatttttttttctcaaaatcttattgaattaaaagacaattgaatcagccttttcaatatcttgaacatcttctctgtgttattattggaaggaaatagttgtttaggtggtgaatcatatatctatttcataatcattatctctgtacagacaatgcgttgctgtcactcatgagtagttgggagaatttatcaatgaattgggagggtcaagatccttgtggagaaaattggcaaggagtttggtgttctgattcacgtgtgacaaagatgtaagttttggtattcgactgataagatgccttcactaaatcatttggacattaacaggattttcttttgattttagaatattaccaagtatgaacctggtgggtactctacctgacaatatacagcaactatctgagcttcagtcactgtaagtgttctattttcagtcttttctacttttagagcactcaaatcatttgctaacttcttttttcctgaatataaaataaatgttttatcattggtaacgaaacactcttgcatcatactactgtgtttttgttttcctttctttttactttcatgtttctgagtttttcccttgtggtatttgattgttcttcttgtgtacatttcctgattaagtgtttctttccatagggttctttcttataacaagaacctgggaggattgctaccgccatcaatagggaatttaaaaaaattagaaaacttgtaagaaattgaattctagactcggcactcaacattgtctgtctaaaataaataaataaaagtcttatctaattccttgttttttcacttttatggcagagctcttatcgattgcaacttttatggtcctattccagactcaataggaaatatacggcagctaaattttctgtaagggttatcaaattggaatttttataatgtgctattgctttggcaattgcatccaattcctttacaatggctatatttcatttcctgattttgtgatgtttgttctatggaattttgaagtttcagcacctgaaaaaattgttgttgctttttgttgtagagctttgaattctaataagttcagtggatcaattccaagttcaattggttacctttctaaccttcgttggttagatctatcggagaaccagctcgaaggatccatcccagtctctaatggaaccactacacctggtcttgatatgctttttggcgcaaagcatttgtatgtcagctgtttttacattttatttatttttgagctttataacttctttttttttttttgtgatgtagatctttacaacttcttgcttacatgaatttgtgctgtttcaaaatcattgaccatctacagtcatcttgggaacaataaactccagggtcgtattcccagtcagctgttcaactcaaatatgactttgcaacatgtgtaagtccctatattctttctctctatttctttaacatccttatttctcttgatgaaagttgtgcagatggttttcctacccatatgtgtagtaaataaaactaccgagtgaatatagtattgagtgatcattgccagtataaacattctgacattttttttgccacttgccaggcttttggacagcaacaagctgactgatgaaattcctgagactattggacttgtccaaactttggaggtgttgtgagtatctacttgcattcgcaagacttagtaatttcataatagatattacctgatttcaagtttctttggacatgatttcgagtgacttatgccatactttgccaacaggcgcctggatagaaacatattgacaggagcagtgcctgtcaacattaccaatcttgtaaatgtcactgacctgtaaggagaacaaaacaaataatccaactcagctttagcttgtttaggagtaatattgttttacatgagaatgtcactctaaagttttcagttgttggcttcttcaggctgttgtccaacaataagctgtctggtcctattcccaacctcagcagcatgaagttccttacttatgtgtaagtaattcattgatttgattactcccatgtagagccaggccaagtagacaatttaaaagtaatatctccaaaaaatgcaatctttcatagccaatcttaatattacacttttttcattattgctaaaataatatcagggatatgagcaacaatagttttgattcatcagctttccctgcatggatttcatcattactctctttgacaacaatgtaagctttctttgacgaccatgcaaaacctggaattattttctaagattcataaacaagttacagcattgatagacaatgtatttcatgatatgcttgacagatcaatggaaggcacacaacttcaagggccagttcctgtttctcttttcagcctccccaatttagaaactgtgtgagttctcccattaatcttaagctttctaatatcatgaaagaaagtagtgaattttgaatgaaacaatctcttgttttcaaatttctgtggccagtgcaagaaccatagtgtatattattatatagggtataagataatttatctaacttatggtggtgacagggtactacgagaaaaccagcttacaggagcattgaatctgggagccagctatagtagccggcttacgctagtagatatgcagaataatcaaattagtgaggctccaagagtcatagaaggaaacattactttgatgtaggccacattcctcaaatattgtggccacttctaggaaattatggcttgtagtaatgctgtattttttaactcatttgattttgaatattttttttctgcagactcacaaataacccagtttgcccagaaacgggagaggcaaaaagttactgcctggcccatgttcctgatacctcttattcagtgccacctgtaatatgtaaaccaattatctgcagttcaggccaagttttaagccctcactgcagttgcgcttatccgtacaagggaacatttatgtttagaagtatttccttctcagatttgagaaactcaaactatttaatggatcttcaggagggactcataagtacttttgagtccaataaattgccagtggatacagtatctgtaaatgatcccacaatggactcattggcatatcttaatgtgaccatagaaatcttcccttcaggcgaagatcgctttgatcgaacaggaattactggtatagcatttttgcttagcaaccagatttttaaagctccacagatgtatggaccttatgcttttattggtgatgactatgtcaactatgcaggtactactgaaagatacaagtttccaattgaactaaacaatgatataattattaaattcaatgcttgcactttgactctcattctctctgtgctttaccatgaagtatctcttgaaaaaagcaagtcatcaagcagaggcattattattggggcagcggttggcggttctatccttttgctatgcttggtccttgctggattttatgcattccatcaaaagaaaagagcaaatagagcaattggaaacaatccatttggtgagatcaacatatatttagatttcggcagcttatagttaaagagacggagcatcataagttaactatattgttacaaaaatgcagcacaatgggacacaaacaaaacccggggtgatgttccccagctgaaaggggcacaatggttctcgctcgaagagcttaagaaatttaccaacaacttctcaaaattgaatgagattggatctggcggctacggaaaggttaatttactgtctcttaatttctattacttatatattaactttgatttaatttatgctagccaagctacaagtttttttaaagcagccatttgtcctgaactttacatctctgctatgcaaacaaagtaaaatcactttacatgttggcctgttttctccctctttctcataaacaaactaatttatttgttgttcctatcatcacaggtatataggggaattcttccaacgggtaaattgatggcaattaaaagagctcatagagaatctatgcagggtgtgccagaatttagaactgagattgaacttttatcaagggtacatcacaagaaccttgtcagcctagtgggtttctgttttgatcaaggtgaacaactgctggtctatgagtttgttccaaatggtactttgagggatactctatcaggtacaaacacaaactttgatgtggagttgttcatttttctaagattctcagcttttaatttgtcaagtaatttgttaatctaccataccttccgtgcctgctaaatgagtgaacaaagtcatagcaacatgaaagtaataagaatcgatcaagctgaaatagctgtaacatctgagacattgtaggaatttgctatttatatcctatgagcatgcaaatgagtttttgacttgattttcacaattttttccaacataatatttctttattttgaatattatgttctctatagcctcatggatttttatgtcaaaagtattttgagtatctttccttcttgtatctttgtagagtgtgggtaaacctactgcatttatccttgaataccatataattttcctttatttcccatgaatgtaaaagttctctctcactctctctcctaacatttataaagttgtgcaggaaagtctggagtcaggttagactggataaagagacttgaaatatccctgggtgcagccagaggcattgcctatcttcatgagtatgcaagtcctcccataatacatagggacattaaatcaaccaatattttactagataagcacttaaaagccaaagttgctgattttggtctctccaaaattatgggtgactgcgaaaagagtcacgtcagtactcaagttaaaggaactgtggttagtatgattctctctcattccaaaaattttaattaaacaacaaaatgtggtcaatataacagtaataatctaaattcagtttggttatatgtattttcttctattctgttgaccggtgtatagatttgaaatgtgattcactatgagtacttgacttggttttatggatgttagaattttttaactataggacttcaacagaaaaatttgcaactgccttg

SEQ ID NO: 37056 - DNA, 5403 bp, Cannabis sativa
aaaaacacagtatttttgaaaagatttccgtgtgacaatatttttgtaaaaattaacctaaattctagtatttttgtaagtttcccaattataaatataaagaaaatacatttgggtctatttttgggtccattaagtcgcaattgctcactgattaatgcaaaacaagcttcactcactgtaatgagtcacacctgatcccaccttcactctctcaataaagccaaatataaagtcaatgcagtggtcaactttttttatcaaacgatcaccaccgttgaatttatgttttgacgagtcaaagaatctaccatgtggacgctcgcaccgtatctttttctctcttccctataatttgttgtagcgccaaattttcgcggcgccttctcaaaattcgaattttcacggaaaagcatagaaagttgaaaagaaaattttaaaactaaaactagaaacaacttcattatccctctatttttcagatctgattctcactcaattcgaactcttctctgaatatctttactttttctactcaaaatcttcaatcatattttcttttcttcttgattctttaattaaatttattgcgggatgagctttggtttctttcaaatttactaagctcaaaatcgaacgaaatcaatggtgagggagcaaagtgtcgagtctttttactcaaagctccgtcaatcggcgaaggagtcttctaattctcatctcttgatatttccgtcaacttcagatgcggattcactttgcgctcttaaaatcattttcaacgttcttgaatctgattcggttcgatatgcttgttacccggtttcttcttttcaagaaattcacaaatatgcaggttcagatttgtcttcttcgtctgagaaacctgtttctatacttttgattaattggggatgtcaccgggacttgaggaaagttttgaaattagggccggcggcgcgggtttttgttgttgatagtcaccgtccgattcatttgcataatttgtgtgagcagaatgatcgagtggttgtgctttatactttggatgatgaaaaccagtctgatttggcgtatgattttgatgtttcggctttggctaatgcgagtgagatgaatagtgatgacgaggctgatgaagattcggaaagcgatgatgatgatgacagcgaaagtgaaagtgaaggggaagaagaagctggtcgtgggtcgaggaagcgaaggagagtttctccagaaaatgaagacgatccagttcagctttttcggaaactgaaaaaggagtattatcgaatgggtacgtttcatggtaaaccttctggttgtttaatgtatgaattgtcacattctttaaggaagaacacaaacgaattgctgtggttagcttgtgtttcgttgactgatcagttcgttcatgagcgtttaactgatgaaagataccaagctggggttatggagcttgaacaacatataaacagttcgggtaatttggatgctgtaacttctgtaactcttaaagatggaacaaagattcgtgcaccctgtgcttctagaattgcttatgaagatgagcctagactaatgttgttacaagaatggaatttgtttgattcaatgctttgttcatcgtatatggcaactaaattgaaaacctggagtgataatgggatgaaaaagcttaagcttcttcttgcccggatgggatttgcacttgtggattgccaacagaagtttcagtacatgaatcttgaagtgaagaagaagatgaaagatgagtttgaacggtttctacccgagtatggacttactgatttctattacaggagtttcttgaggctacatggctatagttcaagggtttctgctgcagatgttgtctatggagttactgctcttcttgagtcttttgtgaaaacagatggctcttgtgcatctaagcagttcggtgtggcctatgatgctttgtcgttgggcaatcttgataagctcaaagatggaatgcaacatgctattaagatacaacgagcgattctcagacagggaagcacagcgataactaagagcggttgtataagaagtggaaggaagttccggtgggtgaagcttgaagattcagtggatacaaaactattggggtacccacaagcattgactaagttttgttattttttgatggatgctctgcgggaaaaaggcgctagaatgaaacctttgctatgtgcttgcttgttgcatgagcccaacaaggtgttgattgtaggggtttgcggaaagcctcgacttggggctgttcaaggaaatgcatttggaattgcatttaggaatgcagctgaggagattggagcagagttcttccatgaattgtttgagtcttcttggattgtattagatactgcttctgtcaattcttttatggtaaggttaaccgagaagctctaatgtggaaaatctgagaagcaacataaagtttgcacccacaggcgacaagggctgtcctaacggtcaggcctatgatttactcccacaagtttggagtcaagaaaagagaaaagaaagaaaaaaaatcaactgttcagctacttgaagcaagtatgttcttaacaaattgtggcttgttgtctaagatgttccaaaaatgaaatcttgtagacttatagttgatctgtaagaaaaatggtgtgttttttcccctttcattttaacattatttctgttgtaccatgatattcttctaaacattaagttaacttttagctctcttaaatttgtaacaagtacattcattttatgaactgaaaaagtggcataaatgtaattgtagtttcattctccactgttttatgtacaactttgtttatgtattacatattcaaaagccatgcttctgtcataaaattgtagatcacatatttctttctcactgaatacatacatacaaatctgcctccatctttgatttggtgcttctagacacattgctctttggcatggtttggctgttcttcagctacaagatctagtatagtgacattgtaatttgtattttgttcattttcttttgatgtgctcttagttcttaccccttcatgtaactgtttgttcaatgaaatgaaattaaattgttagtttatcccttgttaatattagtatctagaattgcttacagttttcccggaagctgaagctgacctaagaacatgtttagcagtaagctttattctgatgcctggcttttgattcatttggctgtgaaaatttagctgagctttgttttgttaaccactctctccaccaacacatgttgataacgatgccaatatttttcttgcagacaaagggcccgtttggcacagctttaaagttgtgatataaatatgtttggtaaacagtcaaaaaaatagttttttgaagaattttttgttgctttgtaatttttttttttgttgttttatagttatttttatgttgtttgttaagttgttttttattttactgaaacatagtatttatataattttgaaactttaatagtaaaaaatattgtcagtaaaaatgacaaaaaaaaatatttttgtaagatcttacaaatttattagaggaattacctcatgtagtattttctaatttatttttcattcagatttacgtttcaggttgttccggtgattgaacaaattttagctgtgatttaagttgttctattagttgttatataaatttttatgtgaattttcgtataattatatataaaaaaaaatattattttaaagtgtaaaaaaaatattattagggaccgttattataattagtttaaatgaacatttattattttgattgtcagttatttctctttaggaagaaaaaaagaaagaaaagaaaaagatatgcctaaaaagagagaaaagatttatgacaaagggaaacacacttttcatctaccaacaacgttcaaacttcaaatttgagttgagacattttttttttaaaaaaaaactccaaatttaagaatccaaaatacctttattttatttttaccttacaaaagaaaataaaaatattttttaatataaagtattaagaaaaaaaaaaatttgttgaatctttatttttagagaatgaagcctcacagatcctatcaattcttagatctaatcaacaacaagatcatctgatcttatactataattcttcaagaggttatatgatcaagagtgggtattggaatgccataaatttattaaaattgggtcaaaacgatttattttcgtgctcatcttcttggtggaagtatctttagaatctttctgttctttctaaggtgaaggtgtttatttgaagagcttgtttagattggtttcctattaagtctaatcttgtctctcataaagtttccacaaatcttatttgttaagtttgtgggctaaaaaacgaaacttcattccatgcactttggggttgtacaagtcttgcttccatagttaagctcatggattttactcttacatctaaagaaatttctcgggttagccttctttctttccttatagaaaaggctcctagttcttctttggcatatttggtatcgttgaaaccattaggttcatgaccaaaaacttcttgatatcgaaggcatactgggctgagccttttagtttgctcagacctatcaagaagctaaggtgagaattggatgtgtaccttctggtcatacttcgggtgttagtccgactgttcggccctagaaggcaccgtgataacttctagctgaagggtggttcaaacttaatattgatgctgggttacgaccttctggctgttgtatgtgttttggagcggtcgttcgaaactttacaggacattgtgtggcgcctgcagcgatggtgggtcttttagttctgtctgtcggtgaagctatggctatgctggttgggttgcaattgtgctatcatcttggatatcataatattgaggtagagatggattgtcaaattgttacaaaacttgtgaataaaagagagacatgtctgacggattatggtttagttttacaagatatttatttagtttgggataagcttaatgtttctaagtttttattttgtaatcgatctgagaactctatagctcataaccttgccaaactcgctctttctcctgatgaggcaagagtttgttggcagtaattgtttttgaacttatattagcgttgacctaatgatagttttcttttattcaaaaacaaaaaaataattttgtaatcaaattctcttatattttaatttgtatacagtttaccttctcattttttatggtaataatttcttaaatttaatttttatttataaatttgaggtatcaattacttttttattatataaatactaactggaattatcattttat

SEQ ID NO: 37057 - DNA, 5175 bp, Cannabis sativa
ttataatactgcataacagagaaacttgtttgtcttgtagtatattggccttgaaaatctagcaacggtcccctaaagcaacggtgttaaataacaataaaacaaacagctaagaaattatgaaagaagagagagaacaaacaaacaaggcatgctctgtttgattgctgagaaagttttctttcaagaatgatagaaaatatttggagtgagtgttgtaatctattgtattcatttttgtatagcttagcttagcttaagactttatagactttacttactttacaaaattggtaagtagaaaaacaaaaacataacccatgagccatcaatctctttaaattactaatctttattattattgctttttttttttttaaggggtgggagccttgtgtgggttttcctttcttttcttttttcttttcactttgtaaaattaaagttaagggcactagtgctaattattccttctctgcatttttctgtttactggttcccctgatgcttgacaccagagttcacactcaatcatttttgggcactcgtggccttaaaatttactagataaaaagatggggttttcaagagatggaaatgggaagtagggggtagtaactcagttgtcggcaagttctcttctttctcttcttttttagctgtttttggttttggattatttgggttgtgtagtgttaatagtaaagacccaattttttttttcttttttctttttaactctttgttaattggtttttgtttgtctctgagtttatctctagtttagattgatggaatagtatcttttgtttgtgctttttgcattgctttttcagttgaagcaaagttgagatttttagctggtataatatgagttgttgtgggcatttcttgttttaaaggattgaactttttgagtttatggtacacaggatcagtctcaaaagcacacttagtttttccctttattatttcattaaggatatataataagattggtggaaggtgaggttcagctttagttgcagctttgccctaaattttcttattcttattctaattcttcttctgttatacctagagagaagagaagtttagtattctcaaaagggtcagactggttttcttttattgttctaaatgttggatcttgtttgaagaaagttatagcctttagttaaaaaaatggctgaaattaggcttacaagggtagaacaaggtcatactaagattagaaatgtcccaattgcagtaaccccagaaggtttctggtgttgcccttctcctgttgtgtttcaaaagactatcaaaactcaaaataccttaaacaaacccaaaccctcttcacctcctcacaagatcaatccccatagaaaacaaaacccaatgtctgaaagaaaaataccctttacaccatcaaggtcagcagctatttctgatggtcaaagaattctcaaccctgagatagtaactgagggacctgttcttacttcatctgttgttacagagagaccccctaaaccaaaagttgatactttgccaaggaaggtagctattgagtttggtgaggctggaactagtgatatgaaggtggttttattgggaaagcaaggattttgtgtgaagttgagtgttcacaaaaatgttcttgtggagtttagtactttctttgctgataaactctctgaagaacaatccagtttgtcaagtcttgagattaatgattgtgaagatattgaaatctatgttgagactgttgggctgatgtattgtaaagaaatgaagcaacggttgatcaagcaaagtgtctctcgtgtacttcgtattctcaaggtataatcaatttcattgttatttttcagtactctaattttgttaatatcttgctagaaatcttataagaagtttaatgaacttattcaacattacaaatgtctgaattgcttgaacttatattatatggatcattatttactatgtaaggcattgttggtcatagataattatgttgctattagtcatcatcaagtgcagaatatgttactatttgatatttgtaccaatcaagttttctttgcaatgctttatagtcaataggtgactttttattgaagcaaaattgtatgaccaccttactttactcttctattagccttgtcacaactgattggtattcattggtgatgattccacttttctttttggttttctttatgattattactaaccatcattgcttgctcactcaatgaaattgaatatttcaactacatttttctttatcccgggttaagctttgtcgattagattagtatgttaatacaaccgatctaacccgagatgcaataatttcaggttgcagaacaacttgggttcaactcatgcatccattcatgtttagagtacttagaagcagtgccatgggttggggaagaagaagaagagaaagttgtctcgtcggttctaagactccaaggtgagggtataggggtatccccagtgttgaaaagagtctcttctgaaatttcaaagccctcaaaagacacacttgttcaaatcattgaacttgttctcaaaagcaacgatgagagaagccggcgtgaaatgaagtctgtagtcctgaaactcctcaaggaaaatagtgggctcccaagctatgcaggctctgctgacatttgcaatgaaacaatttatggttcatgccaaagttgctttgattcactactgtctctgttcaagcaggctgcagaccccgagttttctgataagcaaatggaaactagagaacccgtggtgaagcaaatagctttagaatctgataatctgtcatggttacttgagatcttagccgataggcaagcagcagatgaatttgcagtaatatgggcaagtcagcaagaattggcaaccttacacgaaaagctccctattgtgtctcgctaccatgccagctgcattacagcgagactatttgttggcattggaagaggagagctactaccatcaaaagatactcgccaattgttgttgcagacatggttgcagccgttgatcaacgactacagctggttgcaacacgggtgcaggtcatttgatcggaaggttgtggaagaaggaattggtaggacaatcttgactttaccattagaggaacagcaaagtattatgctttcatggttaagtagtttccttaaagctggtgataactgtcctaatcttcaaagggccttcgaagtttggtggcgaaggacattcgttcgaccatatgtcgaaacacaagatagtaactcgtttcaaacagataactaaaagaagttaatctaaatgagtttgagagtgatgaaataattatgttttgtaaatctaatgttggctggctactcaaattatcagggtgaaaaggacatattatacatatatggtggcttgagttgaagataaaacactcttgtgtccattgggaaaaagctcatttgggttgattgatttgatttgttggtttatgtaaaattagtgaaaaagagtaatctttatggttttgttttctcattgggtatgaatgtgtcattgtggataatatatataaatgctttggataatgtatttgtgtacttatctatacttatgactatatcaggagtctattatgttctgcaaatattacatttttcatttggaaacatgatgaacaagaagaaagtagcaaaaatgggcttgaagctttcctaaaagccatattttcatcattggaatttagattttagaggggaaagaaataaaggagaggattaataaatcttatagcatttatcccacaaaacatatatcttctaaaaataaaataaattaatgagttatgaaatatcaagaaaaaattgtttcatagaatttgagttccaaacaaaatctaatctaaatattgaatgtttatgtgatgaagatattttaattagtttacttttggaataatgatatttttgggcaatttattttacatatcactttatatatgtgtaacaaaatatgcacaaaacaacatttttcaatcaagagcacttaatttagctcagtgaaggtgagagatgttttttttttttgctaaatgaatatggtatgatatttttgcaagatgaatattcatttacaaaatttatgattcaatttgcactaaatgaatatggtattggtatggtatatttgcactctattaagatccaatatctctcaacttgacttagcttatctaaaagatttgttttttttttttttttttttagtttgcttgaaaatttatggtatttttaaaattcatttagcaaataattgataactttccaaaaaccttagtgttgcatatataagtaaatcaccaaattaaccagtgtaattataattaactcataaaattaaagctaagctaagtaaagttgaaagatattggatattttatgtgaaattaagtaagtcctgaatattaatactagcttttggacaagcaatgggtagcactcagaagtacgcaaaattggacagatttgttgataaaacgaaatgtgaagaattagcttgaaatttagaggccataaatgactaccaaactagtcaattaatatagatatatttggttacaaatatgtaataggaaacctagtttacatacatatggtatatggttggtaagtaaatttaataaaacaaaatatagtatttaaaattaaaaaatttaacatatatggaatatgttatttatgataccatagaaaatattaaaattcctttttatattttatttttaaaataaaacaaatgaaattacaacgatcgccggagttgttactaatgctagaaaaatgtcgccaaagtttgctgtcggtgctaaaaatcactggagttgtcaatggtgtcaaaatagtcactggagtttgctgtcggtgccggtaaagtcaccgaagttgatttcagtactgaaaaagttatcgaaattagtattgtcactagaaaaatcactgaaaaaaattactgaaaaattcgtcggagttgtcaccgtcatccgagtttgatgccggagttgtcagcggagatagacgttagaatctgactaataaaaatcagttacgtttatctgctagtaaaaaatataaacaatgaaaccaatttcttaaaataataaaaaaa

SEQ ID NO: 37058 - DNA, 3206 bp, Cannabis sativa
aacagacaaaaaagttcaaagaacatcatttaatagatatcaaagttcggaagaaaatttctaattaacatattcattattccgattacaaccaaacattttcaagttttcttttatatttttttattttggaagaaacccattatgacttcccatatatatgaagaaaaatggtttgtgtatgtattcaacattcaaaaaaaaaaaaaattgtcttactagcactacttgtatttatttatgtaatcaatatgcaggggccggctttgaaatttagtggatcataggaaaaaaaatatggtattttttaaaattgataaaaaaaaaatgtgtaattttaaaaggggataaattttttttaggcccctaagctaggtggtccctagacacagacctaacccgcttatgctcagggccgaccctgcatatatgtgacactaaacaatattttacattattattgattttaattattaaatctcatgtattttaatctaataattatggttaattcttttgtaaagatatttcactattactcaaaagaataatcattatatgtaggggctaaagaaagaaagaagtggctctacttttttaatgacctttatttgctaataataatgctaaaactaagtgattccaccttgaatgtatacgattaagcactaactttgaactttcatagtgtttatttaatattaatacttatgtataacaacaagtgtttgtcacacgtttttttttcttttcttctttgtaatcatagcttttctcctttttattatcattattatacattttttttattgaagaggaaattatagactgattaaataacaaaaagacaaagattaacaaaacgtgacatcatttaaataagggtgcgattttaattttatttgctttatagaaaagtacccactaccaactagattctttttttttttgtgtgtgtgattatattctgattttatttatatgattaaaaattaaaaatccaacaagttagacgaaaatttgtctttaacataaaatgaagtgcatataattcaagttattatatacatgtacgaacaatgaacaaacacctatacttcaataataataataataaataaataaataaataaataatttgtaatactatttttttgggggggtagggtactgtattccaagttccaactaatttaattaaatgtaaaatatactccagagatttccatgcttgaatcaaataaagaatagagagcaatttactaataatttttgttgacaaaattgttagctaggctataataagttttactattttacgattgatcagttcatcatctttaaaaaaaaaaaaaatcacgtgcaaaaatataaatattaacccccaaacaacgcaactagccaattatatgtatttgtattatgagggtgtgatatttattttaattttaaaattaaaaatgaatagtaaatacatttctatgagattgtaattgcaaaaatcaagaaatctaaagaattattgtaattaaagacttaaacaaatcaaatcaacgtgattgtatttaattaaaatccttgaaatagaagtacgattagatataattaattgggagtattaagtcacaactatttattaatttatttcaaagaagagcaacattgcaactactactatatggatacaaataaataatattatcagaaagagacccactagtatttattgtgtctatttatacacattatattttgttctatatgttgtgtatgtatgtacttgtaatgtaagcattgtactcaaaaaaaaaaaaaaattacaaatcataactttaggatgctaaatttgaccaaaagtacttagttttacatttaaagttaaattattatatgccttttttagctggagtaatcaatagaaatgagcacctttattacagtaatattatctaaaatgtgtattttggtgtcatttggaaagaaaagaaaacactttacctaatttttccaaagtaaaagagctaaaagcctgagtagtaatttttaaacattttacatattcatatcaaattaacaagtatttaatattatacattacattgttgagtacagttgttacaatgtcacaattagattgtaattaatcacaacaaaatcttaaagcctgattagggctgattttccagtatgccattattattagacaataatgttcttttcttttaaatgctacttgtcacactacataagatttcaacattttcttaaaataataataaataaaattatacttatttgtacaattgtgagtttttatatatataaaaaaataatatagcaaattaaagcttcaatgaaagtcagctgaagcttctgagtctgagagtgacaatgcatctgccggccagcaatacgtcgccgttttgagattaaaataaagtagaaaacgaaaaagaccttgttcacgcttcacacgcgcgcttcatagccacgtgtgaaacttgctctttttttatttgaagcttagcgtagaactgaggtcatttactgatttgtcagacaccgacggcttgcctttcagcttcacctgcttctgttctggctcagctacaatcggctcggctcagcctaccttcttctccttggactccactctctagtattattttcattctattaattgtttttagttgtcaaattatgtttatttacattaaattaattttattattggaagactagtagagaaatatgtgatagtccttgttttctttggaaattaaaaaataataaagattaattataatttttttctctatgaattttgatatgtattaaattatattatttgaacttttttggtcgttaaaaattcgcttgaactatttagattgttagatttaaagatttttgtttaatttcattcaattttactgttttaatgattgtttatgtactaaatcatgctccctagactttgatatttatcaaatcatgttagtttgatatacgaaatcatacccctaaattttcatacatattagaatatttttactaaaattagataaaaattattaaatctaactatctcaataatttaaggagaatttttaacagccaaaaatatttaagaaatataatttaatacatgtagaaattggaggaggaaaaatcctaattaacaataataaaaatatgctaactat

SEQ ID NO: 37059 - DNA, 4336 bp, Cannabis sativa
atatatatatatatatctttactaaaaagtctgcagtgaaaaaacggaagttcatatttaaagattcgcatattaactttttcgataaactagcattaaactgaagggaaattagcacaataaaccatttcaaaaagactcagttaggattataattttatactttcaagaattgttctccaataggctcaccatttagctctaatgcagaattttaaagttcttcgtcagagaaagtcaaagcagagttatcaatctgaactataaattcctacaaattccaccaagcttcatcacttgaacttggtgcatgaaacataaacttatatattaccttaaacatccctttcgctattcttctcttggagtatgctctactttctgagaaaactattttttgtaattttagaaagagaaagatgaaaaggactaaaacaataataaaaaatgtttagacaaaaggtaacattagctacatactacatttagctaagaaaataaggtgcgctaaataagagtagcaaaacaaaagcaaacaaaaactacaaacacaaaacataaagacgaaagaccaaacagtaagacagaaggcaaattcaggtaaaatcctttatactaaaataaaaatgtcactcaactgtagatattacagaaaaaaaatagatttattttttagaagagtgataaaagaggtcatttactctgagaatataatgatgagatgggaaaggaacatacctagtcgtgcctgcccgtcaccagaggaaggcccgcgtctcggaggaagcctggcgtctctctctctctctctctctgagctttggccgtgacggacctcgcgccgcgcaggcagaggaagtcgcgccggagttctggtgccgtgccggaatctcccagtttgtggttcacttctgtctgagcaggcagaagaaaccgacaggcacacacaaacacgagaacgaaagagatttggggtttaggttccttttgttcttaattttttttgtgttttattttgtagtctatttatttatttatttatttcaaaaaggaaattctacacctccatatactctcttcatgttttctactttatagaattttaattttttttttttttcagtgatattggcgcaaaactatttggattatacatttagttacacttaattttatatactaattttaatggtaaaatctttaaactgttttgtttttactattatgttagatttcctaagtgtcaaggtagattgtctatatgtacacaattataaacttaacatattttcaattgtccatgtaacgatttaaatattataaaaataatttaataaataaaaaaattaccacaaaaaaaattgatgaatcagagaagttgttattgctcaaaataatgtttatacattctataagcaccttaactgatttgttaaggtcttgtcatatctatttatacataaatttacaaattgtcaaaccaaacctcatcacttcggctaattttcgtaggccatattagaacaactctttgttttacagtttctttctctttgaccctggcaattaagtgcacagtatttggttcttttccttgccatatcaattcatttctagatttccatacatgataaacaaggctaactaaaccagcaatcatgaccttctttctaaatctgctagttttaaacatgtttatccatttggagactcagcctgcatcagtaacagcagagctccagccaagccatcttccaatttcagctatgcattccttagtcgtgctgcattcaaaaaacaagtggccatttgtttccacaccactgttacacatcaaacatgttggacggtcaatgatgccaaatctgtgcaacctttctcttgttcttaatcttccttgaagtgccaaccacaatataaaaatgtgtttagggatattgaatcttccccatacttgtgcacaccagtatttcttatcttgagtaggacataagagtctatatcctgctgcaatttggtacttctcttgtgcaaactgttgtgtattaatcatggggcaaatctggtttttgagagctaccaattgcctccaataccagctcccatttgttgggatagggtagctccaccattccatattctttatgtatacagaatgtatccacttgacccacaaattttcttccttctttgcaagagcccaaacatatttaatcattgcagcttccactcttttactcttctaaatccaatacccccatctgcttttgtttggcaaatggtgtcccaagatacagctcttgctccttggaacatgtgttggcctttccattaaaaggccctgcatattgcttcaatctctttaatgactttctgaggtagtatcatgacttggctctagtaggcatatatggctagcaaaatagaattaatcaacactacccttcctgcaaaggataagtgccttgtgctccatgttctcactcttgcagtcattttcttagcaagtatagcacaatctttagtagaaatcctctttgaatagagaggaattcttaggtatgtgaatggtagactttgttgggaaaaaccagaagctaccaagattcttgtgatgtcttgttgtggcatgttgttgcaataaattgcagacttggaagcattggggaaaagccctgaagtgtgtgaaaacagcttcaaaccttgcagcatgtataagacactattgtaatcaccattacagaataacggaacatcatcagtaaagctaagatgattgagttgaagctccttacatctgtcatggtactgaaaatcagctttgttaccaactttcctcataattcttgtcaaatattccatccccagtacaaatattcaaggagacatggggtctccttgccttaatcccctctttgaggcaaagaaaccatgcatctctccattaaacattagggagaatttgggagttgtaatacatcttaatacaagtcgtgtgaactgagcagggaacttgaaagcttctagcatttcctcaataaatcgtcattcaattgtgtcatatgctttctgtaggtccaacttgatcatacagttagctttcttagttttccttcaataatgcttaatgatatcttggcatatcataatgttgtgtccaatataccttccttggacaaatcccccttgattctgtgcagtcaagctaggtaatacattccttagcctatagcatattagctttgtagctactttgtaaactacattgcaacatgctataggtctaaagtccttcactgtgctaggacatttaattttatggaaaaatgttataacagtggaattgatctccttgagtatcttccctgtttccagaaatcagatcactgcttcacatacctcattctctaccatttctcaattatcttggaaaaaatagcttgagtagccatcagcccttggagctttaatgcctggaatttcaaaaatagctttcttcacttcttcccctggtatatcttgccattaaagtcttagcctgtagtgcatttagagtaggtcccagcttcataacaaatgtcttgacctgtttcctatctttcattgtagaccccaacaattttgtatagtaggctaggaaagcatcaacaattttggttggatcattgactcttgtgccatcagactattctatagataataccctgttttgtcttctccttctttttatgctagcatgaaatatggttgagttgtcagctccatgtttaacccaatagagtttttccttttgctggagcattgactgataatcctcttgtttctgtaataacagctttcttgcttcatgttcctttctgtgcaggtctgcatttaggggatctttcctaatttcattttgacactcctctaattcacctttaactcaaattatgtctgcctaaaggtctgaatacccttctttattaaaaagaagattttttttattctttctctttcctctttttctttcattagcagtttaacaccaccaccaccaccattatcactactacaaccactattgcaccactacacccacaattatcaaaccctaaccagatcctaaaacatttagggaacaaaagtaactagattaaagcaaactaaagatgtttgagaacccgcaagcctctaacccctttgttgcaatctccttcttattcctgattgctcatctttgtccaaaatccctagccgcctcaatcctaacctaattaaattccactattaacggagcaggtctaataggtctaaccttctatggcgtcgacttcctgttagaaattattttacc

SEQ ID NO: 37060 - DNA, 3249 bp, Cannabis sativa
tgtaagctttttggttcagattgatatgcattctcacttgagcatgaggttagcaagtgagtgggttgtgtgggtctttctgtatttgcggtcccgtgttcaagtcccgtatatgctatttttctcttaatgatgctatattgttatatggaagtactgttaacggccagagaattgtttaattggcttatataggcaataattgtttccctatttctgaacatttttttaacgttttgttttgtcacttggtaggttaaactgttaaggtttttgagacttctatatttgagtgcttggtgtgaattgttagtaaaaagacgatgtcgagtggtgtagacacgcactggtgttaccaatgcagtcagactttctggcttcgaggaggagatgttgtctgcccttactgccatggaggctttgttcaagagattgaggagattcatggtttggggtctcagaatgtatctgcccctgattcaggagaagtagtttctcatcaaagtcaaatgcctgatatttttgatcttatgtatgctttgatggggcgaaatggctctgaccgaagaattatagaaactatcagacatagaatggctggaagaaatcctaacttcgatgttagaagaagatctgttcccgaacagaattgggggaaccccaactccaattcgacaccttttttagtatttcatggtcaaattccaggattagccttttctaatggcagctctggaagtggacataggcgtggtgattttggtgactactttgttggcccaggactggaagaacttattgaacagctgactgtgaatgatcggcgcggccctcctccagcagctcactcttccattgatgcaatgcccactatcaggatcacacaagtgcatattcgtactgacttgcattgtcccgtctgtaaagaaaaatttgagttggggtctgaagcaagagagatgccttgtaaccacatttatcactctgattgtatcgttccttggctggttcaacataattcatgccctgtttgccgtgttgagctgccccctcaaggccggactagtagtaccggcggtagtcgaagttgggttggaggaaatggtaacagcagcaacagcaatgtagatggtaatagctctaatagtagggagactggtcgtcagacctttggaagaagaagcgcattgtcatatctctggcctttccgttcatcaaattcaagctcatctagtccaaactcgacaatttcaaactcatcaattccaaacacatcaaatccaaacactcgctacaattctgaaactggaggaaatagctcatcaaccacccttgaacataacaatgagatgagttactctggttggccttttgattactagttgtttgcttggttttcttgtccagtggcatttgacaccaaataaagctaaataagtatggtttggtgtggaaatgctttgaaaatggtatgttcttttgcattatatatactattatataatgtagcttaaggtcagtagaagctcgatggacttcatgtaaatgttgtgctggctttaaaggggctgcaatttcttttgataaatagtttacgttttttctttttttcggtagtttaatgaatgaatgtgtcttatagagtcttgttttggttttcctttctttttttatgtttctctaccatccctttcattagttttccttttaacaaacagattactaagattgggataataatttggtttcctttctattaaaaagaaattattaaattactgtagttttgtgcttggatgattaattaaaactgagttgaatcatgttgagtttaatatttctgttttacacgtacccatttaattaattaatctgtcaaaacagtccctaaagtgagtctgaaacattcttctttttatttcttgcaatcttattcatgaacttgaatgttatagatattttagtaaactagacaagagtgtagaagagtaataatagtactcatatccaaattagccttaggcaccaaactagtattagcatttttcttgtactttctctataaagcccttgctggggcctaggcataatctcttcattttcattggactctttttttcaaactttctttctttttttctctatctatcctctttaaggtacctaacgcatctttaccaccctcttttttggttgtttccttggctcactcagtgcactctttcttttcacttgtgttcttctatccaataagtacattacccttttactcatctttatcactcattcttttatttatctttttgcttgactatgatataaataagtagcctatctcatttattgatagaaaagaaaaacgtttttctctttaattgaaatttttatttccctaaaagaatttaaacttgtttactctaaagtgttgcttttaaggaagttgctgtaactttcggttctaacataattagaaatgtttggttctagttaagtatgcaaacaaaattgattgtgaaaaataatggttcaatcccatgcgaccatagtcgagtccaaattacaacaaatgacttcttgtctggttttagttcagccgaaattaaaacacaatattgaaaagcgtttttcccttaaagtttgtgctcaactatgtttaaattgttgttaggtatgttttaggtgattatatatacagggacacgattttgtcccgtgatgtactttcatggaacatatttcgtggtacattagatgggtctcagggtacattagatgagtctcacggtatgttaccattttttaactctaattactcctaaatcaaccccagccctcagatcaaataactttcccatcgaacgactatcgtacatcacggaatacatttcgtaaaaatacattacaacaaaatcgtgtatatatataaaaataaaatatatgttgtaatataatattttttatttagacaacttgtttaatctgaagtgaaaattaaattttgaaatacttggaatgcaatgaagaaactcttcttggaaaaaatatgatctgctgccatctgaagtggcaaacattcagttggaaattggtgcattcactttcacacgtcattatattagccccggaatttgattaaaaaaaataaaagataaaaaattgtgtgcaagctatctcaatctcaaccatccaaatgtgttattcattattttgtattagagttttattagcactaggggtgttcatccgatc

SEQ ID NO: 37061 - DNA, 2128 bp, Cannabis sativa
ttttacaaaaatacacgcaaaacgttttgctttcgttaattatcattggcagaaagtgcacatttatattttaaatagaaaaataaaatttaattatatatataataataaaaataacataattattaagaaaaaaataactggtaattaatgaaaaaggattgagaagtatagtacttacaagtatgaaaatgttaagatcacggtcagaaattgtgtgaggctcatcttttccattaccttcaaagtcaagtaagacatccaagaaatccctcctctctttaaccttttcttgttcactccttcgttcattaacaaatttagaagcaatcttcatagccttaccaagatccctctccatctttttcttaagcccttgaggatccaaccacctcaaccaagggaaaaaatcagctatattggcgtggccaccccactccataatccccatcatggccgagaaaaactcagcaccctccaccgaattgggatccaacaagtcccttgacagcataagattccccaaaagattaaacgacataaggaacacaaaacgagccacatgaacacctttactgctattattactcgattcttgttcgatccaacacaacatgttgtccacacactttcttcgaacgacaaccgtttcgttgattcgtttcaggactaacatgtctagagtcactaattttctcaagacacgccagtaagcaccgtaaggggctaaagccaaggagcccttgttgtagccgagggctcggcttgtttcggtgatggttcgctcaacaaacgacatgtcgttgttcttgaagaactcggttgctgcttttgatgagaggattaccatggtgtttatggcgcctagttttagcaatatgacgtcgccgtacttgtttcttagcttggttagggacctgtgtggcattgttccgaggtcgaataagtttccgaatagtggccaccctggtgggcctgggggcagccggccatggttggaagtttttctattgtagaggaataagaggagaaaaaagaggagaagagccagtagtgctgtgtatatgatcattatcatttgagtaatgataactgaaactgaactacaacacacaccgacacctattatatatatatatatatatatttatatatgctgtcatttgactattattttctctatttcacgtgattaacacagtttattagagttagtcccacattgttaaggttattttaaattcagatcgcgacaatctaaatcactgtaaaccgtaaacatttttggtgttctggttaattcggaccgtttacagcgtaataattcggttacgattcataataaatagttaacggttaaaccggacttgaccgttttaataataaataattgataatttatatatatattatatgtgactatatgtataattttgaatttttttatgtgtcaaattttttattgcatgaattttagatttttatattatgtttgacttttaaaaatattttcatattgttatttatatgttatagatctattaattatcatgttaaatatatattttgaaaaataaaattaaaaacgtagtaaaaatagtacagttacttaaaaaaatatgaatgattataaattccacttaaatcgtgttttcgaaccaaaccaaacagttcttaatggtttggtttagtttggtttgagaaatttattggtctagtttagttttcaatattcaaaaaactgttatactggtttggttcaaaaaatataaaagtccggaccaaaccggccaatccgtgaacactcctacattgctaatgtatggaaataaattgtgatatataagatgaatgaattactccttccattgtgagttgattttgagatgaaactctattcatcttatttctatattttaacacaaccttctctctttttttttctttttttggttttagtttttgtgtgtccgttacctttggagaatctaatgtcatttaattcttttagggtccgtttggtacgcaggattggactggattggactgaaaaggattggactggagtagataagattggattatgctgaaagtaatcttgtgcttgatttaagaatagactggacta

SEQ ID NO: 37062 - DNA, 2827 bp, Cannabis sativa
gctaaacctgtgaatttattaaatttttattgctagtcaatgtcatatggtttgaaggcactatgttggtcataatgatatagttcttaaaatttattgtactcatctgcttttggtataaattttgggggtaagggaggaagaattaaatggctttttaactgttagaatgattcttttgttcttgcagaagaggctcaactgacacctcttttacggcttggagctggtgcctgtgctggaattatagccatgtcggcaacttacccaatggatatggtacgaggtcgactgactgtccaggtatcattttaacatatagaactttgctatgagattgaatatgaattcattccattaatgtaaagggattttcttttttggtggattaattcttttttggcctatattttcaccagacagaaaaatcacctcaccagtacagaggaatcttccacgctctttcaacagttcttcgggaagaaggttttcgggcattatataggggctggctaccttctgtcataggagttgtaagtaaactgttttttatttatctgaaaattttctgttcaaatatgttgacttgtcattggcttttaaaaggtaccatatgttggtctcaactttgctgtctatgaatccttaaaagattatctggtcaaaactaaaccatttggattagttaatgactctggggaactgagcgtgacaacgagactcgcttgtggggctgcagctggaaccgttggccagacaattgcttaccctctagatgttattcggcgaagaatgcagatggtgggttggaaagatgcatcttcaatcgtaactggtgatgggaaaggcaagccctcacttgaatacaccgggatggtcgatgcattcaggaaaacagttcggtatgaaggatttggagctctgtacaagggcttggtccccaattccgtgaaggtgattttctaactccatgatcaacattcttgaaatctaaaagaattagtaatcaaaatagacaagtcatggtagtaaaatcatatttgagcaatgctatgtgttataataaaatgctctgatcattctcattagatttgcgaacaagcacgagttgacttacatgttgaccaaacatggaattggttaatagtatataattattgggcaccttgctttcttaggctagttttttagagtgagttttacctaaggtggtgtttggttgggaggaatgaaaatatagaaataagaaaatatttttaaaaaaatgataaaaaggttattaatatttttttttatcttgcattagaatggttattcctttaatttcaaagtggaatagtcattccaccaaaatgatggaaaaatcattctactagaatgacattctaatactttaaaaatcaaccaaacaaaggaatggaataaaaattgtctcatttccattccattccatttcattacctcaaaccaaaaaccacctaagtagttgtaacaagttgtagcctcaagtgggaccgacattgcaaaagaagcgatctatcgaccaagtatgaaattaggtaatagtatataactacttcgacaccctatttttctaggctagcttttggaaatgaattctactcaagtggttgtattattttacatagcaactattacttttcgataccaaacatcattaaattatctctcatctgttttatctttggaataattttttcaggtggtcccatctatagcaattgcatttgttacttatgaggtggttaaggacattcttggagttgaaatgaggatatctgactgatctaactatccatctattttgataatctttttctcatagggaaggtaaattggtcaattcttttaccaagaatgtagaagccaactttaaaaaagtggcccttagttaaaacccctttttaactttattcttttttttgttttaggtttctgttattcttgtgctattgcatcatggaaataataagtaatggtttggaaattatccactgtgagatgcatttgtgttgtggatggatgtaagagaattcttagttaaaaacactttgtggttatggtttataaatgtgatttagtttgattctctatcgttatggtgtttttatttatttttttattgtagtccataaattttgaagttcagatattgataatgattataggataattccttttgatgagcaatttgaataacattgcatcaaccatgttgttaggcaatctacatttcagtttcgttttgaaaatttcaatgttgggtgaaaattttcaattgaactcattataactaaaatgaaatacaacattgtgtaagaatatgtgtaatttgattatgctcgtaacattagtctaatgctaaaggatactaagtgcttagtgatacctatcgttattaatatatttaagtattgagttctacacattttcatctaataatcatagctggcccaaacattgggcaacttagccattgcaaaagacttttttttttttttttttattattattatcattcttttataataaataatttatatataataaatattcataacaacaaataataaaatttgtagtcctaatacacttatggttctaaaattgatagcttatgtaaggttttcaaaccatttggccaaacctattaataaatgctataaaaaattgttaattattaacaagaagttatctcatattggtatcgagcactatagcgctatttcaaattgagtaatgattgaaggtcgtgttagcgcctgtaaatctcatctaaagtaaaagtgattggttaaaacaaatt

SEQ ID NO: 37063 - DNA, 4024 bp, Cannabis sativa
  modified_base (2782)..(2795): a, c, t, g, unknown or other
  modified_base (2928)..(2928): a, c, t, g, unknown or other
  modified_base (2981)..(2994): a, c, t, g, unknown or other
  modified_base (3047)..(3060): a, c, t, g, unknown or other
  modified_base (3968)..(3982): a, c, t, g, unknown or other
cctttgtaatttgttcttgtatttactttccagaatataaatagaaaagtttgtacctcagcctccttgagctaagaattgtcttcaatccatttctgtgtatattttaactaggaaagttagaattctttattagtaggcacaccaaagttacaactcctttttaactcaaaaagctaaattgcaatgggtgaaatatggtggcaacaacatcaaaatatttcatcaaagcctcaaatagaaaagataccaaagtagaatttatttgatttaatcgactcatggtaaataggtagatgaaactaacaagattacaaatgcctttgtagactattataagaagctgtgtggaaggaaaattaacatagagaatacgtgaattggaaagtggtgaaataaggtctagtaattagtgatgctcaagttcatatgctatcgaaaccttatattgaagaagaggttaaacatgccttattttatatcccagattcaaaatctctgggcctagacaattttaacaaaagatttttttaaagcattctaaaatatagtagggaaagatgtcacaacaacaatgctatccttcctccacttaggagaaattttgaaagaaagaaattctaccactcttacattggttccaaaggtgaaagttcctcaatctgtggctgattttcgttctatagcttgttgtaatgtactttacaaaatagcgactaagattgtgtgctcgagattacatctcattcttccttatttgatttctcaaaatcaaggagggtttgttcatgagaggtatatagcacacaacataatggtttgtgaagacttagtcaaatattattgaagaaaaaattataagccctcttgtatgatcaaaatggacctgaagaaagcatacaacacggtagattagtatttattaaccagaatgatgagagctttaaactttcccgatcaatttattaagttggtgaaagcttacattcgaactcccaaattctatctttttttttaatggatctctttgtggtttcttttcttctcaatgaggcttaaggtagggggattctatgtcatcatttttatttatgttgtgaacggaatacttgtctaaataaactccgaaaaggaaactaaactggtaaatttttacttatatagaatcattcatatatgtgtggatatggctagtatatcgattttttttatatgggtatatttggttcatttgattcgtgctcgagccggatgatgaaaaaatctcatgttactaagaaaagatattttagatttcattgtagatgtgaattgttgtagttaacgcagttctattttgttgatgatttaattttattcaggtaaggggatgtgaggtccattatgttgatgccgagttgctttaaaaagttctctatcacctcaggattacaggaaaatgcaagaaaaattgctctatattttgttgggtgaatgaacaagatgttcaaaaggtggtggatgcttcgggattcaaaaggatcactcttccattcaagtatttgggtgtccctatctgctcaaaaaatatatcaagtgttgaatgtgaaatgctcctagaaaagatggttgcactaatttaaatatgaagttctagacacttatcatatgcggggagagttatccttgtgaactccgtgttaatggcaatccatactaattaatggtgaaaaatatacatttagtaaacttaaagtttagaataaattaaatataaattaatattttcatgaaattaatgagatatatttttattttgaaaatatttaatttagattaatttattgtctttttgtagaaattaaaagattattgtggcacttggaaatgaagaattggagcataaaacaatatttttagaaataaaatcagaaatcggcttggagaagcccacttgcgcacagcccaggtccccattttgagccgtcagatcacaaatccaagggcccatatgggcgcgtgttgctcactgccagacgaaggcgcgtgagcgcctgattccccagccgcatgcagcttcctgccaagggtaatagcaaaaatttccaagctgaatattttccatgtttgttttgggttactgttatcagtccaaaatcctctatttaaagccaaagtgagtgaattaaaataattgattcaaaacaaacatggaaaatacaaaatagaaaagataaaataatataaataagcttactaaaaacataaagataaaacttgataagtcaattgcagacagaagtgatctcctcaggtaagtctaccaactacatgtttgtactatctagtatcaaaaaatgaactttcttttatccttcctctaaaaaattgatgcattggtgacaatttcaggataaagaaaatattcgtcctcaatgtcgtgaaggaaatggtatgcttggttacttgagaaaattttacaaatttcctccacaactgtgtctatcacatcagtatgataacacttgttttcatttagaatgacatttggaatggttggaagaatttcgggatgagaaatattatcactccaaatagtaatagcatcatcctcatcgagtttacaagagattggggtagagggtgatagtattatttcaatttatggaggaagaacattgtctgaaattttttcattgaatttcatatcttcctctactaattgagtgagcaaagaactttggttttcattcatctttctttcattctctagacaaaaaaagaaggctaattagtaattttnnnnnnnnnnnnnngacatgtaccaaatcatatcccctgaacttttttggccgttaaaaattccccccgaactattgagattgttgaatttaagaacttttgtctaatttcatttaattttactgtttcagtgattgtttatgtacnaaaccatgctccccagactttgatgtccaccaaatcattcccctcaaattttnnnnnnnnnnnnnncatgccccttgaactttcatccatttagaatatttttactaaaattagacaannnnnnnnnnnnnnaacaatctcaatagtttaagggaaatttttaacgaccaaaaaagtttaaggggcatgatttggtacatgtcaaagttcgaggagaaaaattactaattaaccaaaaaagaatgttgaactatttttctctattaatagtcaaagtgagtgaattaaaataattgataaattaattattttaatattttctaaaaattttaggcataaatgagataaatgagatgtgagaagggtagaatggtaagaatataatgtgcaatttattggctgagaaaatagtgaaatgggaaaataagctaaataaatgcaagggaatagaaaattatagtctattttttaaattagcattttgggctcattttctatgcattgtggacactttgacaagcacaaaatggcttagaaattcagctagaattgagaagacaacacagagccttttctagcatttgaacataagtggtggcatcattgggttttatcattaggtcatgcttaatcttggcattgagtcatgttagatacttttctttcttattgaaatttgttggcataattccttaggccaatgtagaaagcctattgaacttttttgtatgctaattcactaacaaagacttttctagagttaattgagtaagctcattcctcttggcacttcgtactgcttcattatagtacttagcattgaaaatattatggaactcataccaagacatagtttccacattgtaacttagaggtacaatcttctaccataccaaggcatcctccaggaaatgaaaagtagcacaagtttcctggtcattaccaaaaaccccataaagttcaaaattcaattgatagtatttagccactactatgctttcatcacatctaaaccaagacatgttggaaattattttacnnnnnnnnnnnnnnnactcacaagtatgtttattaatatcctaaatatgaactttct

SEQ ID NO: 37064 - DNA, 8535 bp, Cannabis sativa
  modified_base (7603)..(7606): a, c, t, g, unknown or other
  modified_base (8468)..(8481): a, c, t, g, unknown or other
  modified_base (8508)..(8510): a, c, t, g, unknown or other
atcttgttacaggaaaaattagtgttgaaggatttcaatattgtacaaaaggcagggggtgcgcagaagccggtagtcatacctctagataatgttattgtgaaggataatgtcttggagatacgattttattttgctggaaaagggacaactaggattcctgaaagaggagtatatgggcctttgatatctgctatatctgttgtttctggtgcgtcattcttacacatatattgaatatatatgctacatacaaacttcctactaatatagtcttgtccgtgggtttaaatatctgaaatagaattttgcttaattgttcagaatgaaattaattacataatttaagcctggtctctttagataatttgcggtgatatactttctatgcaaattgtatcaaatgggaaaacaaatgttgcagacacatattttaatagcttttctcatgtccgaagatttgatctttattatagatcttatttgacagatgacatgataaaaattgtgcattatatatagctggtcatcagcttgtttcttctcacagccgtagtcagaatttaaagaatgagcactcccccttcccccatcttgttccttataaaaaatcactgttttaaaaattacaatgaaccattttgtgtttttcttctcaaagtttccatgagcttactagaacttgaatggctgcatcctttatttggcatccaatattctaatattcttttatattcattggtaactataaattttttatattttctgccgcaatagcaaaaccaatctgcttatacacaatcattgggttcaatggtagaattgtgaactaatattacatcactggcatttgctgtgttgaatccttatgtgaaaccattttgcaattatgtccccttgaaagattctttttgcttgtcaaaccattttgctgtgtttttattctgattcctttcttgcattcctcaaaatattgtaggatgttgacttgtttagttaatttcttgcagaatctaagcactgctccgatggtggaaacaatgaaaaaacttatattattgttggggctcttataggagcattatgcctgatatttattgtactagggatccttcactggaaaggctatttcaaagaaagaagcaacagaaatcaaggtgtgtttcattaaaaattcagtatcatttttgtccctagggcattggtgtaatggcaaaggttcctcaagtaaggtctgatttcagcaaactgttaggccttaaggtattaaataatgagggtaaagaggtcattgtattaaggtagtgagttagtatatataagagtgtattagaaaaggttgggggtgtgaatgaattagttaagtgagcttttagctcttgggagagagcttggtctctcgaatacccagcaacttgttctcttttcattccaatatcaatatatcagctctattatctctacttttgctactgttgtactaaaatgatagaaaattcctatcacaaacctatctggtttgaacaccagcgaaccctgttggcagcaggccccgtggagtatcacctgtgggattagttgggtggggcccagatacccatggggtttaagagaaaaataattaaaatatttggatgttcaactattgaatgcatactttattaactgaaatggtagagaattgcaagttgataatttaattttagtacataaaacaacaaattttggaaatgtcataactcataaataattgattctttttccatcttccctttaaagtgtggcacttgaagtgccgaagcacatagttgacaagtgggaaacttttgtgtgtggttacttttatggcttcaaacaatttcgacttagatcaagtcttgctggacaagtgccacttttcaagtaggctgctatagatgtccgatctaatggagggtgtagtacaccttacaataatttttcagtgtgggtttgatagacctccattgtcatacgtatatactaagagaaacaagaaacttaatgtggggagtgatgtaggggatgcagccctctaaattctgttatgagggaaatgttcggttgaggtgcggtgcacagtaagtccttaggactaagtataaataagaattgtgtttctgttggagggtatgagaattatgattgttttcctattgtaaggagagtccaggctctcgaatttcccggttaatacaatactacttcatttttgctccaactcttcccttattctctaatttttactgctaatatcactttgatagaataattcctatcaaattggtatcagagtgctcgtttcatgggacccaaaaaagatgcgatggcagaaatgattgaagagaaagtgggtgtggaagtttcgaatctctgatgagatgttttgaagctcaacgatgaggtagctaagcttcacgaggggctgcacacctcaattgagcaatttgtagccaagcacatcgatattgccatgaccaaacacttggaagtgatggcgggccagatctcgcaaatgatgctccaacccgctcgaactccgcctgaagcagtggcgaccagcgtggatcggcagcgacgtgcggttgaggggaatgcatcatcgatgggggaatccagttccgtaggtgctcagccgaatacccaacgctcacccacgggtctgagaatgacgttaccacagacgatgccccaattcgcttctccggaggtacctccgattcaattggggtcattctcgtcagggtccacctacaatcacgattttcggccaccacgtatgaaagttcctctgttcaatggtgagaacccgaacgcttggatttaccttagcgagcggtacttccttttctcgaagttgacagagtcgatgatgttagaaacggcgattgtggatctcgacggtgatgctctgtcttggttccaatgggaaaatcagcgtcgcccaatcacctcttagaatatgttgaaataattgatcctactttgatttagagccgctcccctccctctccgaagagtttctctcggtggctcggacgaggaccgtgaaggaatatcgtgtcaggtgggaggtgttgcctcttgtgtcggagcacatcctggaggggtcattcgtgaaaggcctaaaggaagaaatcaaagttgcactttatttgcttcaacccaaaggattggtagctataatggacacaacgcaacgtgtggaggagggccaccatttactcaatctgggcccagccactaggcccaatcataccaagcctaatttgagcccaatcatccccactaggccaccctacagcccgtatacatccaggccctaccagcaagttcacagatcaatcaagggaactcaatatcaacatctatggcttcgacagcctccagagctagcaacaatcgatcatcgaatttcccgacttatcgacgtttatctgaagcggattatcaagaaaaacatgcaaggagattatgcttcaagtgtgacaagaaattttatcctagtcatgattgcgatcaaaagttgctccaaatcaattcatggctgcctcaagtttcgaggccgtttggtgctgcctgcgtcctctcctttcacctctttactactgcatgagtatcacagcagcaacgtggggggcgattcgggggtgtttaagacatttcaacggttggcagctgatttttattggcgtggaatgcgtcaagatgttgggaaatttgtggctgaatgttcggtgtgccagcagaataagtatttggctcaatcccccgcgggactcctgcaaccggtacccattcccgagagagtttgggaggacagctccatggattttatcgaaggccttccactttccaaaggattcgactctattttggtggtggtcgatcgtctcaccaaatacagtcattttgtccctcttcgccactccttctcggaaccaacagtggcggaggtatttgttcatgagattgataagttacatggaatacctcgttccattgtctcagacagggacaaaatcttccttagtttgttttggaatgagctatttcggttgcaaggcacatcattgaagcatagtatggcctaccattcccaatccgatggactaacggaagtggtcaactgttgtctcgagacttatttacgttgctttgtaagcgccaaacccaaccaatggttgaagtggctcccttggtctaaatattggtataacacctccaatcatacatccaccggaatgactccttttcgagttgtctaccaccgagatccaccccactgctctgtttcgaacctgctagtgctaaagtttctgcagtcgaccaagaactccaagagcgagacgccatccttcaactgctgaagcaaaacttgctccgtgcttagcagaaaatgaaaactcaagctgatcgtaagcgccgagatgttcagtttcaggtgggtgacatggtttaagtcaaacttcgtccttaccggcagcgtactgtggcttgacggcctaatgaaaagatgtcccctcgattcttcgggccatttccaatgctggcccgtgtgggtacagcagcattcgccttcaactgtcacccgacgcctccattcatcctgtttttcatgtgtccttgctgcgagctgccttgggaccacaccagcaagcgtctcctcttccccttggcctcactgctgacttagaatggctcgtggaaccagaagcattgctggccatccgccctggcactcacaagatcagtccccaagctctcatcaaatggaaacacttaccagaatttgaagccactttggaagactttgacactatccgtgagcaatttcctcaattcaaccttgaggacaaggtgaaactttaggctggcggtattgatagacctccattgacatacgtatatgctaggagaaacaagaaacttaatgtggggagtgatgtaggggatacaaccctctaaattctgttatgagggaaatgttcgggtgaggtgcggtgcacagtaagtccttaggactaagtataactaagaattgtgtttctgttggagggtatgagaattatgattgttttcgtattgtaaggagagtccaggctctcgaatttcccggttaatacaatactacttcatttttgctccaactcttcccttattctttaattcttactgttaatatcactttgatagaataattcctatcagggtactagtttgttatgtatagtgccgtcattggttgttacttgttagtagaatatgatcagttgttggttcttttaaatttcctttcgtgagaaaaggaaagcaaaaaatgtcattcattagtctgcaatgtgtaagcggaattatatgatcagtgaggctctagtattgaacgtataaggttgttgatgagatttaatgcagatatcgttttgcttcacttactgtatttgatccaaaatctagaaattaatataaaattttaacaggaccctcagcttattgtttagttgtaccaccttgcagattttaaaggactggaaatgcagacgggaacttttaccttgaaacaaataaaagctgccaccaatgactttgattatgccaataagattggagagggtggttttggacctgtatacaaggtatgtttgctaatatatatcatttcactttatctattaatttcagatactattctgatttggagttggaaaacagggacaatttccagatggaacagctattgcagttaagcagctttcttctggatcaaggcagggaaatcgtgaattcttaaatgagataggcatgatctcttgtctgcagcatccaaatcttgttaaactccatggatgttgtattgaagcagatcagttgatgttggtttatgagtacgtggaaaataatagccttgcacgtgcattatttggtgagccttactcgaaaaagaaatatttctgaagtcatggacacattaaaagtgttcatgttctacatttagacatacactaggtttgagctttgtttgtttactgtggcatatcttatgtctagtctttttggaaattgtgcattatcccataatcttgtatttattgattgataacatgcagattccagatttcagcttacattgaactggtcaacaaggcataaaatttgtattggaatagcaagaggtctagcttttcttcatgaagaatctagactaaaaattgtccacagagacatcaaagctaccaatgtcctgctagatggggacttaaatccaaagatatctgattttggattggctcggcttgatgaagagggaaagactcacattagcaccaaaattgccgggactatgttagttgccagtattgttttttgttatattatcttctgccaaattgggctgagatgttcattcattttttatggacactattgtaatcttgatttgcagtggatatatggcaccggaatatgcattatggggtcgtctcacatacaaggcagatgtttacagttttggagttgtggtcttggaaatcgtcagtgggaagaacaataataactatatgccaagtgatgattatgtttgtcttttagattgggtactcgataatcactgctttatcctctctgaatacatctatatttctacttttttatctttcatttcctttggttaagcaatatctgattgttagctgtcattgtttttgtataaattgactcgtttgtttctgaatgattaagaacatatctatttcatttcctactcaaacaaatacttgtgttgcaggcctgtcatttacaacaaagtggaaaccttatggagttagttgatgagaaattaggaatggaggtagacaaaaagcaagctgaaactacgattagagtaggtctcctatgcgttaatgctgctgcttcacttcggcctacaatgtctgaagtggtaaacatgctcgaagaacaaatgatggttcctgatgtgccctcagagccaaacaactatggtggagatttaagattcaaggccatgagagacctccataagcaaaggaaagatgaaagttccagtgtaacccataccaagagttcgactgcaattatgttccactcgtcctcttcagatgatgatggtctctagggattaaccccacaaactatggcgtcagagtagtaatgagcattctttattactgtacaattttccacttgtgtgcaactacaagtacttgttgggtaagagaagaaatgaagagttgctgtcttccaccccattcattaaattttagtattatctatcttatcgatgtcttttggtacagacaatttgagcaattcgtgcaaactatgatctggttagttttgtttgagatgtaatttcctcgttacatgtacacatatacgtacttgcataatttattggatttgtattcaactccttttcttatgtcaactatttctaatttgagtaaatactattttagactttaagttttgtaaaagttaccgattggatagaccctgtattttctaaaatagtcaaaatagaaccttaagtttaatttttgataattttttttttaatataaccaannnnaagacaattcttaatacgaacagatacagaaaatgtaaacaactttgttataacacttttagatcggattataattaaattttattttgacaaaaaattaattcagggttctatttctactattttaaaaaatacatgatctattttgtcatttaacaaaacaaatagttcaagtattaacttttgcaaaacacaagatccaaaatgatatttaccttctaataccatcaaaaggataataaactcaatattatgggtaattaccaaattaccacacaatataataattcagcataaaaacttaatcctatctatatctatatataatgttgttgtaaggtataatgatgcggcaccctctatgacattttctacatctttgttttctcattttttctatattatttcatttttatatttaacaacaataatacaatatttaaatcaaacacgataatggtcatcttttggtaataaaatctgttaattattaccaaagttaatcctaatactttgagctctcaaacagtcaaatttcctgagatcaacagccaattcacatttataaattatatcaatcactatatacgttttatactcaacttcttcattattatttgacctaaccttagttaagttggtttacttggattagttaggttgactcatttagttaggttgttagaaccatagttagcttttctaactaaccatggtctcgtcttttacattgtataaaagtcatggtactgtaaacatttttctgcagaataagcataataaaagaatcatcttgttcttgcttcttctcctgtttttctcagttcctcatatggtatcagtgttggaaatattttaccannnnnnnnnnnnnntaccatgtatgtttcattaacatcctnnnatgaattctaaaacaatgaaattaa

SEQ ID NO: 37065 - DNA, 1979 bp, Cannabis sativa
aataataacaaataaaaaaaaccaaaacaaaataataaaaatataacatagtgttttttgtaaataaaatcttgaaaactgtaaaaaaaatattcaagattctgtacaactatattttataattttttcattattttttttaaaaataatccttaatcataaagcataggtttctagtttttggttaaaactaacaacttgttaactttacctaactagctatttctttggaatattgatatgaacgcagcgagctatagattgctaaatttttagttggaccctaagcacagatctagtccaaccacagaagatgtaatcactcaattttagctctactgcataatttaattaattagcataatctttatattaacttaacttaataagttcattttatttacataagcatataattgattttatatattaaaaaaactatagggatttaatatttataatacaaattaagaagttgtgagactacatgtaaactataaggatcaaatatgaacatgaattgtgttgttgtcaactctattccccaaattgtcaactttaaccatctctcacatattaatacaccaaagactattatgtgattcatatttcatcatatacataagactttcactcaaagctatataaatttatgtatgaatatatacaattaatttctgatgcaaataagtgacacatcacaaaatggtagtaaattaaaagttaaaaccaaacaagtgttaaatattccatggttttggtgtcaacttgtcattgtgatgacatgcacatgattacactctctcctaaataccactccttctcactgccaccacctctttttttcttcacaacatgtcattttttccctatttaaattaattactatacacattttctctcttttttaagtctcacccaaaaatccaatgaaacccaccaaaacaatgttatgtatttatatatcttacacctaagctatccagctaactacctcatcatcacttgctagtcctactcatatataaagctcaaaaccccataactcatttttcagaatatatacaaaagaaaacaaaccaattgtgaggctcaatatgacacttacaataaatattgttgtgttgtttagctcaattttggcttgtgctcatttgtcttatggtggtaattttaaccaagattttgatatcacttggggagatggtagagctaaaattctcaacaatggaactcttctcacactttctcttgataaaacttctggctctggttttcaatccaaatttgagtatttatttggtaaaattgatatgcaaattaaacttgtgcctggaaattctgctggaactgtcacggcttattatgtaagatttttttttttattattattatttttgttgtatttcaaaatgtttttttttaatattagttttgatgatcaattaatataaatatttgcagttttcttcaaatgggtcaaaatgggatgagattgattttgagtttttgggaaatttgagtggtgatccttacattgttcataccaatgtttacactcaaggaaaaggagatagagaagaacaattttatctttggtttgatccaacggctgattttcatacctactcaattctttggaaccctcaacgtgttgtgtaagattaatttagtatttgttattatacttaaaaaaaaaaatttatttattatatttcaacttagtgtaattactaattaatataagatacaatgaaaagaaaattgtcaaagtcacataattaacttttgcacctaagtattacttgacctactaattaacttgccctttgtagtttgtacattaaattaatgaaaattttacataattgattataaaaatctatcaacacaagttttttttttttttttttgaatttatactttaaaaaattttatttacaaaaacacatatcttcaataaaaataataaacttttt

SEQ ID NO: 37066 - DNA, 6539 bp, Cannabis sativa
  modified_base (4622)..(4629): a, c, t, g, unknown or other
ggggatttttaaagatgttattttggttgatactatgactttgacagcacaaacaaccataaaccaacaagaaaataaccaaaagcaaatccccgaagatgttgaatattgaaaaatctataattatttgttcatcaattgatattgttttggtttaaaacaataaaaacaaaactacacaatatctacaaagaatcattaagttgttttcatgttatatattggaagttttttttgtgttgtttttgtaacatcttatttcaacttgaaaatcaaatcaagttgtttttacattacaacatggtgtcagagctggtttgagattagagttcaaaaattaggacttagttcatctcaaaaaattgggtttcggtttaaggctttgttcttctttgtccttaggattccttttcttgaaaaccctagttgaagtaagtctttgttatcaccacccactcagattgattacccagccactaatctacaaacccccgaagtccgatcgttggatcccttgcgcgtgtacctcacgcaccgcccgttgttgctaccacccatcccacgcgacgacgtgtgtaggcacgtccgacggtttttcgggtggtaattagtctctggttcgttttcgacccctttagtcctagtcgcatttgtctcaggttgtggtttggtatttctcccttctttttatttgggtgttctttacttcttgtttgttgttcgtttatatcttgtctcttccgatattttcttttgaggttatggtagagacaaatcaaatccaacaccagtggttgtttttgatgtggttcctgtaatgtctgaaattacagaccataaattgattggttcgaattatttgaaatggagtaagacgattagaatttatctaagtattgacaaagatgatcacttggttgatgatcctcctaaagaacaagatgattcaagaaaaatgtaactacgagagaatgcttgcttgcttcttcaaatttgaaattctattgataatgaggtaattagtttgatcaattattgtaaattggtcaaagaactaatggattgcttggaatttttattttctgtaaaagacaatctatctcatatgtatgatgtttgcaaagctttttatcttggaaagaaacaaaatcacatgaactactttattacacaatttgtgtgtgagatagtgttgatttattttgactaaagtaaaatttatgacttcatttctagtaaaattgtagtgtgtaataattaagtcaccattcatattgcctcaaatcacttgttccatgagcaaacaaaatacattgacattaactgtcattttgtttgtgaagactggacaacaattagaaaatatttttaccaaagctttaaatggactgcaaggtaatattgataggattatcctatcaaattagtcaaaccagtaaaataaatgtgaaatgaagagaagaaaagtgaaaaaaaaaattatattgatgaaatcctcaggtattcgagagcttgtactctcctctttgctattacaaaatacttgacaaaacccactaaaggaaattcattcttatttatagcttgactccagaggtttataatacacctcagctatacccaaacaaaccccacatagcagaaattaccctgaggagttatcctctactgcccccatccttaggctttctataccatttcctagcgtaaacaaaagtgagtggaggtttatcaaatatctttgttagaagctaggcattattaacatatatgattaagctttgaaggggagtattagaatatattaattgtaaaaattaagaataattttacttagttgcctattctctatcttaatttcttattcaaatctctcgtacataaatatatgttattctattgaatgatatacaatttgattaccatttacaacaccataaaaacaacttttaaacataaaagccacattattctatgggatgaaggtgatggtaattgcagcttcttcaatagaatacgaatcaagggccaagaactataaatgtactcatgtcccatatcctgataataagataacaaaagtactaagaattccaaaactaaaaaaccacagaaacaaaaattctttggccaacctacaacagaaggcctatcaaatccttacaaaaccttctttgacttgaaactacaaaaatatcccctatctagtacttaggagtagtaacaaatagacgatgaagcagtttcaactgtttagcgcttcccaccaccaccaccaagcttcggcccctttggtgcagctcccttcgaaacgttacccctgcccttctgtgacttggccactacttcagccttcttggctttcttttcatctttggttttcttgattctttccttgatctcactagacagcacaagacataaaatatggaaagattcagtaagcactctttttgctgagaataatcttatctcattttcagaaagaataaatattcataatgactgtgctaacgtgttagaaggaacagaacgaaaattaaatattttgatcaagtccattctatttccacagccaaaaaaagaccttgagtgataagaacaatgtaacagagaaatgtagtaatagtttataattgttatataaaataagatttagatttacagatatgaaaaatatagctgttttgattgatttcattggcaagaacttgattgaaatcacaaacttcaagttcttgaaaaaatggaactattaaaagagagattcaatccttgcttttatatatattaggtgaacatgaacttgcaattatactatgtacaaaatgggaatattaggaagtaaaaaattagcggaaaagatcagaacacacaccgaagggcagcttcccttgcagcatcacgaacttctggcttctcagctcttctcttctggataacctccaaagtggcaccaacaatagacctagaataaggtttctttgtggcacgtctcctcttcctcactgcctcttgggcgatatcctaaatataacccacaatcataaacataatcaattgccaactgatcaaatcaatcataactggcccctcaatggtccatcattatcccaatggtcatttttagacaagctcatatgggaccacatcaaaattcccctttataagacagtatctgacgtttcaaatttacaatgaaggatgcaaaatctaccttcttatgctgcttcctgtacatggctgtccaggtcagcttagatggcttcaggcgattgtggaaatacctcttgcatttggaattggcaaacaagaacacctgcagatcaatgggaaaaataagctcgttatcacagacaaagcaaaatgatagcttccttcctcaagataaagaaaaagggaaataagaaagcagaataattagtcaacagcaaagttgaagaaagatgaaacaatatgattctcacctgagaatcagaacgaataaatctgatgcctctccctgggtatatcttggcaccgctaaacctacaaagttcagtcctacaagcataaaccaaaatattaataaactgcattgaaaatcaattacagagtcacaagacactctcaactgagagagcaaagataatatcaggtcatttttcgttttaggtgcaaaactctagcaattgctcagtaggcactcgtgaaagtcgaatcccagggctgatgggagcaaaccatgtgcactaccattcaacaatcaacaaacccctcgtgtagaacaacaaataacttcaagccaagatctcaaaataaagtccaaataatcacatttcaaaaattctattcaagtaatcttcttttgtgattggtcaagcatcatatatacttaaatgcatatactatatagatatatatatcagaatgttactaagcctgcccttattctgttaattttgaaaacaaatttctatacttcctggttctaatacaagatacattagaaataccaataaacatcatacacccaatcttagtactcactttaatactctgcatcacaatttaacctaccatcagaaccctaaaatcccaaatgtttaaccatattttaattcacttccaagcttcatttctccaccacaataccatgcaaaatcgatagaagcaatacaagtttaacaatgaaaatgaaacttgatcaaactatgaaatgtaaaccatcagcttaaatttacgacttttcggagaatataagctgaatgatctgatatcagatccaaatagcaacagaggaatagaggctcacttgagaaccatggccgctgatgttgatactaatggcgctgcctcctcctcctcgtcctctgcctctggtgcggaaaccctaggagcccaaatataaagcacaggaaagtatagaataatacatagatagaatcgacctcctgagtttcggaaactacgaaaatgccaccactttgggtagggctgtagagtagttgtggctttacggcccaataattggagtcctaattttttttttttttttttgaaattattttacaaatacacaaaaataataataataattataaaaatacaatttcaggaaattttaaatatttttacgattnnnnnnnntttatttatagaaaatacagtcttgttaatgctatactcttgtcaatttattgttgattttttgttatctatacattattttttattgttatattgatgttatttagatgttattttatgttacttttatgtagttttcttattgttttcgtgttgtttttatggaaaatcgtaaaaatataaaacaaattcattaaacgtaaaaatataaattttttacaaaaaatagtgtcttgtgtaattaaccctttttttaagtaaaaaaatatggaataagttgagcaatattttttttatatataaattaattgtatattaatctaagggatatgaggatatcataataaaagtatatcttaaagaatatagaaagaaaggtaaaaattaaaatatataaagtaaagtgggtttataatttaatttcctcaaaaaatactactaagaaaattttaacaaaaaaaaaatagaaattatacaatatatcaaaaaattttaagaattaatttttttataggataattttttaatgtattgagattataaactttttgttcttttttatatttatatgggttttttatgccatacttctgtaattaagtttttaaataccatattttaagtctttttttttaatgaaaatagagatttcattgaatagctaaagccgctaatacaatagactaaagagcataaagaatattgctcccagaaaaatacgactagaccgataattagaatcgcaagccaaacaatgtgtgactttgttaacagatcgtttaacatgacaaactttaacattgttcaaagaaaataagagctttttgcaatcttggacgagaagaccgaagatagatgacatttcaacaaagctaataagagcttgaatggccacaaaacagtcagtttccatcacaacattgttcaaaatcttcctctttatccaacttagggcttccttgatactcaatatctcaaccattgttgcttgtaaaccaccaattgaatacatagtaaaagcctccatgatagtaccatcacaagtcctagcaataaaactagttccacacgcattctctattgaaaaagttgctccatccacattaatcttaatcatatctaacacggatttagtccaacaatctttgctgccaacaataataggtttgtatagagccggctcaatacgacgagactgagcatatcgccattgatcaagaacgttatgtgccacagcaacaacatcagcaactgaccgcgagcaattcttccataaaagctcattacgagctttccaacttgaccatcccaccatcagaaattcttcaactgctccgtctctttttttgaccaaaactcaacaaaccagtcatgaaaacatgaagcaacagagggaaagagaccaattacagatctattccaacatgaccgagcaaaggggcaattaaccatgatatggaggattgattcaacctctccattgcagaatacacactgcatatcaataggtacgtgcttgctgttaagcggtgttcgagtggggagataacctgacagtgcacgccatgcaaaatggatcacttttgggggaccttgagcttccaaagttgcttccacagatcagattccaactgaatattccaatcccctcttaaatattgaaggtgctggtatgagcttttcacagagtaaaaaccagaagcttccattttccaaaactagacatcctcacttatggaagagctaagaggaatactaaggatgatatggctgtccctggaagcaaaaatatcttatattaactcctcgttccactcccttaaaccaggtttcataagatgataaaacacgctacagtgtaacgccctaatgctaaggcacgcttgttgaaaattattttaccaggatct

SEQ ID NO: 37067 - DNA, 5684 bp, Cannabis sativa
  modified_base (256)..(279): a, c, t, g, unknown or other
  modified_base (5633)..(5658): a, c, t, g, unknown or other
ttggatcttgtgttttgtaaaagttactaattggatcttttattttgttaaatgacaaaatagactctatattttctaaaattgtacaaatagaatccttaactttttttttatgaaaataaaccttaataataatatgataataaaactagttacattttctgtatctattcgtattaaaaattgtcttaaaattagttatattaaaaaataaaattgttaaaaattgagttaggttattattattattattatnnnnnnnnnnnnnnnnnnnnnnnntattattattatatattttttaaagacatccacaattattaaagatgcaatttttcacaaaaataattaataaggtggtggagtggcaccaccactttcatttatcaaaattttgtgattattatttttgttttgagaaaaagtttatattttaactttcaatgtcttaccagactgaaaaagacattttttttaagagataaacattaacttgaccttgttttctcacaaggttccagatctttccacaaccttcttctcattccttactcatcgacacttatattccccttcaacccattcgttcttcttcatcttcgtgaagtattgacaagttaattctcttattcattttctctccttttctcctttgaaagtttagagctttgtgatcataccaatggcttcagaagctgacgtttcagagttttcttccttatttgagaggatggtgaggaacagagacttctctctgttcttacctttcatcttcggtctcccaaacggtgtcgttcaaaacccagactcgcaagatcaagatagagaaaacgacagcgtaccaacttctggcggtgacggtgacagagtcattctgatcaatcccttcactcaaggcatggtcgtgttcgacggggtttcgagtttcgattcccttctgcgggatttgggtaacaaggatggtcaaccaccggcttccaaggcgtccatagaggctatgccaagtgttgtgatttctgatgatgatgatggtgagactggggagtgtgtgatttgcttggatgaatttcaagctggtggggttgctaaagagatgccatgtaagcataggtttcatggggattgtataggaaagtggttgaagcttcatgggtcttgccctgtctgcaggtttaagatgcctgaggagcaagaagatatgcggaagaagagagatcaggaagaagaagaagaagaaggtggtagcagagatgggagaaggagagagatttggattagtttctctatcagaagtaggagtagtgaaaattcttcaaatcaaacaccttcaaacgattctgatgttgagggttctgatgcatcctcaaatccagtagttgatcatgaatgaaagtcatggttaaagaaattttttgtgaaaaaaattattcatttttttcttccgttgtacagtggaaacattttttcagtgttaagtttagtttgaattgaatgaatgttaatttgtttatttgtttattcccctaggatttttttttttattattttttatcagaatttgctgtaagtttaaaggttgatttaagttgaaaagcagatacttactatattgtatttgtatcaaagattggactataatattacatgtagatttataatacatagaaagctcgaaggcttttgttggaatctattaaactatttcatctgttttgttggccggaatttgcagaacttgttctttcctgaataatcttttttccttggtaccttccaagcattaagagggtggccattggatttgtccctggtgattccgataaagttgagccgtccaccactctcaatccttcgacaccatataccctgtaatccttgtcaaccacagatcccactaaacaacctccatggtaatggtaaaatgtcctcacattcttcttgcagaactttttcagttcatcttcagaagtcatagccagcacatggttattgtgtttctccgtacccaaataccaagcaattgactgagaactctcaactttttgcagcagcttggccattcttatacacccttttgagtcttcttctttgtctagatagttgaatttgactgatgggttatttcttgggtctgtattagttaattctaacttcccttctgatgctgtaaatgaaagcttagtagctattggaattctggtttggttgaaacttaagggtaggactagtgactggattatagttttgaagttatctgtgatgcccacaacttgaggtggatctggtaatcgtttttggggcttggagtccacgtaaacggccagtccagggctgtctttcattccatgcccaactctcttcaagtcagtcaccaatggaaggttgaaactctttaggtgtttataagaacctatgccactcaacattaaaatttgagggctgcctagtgccccagctgctaatataacatctcccaatgagctggaatcatttggttggttgagataaactctatgaattttgtgtgagcttccatcactcttgatgaacctgattcccagagctattttctcttctgttttacctgcaaatttggacttattaatacaaactccaaacaaataaaactgaacaacaatgctaaaacagtcaaaaaaagaaaaaaaatgttagaacaataagttaataaaacgatggtaaatttcagaacaaagagaaaaaatgacgaaataatgggctcaatttatactctgccaattaacctccaataagttttcctaaaatctttcactatgaaagtcaccatcacaagcaccaacgaatgctttgattgcaccagaaacactacagaacactccactctttaacaagtttcacgcaaacctctccagaaccctttcttggagtcagcattatattgactcttgtctcacaaagatctcaaaccgttcttgtgtttctctctcttgagaagtctttctctctcacacagttaagcaatttctatttataacaccattacgagagccaagaggagtaactacttaactttctaactactggaagaccaaacttataggtggatttatataaaacaacctgcaaatttggatttaagaaaataaaaaaaacatataaaagattttttaagttaaccaatatatcaccacttactattatttccaaagattacatccattactgtggcatttaaaagaactgttatattttttgaattgcctgccattagaagatcagctgaggtgtgtctccttccacattgatcaaaaatgctcccaccaacctttgtaccttcaatatgttcaagactatatccattatatggtaaaatcccagtttcgaggaagctaaattcagccactgtctgccatggagtcaactcgggtttaaaaactacttttgattcgatccattcataagcatctttcaccatctcctcattccaaccagcctgtttgacaaaatccccacttgctctactgtaaaacccaccatttaaagcagaagaacctcctaaaactctacctcggagatttggaacaccatcctccgagataaagctttgagccactgacgagtattcgtcgttttggattaaggataatccatagaacctcttgtccattatcaaaggatttccgtacggggaaccacctcgttcgaccaaaagcacagaaaatctctcagacaaggttgcagccaagggacaaccagtggtacctcctccaactattatataatcaaaggatttgccagagatttcattgacatttgaagtcatatggggtagccttttctctacaaaacaaaatatgaaaatatcattattctggaagacttcatgatttctaagccgttatagttttgttatgacagagaagacactacaaagtggcataccttgagtgggtgtagtagaacatgcaggcatggtttgacgaggaatgggaaaacaaagagaccaacgaattaggaagaaaaatacagcaattttattgccacgaatgactaaagaattccacatgttttgtgtcattttgagaagtgtggtttgacattaaacgagggacaaatatattgcacttgcaagctagttggtgcatgggtataatcatttggagtctcttagtgctaggtgtttcaggttgattgcaatttctttacataaatatactatagaatatagatttcctcgtggtttagctaattatagatacttggttattacgatgtctacctaacaatttttttagggtttttgaaattatgtgtacctaataattgtggtatatactaattgagaatgatgaaagtttagcactcctactgcaacacaacatactttcttcatagcttattgacgacagaagcagaatggtcctaggacatgattaaatctacttaagcaatctgaacaacttttctattttatcctttaaaatatattactatttttttttttaattttacaacacacttttatataatatattatagcataccaaaattctatttttttttgaaattttattatattttattcatttcaaatgtatatttactcagaataattaataaaatatatttagagcaataaatagtattttataattattaaatatagaatacgaatagtatatttaaagaaattttaaaataaaaaactttagagcatctactgtagtgtgatttagtactttttttaaaaattttaaaatttctctattttagaaaagttgttgggagtgctctctactccttcttataaaatacattatcaaaattttaattttttaatttacaacacacttttacattacactatataccagcttctttatatttttttttctatatcattaaattaatattatttttattttctacactattaaactactaatttttgaacatatacacaatatacataaaaaaaaaaatattatttacatattattaaaataaatttacacaatgcactattcattctttacatgtagagaaaattgcattaatatgagtgcatctctattatacatatatgatttcaaggagctcatgaaagctttttttttttatatatcacaattaactaaaaaatttagagaatctctattataaagagattgttgtgagtgctcaacttctctaaaatagaaaagctttaaaagatttaaagaaccgtactaaaaatacgctacaacatatgctttaaacttctttattttaaggtttctttaaaaatactattcatgctctacatttataaaatactattcattgcttatatttattaattattttgggtttttgttatccaagttttctttggcagacacgtgggacgatcaaagtggggacacgacttctatgtagggcgtcagagaagattaggagaaataactctcagacctgaaaggcagtaagaggtaatagcttccgagagctgcctccttcatcgagaaactcgaatagtgatacaagttctggagaccttggacacattagttcgttgccgaatggtgctccaaaaacggttatgcctttttctgacacaggatcattaccatggctctgaggccagttattgggaatattttaccaggatctaaatnnnnnnnnnnnnnnnnnnnnnnnnnncctaaatatgaattccctaaaataat

SEQ ID NO: 37068 - DNA, 5520 bp, Cannabis sativa
atttcattgttttagagaattaatatttaggatgttaatgaaacatacttgatagtaaatctagatcctagtaaaatatttccaacacttagggctcgggtcgtgacagtggtagttattagttaaagtagttgggcctcttttctgttttgtggggttacctagaaggttggctattgtttctgttgtaacaaactctctttcttcaaccatctgtgtatataaataaaaggcacttggtctcagattgagactaagctttcattgcattgattggtcttattaagaatctgggattgagaacttggaattcttcatagatcgtgatcatatattgcaccaaagtactacaaacaaatgcttatgtgaaaaaaggactcctatccttttcctctaccttgtaaatgatagatgaaacaatgtgtggcacgcaatggaggaatattgctgccccaataactatattgtaatccttgcatattatacaaagaataattaacattttttcttattgaacattttatgctactaagttgtgcgctttataatatacggctcgttaataatatccttttgaaatataacttttacttttacagtaatgtagtcactccaatatattctatccaattttatgaaaaaggtgatagtaaatgatagttgataaataaatacgtacaaataaaaaatcattcactattttttgtttaatgattaaaaaattaaaaatataaatattatataaaaaatagttttttattctattaattattaatgtaaaataaaagtatttaatttgtatctatactaccatttatcgtgtcattcgtttcataataaaatcaaataaaatatcataaaagtattatattactataaatattatattttaaaaagtattattaatgagtgatatagtataataagaaatacaacttgacaatgtaaaaaaatttagaataaaaaaatactaattattctcctccaaaaagtagaggcgaggaattgtggttgggtgggtaatttgcctatggcataataccccattatcaaaaactaatataacttgtactcaaaaaacaataaaaaataacaaactaataaaacttgtaaattgtcttgtcttttgacaagtgtatgatgttcttatgagtttgattggtttttattatattgctatctgatttgggttggctttattggtgttttcaaagtcttcttgctgggatggatcaacaatatgatgcaatgagtttgggagatgatgatgatggttttttgatgtatgaagatgatacggttgacacagttgaattcgatgatcgatggtgccttgtaggatattttttgacggatcgtaatctagactttgaagcaatgcaacacaaaatggcttctctatggcgtcctgttcgcggtttgtttgttaaagaattagagccgaatcttttctttttctagttttatcatgacatgcatatagatcgtgttatggaaagaagtccttggacctttgatagaattcccttgatttttgaaaggcttaaaccaagggcaaacccacgctgtattactcctgcagaggtggatttttgggagcaattacatggtttgattgctgattttcggtcggaaagagtggtgaaggatttgggcaattacattggatcatatgtgaagatggatccgaataactttactggcggatggagaaattatctaagagtaagggtgcagatttgggttgataaacaactgaagaaaggatggaaactacagctaaaaaatgggccagagtgtaatgcgactttcaaatatgaagatttgacaatgttttgttttgtttgtggattgttaggccactccgagaggttctgcgagaaggcgtttgatacacctacacatcttcttactaaggcgtataatctcgaaatgaaagcgactcggaggagatgatcacattccattggtgctaggtggttaagaccagaaatggctacaaagccaattggggagacctctgctactctggtgactagcagaccggcggcaagcattacttctgtgcaatcaggggcagaagttatgggagcaaatcatggagtaatggatggaggagataagattatgggcaatcaaggtgatatggatggggaaggaatgaaaggtgatataaatggaaagtcaacaatgggagattatgaaggtaaggaggatgataaacaacttgttattgaacaaaaaagaaggagagtaacaatgggaattaatggagaattaccacaagaggatatggtcataggagatgatgtgtatgctgcatattttgatgaccacgtgatgaataactccaacgtgtcactcttacggaaaaacttaagtggggcgggttctggttgacaggcccaccaaggattatgaatcttttcaggtggaattgtcgtgggcttgggaacctgtggactgttcaattcctaaaagagatagtttctcaaaagaggcccgattttatttttctgtgtgagactaagtgtgctaagaatagggtggactgggttggaagatatttgggctttgatggggcttttagtgttgaggcccaaggaggaggtggtggcatagctttcttttagaaaaatcaaaatgattgttatatatatggttttcgcaaaatcatatcgattttattgttactagtgggacccaagaccattggagaattattggtgtgtatggcgaaccacgaaggcaactatgttggcaaacttggaatttattacgcgaactcaagacccgtttgaatcatccttggtgcacaattgggaatttgaataacatagtgtgccaagaagacaaacgtggtggaaatcgatatccaaggggtcttatcgaaggctttttacaagctttgagtgattatgacttaattgatatggagattattggtcacccatatacttggaagaagaacagaggaggaaataattgggtggaagtgcgcttggatagagatttgatagactcaagttggtttcaaaaattctcaaatgcaaagttatacaatttgcatcacttaacatcggaccatagtccaatcttcctggaaccagaggcacctgtccaaatgggaggcacccgaagcttcaagtttgagaatgcatggctcaaagagaaaatgtgttatgagattattcaaggctgctgggaggggaataatggtgaagatttctggttcaaacaacaactttgtgtggataaaattggtgaatgggggaaaacgcttactggaaacttcaagcagcgaattaatgcgtgtaaaagggacctagacttgttgaagaacagaagggataatgcctcggttcaaagatacaaggagattaagaagcagcttctgaaaattattgataaaaaggagacgttttggaagcaatgagcaaagcaattttggctcaaggagggagatcaaaacacaaagtttttccatgcgactgctaatacaaggcgtagaacaaatatcatacaccaattgaagaatgaaaaaggcgtagatgtcacctggaattcaggtttcgaacttgtgattactgattattttacaaacttgtttagctcttcttcaacattgacccagccagttattgattgtgtggaaagaatagtcacacctgaaatgaatgagactttcctgcttattgttatggaggatgaggtgcgcaatgctatctttggaatgcatcccgataagagccccaatccagacgatttgactccggctttctaccaaaagaattaggcagtagtcggtttggatgttgtgaaggtagtgcagcgttttttcacaagtggacaatttgaaaatgatgtcaataagaccaatgttgtgcttataccgaagacaagaaatcctgagcgcatgacggacttaagacccattgctttgtgtaatgttttatacaagactattaccaaagtaatggcgaattgtttgaaaccggttatggataagattgtctcgcaataccaaagtgctttcatacctgagaggctcattacggataatattatggtgttttttgaagtgcttcattatttgaaaagaaagaggtggggaaaagaaggttttattgcactaaaattagacatgagcaaggcctatgataggatcgaatggagttacttggaagcaattcttgtgaggttgggatttgataatgcttggactactttgatgatggaatgtgtttgatcagcttcgtattccattattcgtgggggcaaaaggatgggtcctatctctcctcaaaggggcattcgacaacatgatccactatcgccttacattttcaccttatgtgcgaaaggtttctcgacattgataaggaaatatgaatcgcagggatggcttcatagttgcaaagtggcaaatggtgctcctcgagtgtcacatatgttatttgtggatgataattatctctattgtaaagccacaatggacgaagcaactaaagttcagcaactcctcactatttttgagcaagctttgggccaacaagttaactttggcaaatcctcaattttttataacaacaacaccgatttggctatcagcaaccgcatctgttccttactccaaatggtggtggctgatgagaatggtatgtatcttgggttgccaagcacaatggggaggaataaaaatgttgtattgggatacttgaaggaacgggtcaggaaaaaggttcaaaattgggactctaagtttctgtctaaagcaggaaaagaagtcttaataaaaacagtgggtgtcaagctttgccaagctatgctatgagcgtgttcctacttcctttagatattagtcatgatatggagcaacacatggcaaaattctggtggaaaacatcaaatacaaaggataaagggattcattggatgtcttgggataagctttgtcaacacaaaagcgttggaggcttgagttttcgtaatttgagagatcataatcctgctcttttgggaaagcaagggtggagattacttaccaatactaactcgctggtttcaagaatcttcaaagctcgatactacccaaacggatcttatctctcggctcctataggtaataatccaagctttatttggcatagtatatttgaagctcaaaatgtggttaaaatgggggctcgttggaggattggaatcgatagtaaagttgttgtcaaaggagagttgtggctatcattggaagagaacccgttcattacttctacacacccagctttaaactcagtcgtggttggtaatctgatggagattggaagtgggagatgggatatggaactgctacacgatctgtgcaacaatagagatgttgcagcaattgttgctgtcccgattctgcagcatacagcagcaggtgggcttgtgtggcaccatgaattaagtggcgtctattcggtcaaaattgcatttaacttaattcaaaaagcaaaaggggtctggaatactgttgaagct

SEQ ID NO: 37069 - DNA, 3030 bp, Cannabis sativa
taattaagcttcaaaagaaagaaatgaaaaaaagtgtagtacctcccaatatagagagcatcaccaaggaaaataacacccataacagctgcaataacaattgaaaatggcttgaagattgagacatagactggccctttcaagagcaaaccccatgtatgaactgctgcactgaagcttgggcctaagaatccctgaaatgaaacataaattacatcttttcttttctagacaaaatataaatcaaatccctctactagtgtttttttagaccacgtgccaattataaggatcttatatctcattctttcttaactgggttatcgcagggccggccctaagcataggaggctaggcccgtacttagggctcacactttccaaagtgtatgacaaatatttacagtttgattggttagggtgtatgacacattacacaatagtacgtgtttgagtcctatgacacttattcgtcatcattggtatgtatctcgaaggttcccatcttattaaggatgacacctcaacaacaaactagcttcctaaaaggtcaagtacaaacccttccatgaaaggctgtgttagaattcgaacccttgaccctaaaaaataagatgccaacaaaaacatccctatcactacactatacaactcgtggtggtccgctctaataatgttatgaggtgggaaaagaaagagagtttttttagtacttacatagagtataatggtaactaatgctttatcagtcctcaatgtccaatcatttatgtctgttcctaccatgaagcttacaacagctccaacaattgctgtgcataaggagtataggaccaccactattagctcagctgggtattctttaatgagttgggtctgcaacaacatgtttaatttaaacaaaaacactctgtatttttcttatgagctgtagttgaaagtgagttacctgaagaatgtaccaaattgagactagtacacagaaggcaacaagtaaaagaccaccaagaacccaattgggttgtgatgttctcagagaatagtcaaatactgaaaaaggtgtttctttagatggagaagagaatattttggttcccttgtagagaattgctattaaagctcctgatattgaaagtaaagttcctatggttttagctatagtgcttgatcttctaaagtccagagtttccatcctttaagtgagtcataacacattattatatatactcatagaagaacaaaacataataatttcaataaaggaagaaactttaagcattagaacctgaaaatgacagccaatacaaaagtgaaagctggagaaaggttgctcatagctgtagcaagagttggagaactatattctatacctttgaatatacacatattccctccaaacctgttttgccagaaaatatcaccaaaaagaaaagtcttcacacatagagatttgtcaagtgaaaatggatttcattcataccctataactgaaagcaggacaattctgtagaaaatggaggttgtgaatggtggaagtcctcctcttctgcatacatataataatatggacaatttttcaacatggttgaacttgaaattttatgttaactaagtaaaatgctagaaaattaagaagaaaaaaggaaagaataccttggaaagatgaagagaaggggtaacagagtaattgagccaaaagcataagaatatgtaacaaaaacaaagtagctcaatcctttggtagaggctgctttatataaggtatttaagcccacattaatgcattccattgcagccatggctatgaatggtataacttgtttcttacaatcccaaatctgagctgccattgttttgtgtgctccctcttctcaactatactcaaatcaaactatgcaccttttcatttgttctaggatctgtaacaacatcaattaatcattaatagtgtttgtttttttctcgttaagaataataaagtattgagtgtacaatgtgggttgttggcaggtcaccatccataataccatatgggtcaacttggtttgtttcaagcattattaataaatgtaatttcactttcatagaaccacgtagggtccaatccaatctaccatttgctgctcatacaatttgattcaacttgttcatacctttttactatgtgattttttttttttttggagaaatttcggatccactaattaaatcaacttgttcgcatcttttaacatataattgcttttttttttttagtaaattcagattcactaattaacttaacttgttctaacttttttaccatatataattcactttttttgttaatatatagatagatatattttttcgatttttttttagaaatttgttatattagtttttaatttttaagcttttcaatctctaattttttttttcttgtgaatacatttttttggagcagaattatacttgtttttcttgtttcaagtttaaatggtaaagctcataatatgaactaaaaatgagaagaaacatattaatatgatcaatttatcatagaatttagtgttctaagatgaaattttatgttctataattactaatttattaattaatttaactgattacaaaataataatattggtaacgaaatagatattttgttgcaaatgctaactgaagaataaaattaaaaaataaacagtgtataaaaataaaatacataaagtttttgtacgtatatcaataattcttgtagattattaagagttcacgaaatcaggtgttgagataaaatttattagatgaacctcaaaaatgtaaaatattgacttacacataaattcattagatggtatgtaaaattcaattatttcttctcagcttggacatttgcatttgcctagtccatatataaccaggctaactaatgggcttcaacactccaagatgagttaacatatatacctaaaattagcaacataaacctccccatcccgaactcaagcatgttttctctcttaagaccagtaattctcagtgtata

SEQ ID NO: 37070 - DNA, 7003 bp, Cannabis sativa
aaaaaagaagaagaagagaagaaaaacttgtgagatgactgttctctcatgcatatgtttgtttttctgcttgcaaatctcaaatatacgtttcttgttggggaatattaatgtagattttctgtgcttaaatagccaaacatgggagcagattcgtctgaaattcacgctgatgctcaaactgacgatacactttatggagggactatttgtggacctattgcagaatcaatgaatgactcaatgtttcagttagtgttttctcactggcgtaatagatttgagagcttgaaggaaacacatgaatttaagttcatgtctgcagctggttctcttatgaaaactatggtattttaattctcttgaaactatttttttaacttttcttttttcagccagctcgttcattttaaagctttgtttttttttggattactaacagtagttttgccttgtttctgtgagtgcccataacacatgtttacacatcctgggctattttatttcacatgaactgaaatgcttgttccttagcctgccagtactctagcatgcacattttgaaagtttattcttgaagtttttaccccttaaataattgttagttggaatatgaattttagataccgctctattttcttcttgaaaagacttcatcttcaccttccatagcacatgtacacacatatgctacttgattttcacaaaattacatcatcaaatcatcttgctgaatgcttgtttcttaatccgtgagtactccagcatgcacattttgaaagtatgtcctctgtatttttttcttgattattgtttgcaggaatatgaatttagttactatcatctcttttcttcttaaaagttcttcatcttccacttgtaatctgtaaccctcaatagcttatagctgatagcaaaagaaatatatggcctcattttgaaagcttaaatctgaattattggagtctgaataacaaccttgtctatgatagcattttacaacctcatagtttttgcctttcctttatgcagatttgcatgctggacttgacacttgaggtgttgccagaggattctaaagagtctcaaacagctcggattcttctttacaagttattttatgatcaaactgatcaagggttgactcagttccttctgaatttgctcaaatcgtttgacactcataaacaagccaaaaggttttttccccctctctccaactcttttagattttgtttggaatttgagtttttctgagggaaaagagtaggaaaaaaaaaagaaaaatgtttttctacagtttcatataattttattttgaaactttaaacctttaccttttttatttattaatttttatttttttgtaagtgttctcaatagtaaaaaattacttgcatccttccaaataggaacttgctaattaaccacttgaggctagctcaagtggccatatagaaggtaatgtattggggtgggggttcatgggatcgaatcccagctatgtaactcaacatgtaatttaaagaagcttctataaaaaaaagggaacttgctaatccatgggactaaattgaattctcatttttcctaataaagatatgatctcattttttcaacccagacgagatagtagtatacctgggggtttgagttatatctcaagttcatagacgtaatgtcaaccctatatttatttgctatagttttctttcatatgtttacatgtaaccaaggatatgtattgtgttccttgaatcttgatatttaagagtttcttctcatacatatttttatgagtattatttattgactttttttcagtgatctcgaagatttggtagaaatgattaataagattttacacttaatggagaatctgcaagcacgtggtacattgagggtatgcatttctttctcccttctttaggccgaaatcatactgctactgaaaataatgtgtctaagaattcctttgaagttgaaacattttcgtcattgaattactctaagagcgttccccttttctcatggtgaaggtttctaaaaaatccaggaaagggagaaagaagaaagcactgaatgataaggaaaccaaagctgaactcccagaagaacattctacatttgagaaagctgaactcccaggagaacattctacatttgagaaagctgaactccctggagaacattctacatttgagaatgaaattggtgtttctaatattgagcagccagcagaaaagggtgatgcgcacaccggtgttgaaaataaaagttctgatgataaacaagaaacaaccacccctgatcatactgatgaatgtgaaggatctgcattggagacagatactaatggtggcaacctgccacagacggagcacaagaattctgaggatccctatggcacaggtgattcttcatctgatgaacaggcacctgagacgaatgaagtcgatttccaggtttcaactttggtttcttcatttgccaacaaccatatcattcagaagctgtgttggttgcttaagttttataagagtaactccaccagtacaaatgactacataataagaatgctgcgaaaaatcagtgatgacttggagctttcgccaatgttgtatcaggtcagacttttaagaaacataaatcttcataatgtttcatggtcatccttgatatacattagttcttaaaaatcattttctttttttgacagcctcgttccttactacattttatgatttcctggctgagaagattagtcctttaatatcattttctttttctgacagttatcgctccttattacatttcatgatatcctggctgagcagaagtcatgtccgtgtcaagaatatgccgatattgttgattttttgacaagtttggttagaaaaatgcttaagaaaatgaaaaagcaaccccttctttttgtggaaattcttttttggaagactcgcaaagaatgccattatattaatgctgaatatatgctacatgaacttggccactggaggaaagaaagtaagagccgagaaaaaaatttgggtgatgtagatgctggctcatcgcagggaaagggatggacacatgtaagcatagcagatgcgcttggtgaagatgaagctgacgttctgatcagtcatgacccggaaaatgatgagtaagacagttctttgaaacttacaagaaatgcacctttatgattttcactttttttttctttctttcgtgtgtcactagcttgctgaattcatattgaatataagagattgtgaaattgaatattaaatactgacaatggaaagagctataaattgaattcttcaccatcattgtactgtagtgaagaaaacattggcaaagtgaaaggaaccagtgggtctgatggacaagaaaataatcacaagtctgctctctggaatgtatcttttgttgatattgtaattaaaaaatttctgtctatcctcaaacctatttctcttgcagtggggaaaattctatggagcataaatctcaaagagttgctgagaagaaaaggaaagttcttggggatgaatttgatgagaaaatcagaaatctttatgagaagtatgcatgctctgagcaaaagttttatgccttttctttgttactattttatcttaaagtgcgtaaagcatatcatgtgtataattaaggttttgttattttaaatacactttttgacaaatctggaaattgcaggttcaacaatagccaaaattgcagtggccttatagcagaagaacttgaccctgatggcaaaatttcatcatttcaagtttccaagaagcttaaacagcttggacttagatgtgcatcaagaaaaaggatacgcaaatctggcgaacgtaattcttttgaggctaataaacttgatggagaagaaagggtagtggaaactagtggcactattcataactcaaatgattcggagcaaacattgttgagtcaacctacgtaagtgtttaaaagaaaatcctagtatacgaatatgctttagatttattaatcgtttatttggaatctgtcatttataagagtatacatttctaaggtttcaaagcgtatgaaagattggttataagatttgtatgaatttcttaattgagagagcgcctgatttgtcattgtatagattcatgattttgtttatttctgttaatctgttatgatgaattttataggcgtgcaagaaagagagttcgggcttttagtgaagaggaggagagtaccattagatcattatacgagcagtaagtgtcttacttcactttgttgcttgttacaatgatatagttgatttctttccacttggactgtaagaaattaaccaacttcttggctttcctcgattcattcagattcaaagaccataagagatgcagctacatgattgcaaatgcactggatgcggatattaaattgacagctaaccaagtttctcgtaagcttaagcagcttggcttgtatattcctcggcagaggaaatctcgtgccagtgtccatttgagtgatggcgagaacaatgactcctctaatgacaaagagaatgaatccgatgatgaaacattgctatcattaatgaaaaggtaaaattgccatcttttagacttcaacagtcctctcttctacctctgtgcttttaacccaatgtcacccatttacttcacatattttgtctgattaagacgcataacatgaactctagactcttcattcatctttttttgctgtatattgctgaaactgacgcataacatgaactctagactcttcattcatctttttttgctgtattttgctgaaactatctcacatagtttccatttttgctatgagctccagttccatatcttttttgtcgctcattcctacagcaattatctgcagagttagacaaatttatactttccatttctccaatctataataagtacaaaattctccagagatacatttctcattaaatatgtgttaattatggcttcatcagtacatacaggtaaatgttgtgtaacactgggtagtttgtttgttgtttctttttttattatttcaggagcaaaacagagaagagtagagtattaactgaggacgtagcagtagcagagcctattgatgcagagaaattaatagatgatgactctgatgatgaaatcctaacatccattataaagtaaatatttctctcttatctccaaaaaataaataatcattaaaagtgcatgagtcaagctctgtccactgaatttatgttttgaagactttccttatacaaacttaaatataatattcattttgtctcatttcattaatttataattttgtaccgcgttccttatatataacatatctggtctactggatataggaaatcaagggaagccccggttaagtcgaaggaagtaaaacggactcccaccccaattaaaatgtaagtaatgttattgaactttcttgtattttggagctaactagcagacttcaaatttatcagtttctcttaaatttcaataacaaagtgattactggataaatgcagaatcaagcagagtagtttccaatctgcataatgttttccactatatctttgattctctttctttttcattgaagttctcatcattacttgtgcatcttctgattaggaatgtcgacgaagactctccgatattggagcctgcagaaccggataagggtgtatctagcaacattttcagtatggacaacacgagagaaactgaagagatcaccaatgatattaacaatccagtagatgctgtgcttgcagcagacagttcgtacgatttgccacatgaagggaatggtgttgatgatgatttagaagattcagatgatgaaattgagcatactgagttttcaagaagtgctgtaagtagaagaagggtggtgtttgatatggaggatgatgactgagatgtttgctgctgtggtttggccagtttctgattaactatagtgctttaaacggcggctcataaattttatatgtgaatattagatgatattggtctgaggctgacctcccaagttatgtttcacaactgctatcaacggtcatatgattggtttgtatgactgaactgcacggcaaacaacgttctcggaaataggcgaggaaagggttgtggttttggagagtacctggagagagcaatgtcagttcaaaatgactggttggcgcaaacggcacaattattgtcgttcatatgtcgacaattcagtttagagaaattgtaagtaggaaaagtaattgagaaaatgaaaagaatacaatctgctgcaatgcctttctgcattttaacgtttgttatttattgactgctccgcaaagtttagaaatattgatttattttccttttaatttttcggaaaaaatataacaatgaagaatagaaacttacccgttaaaaaggaagctatttaccttaatttttcagaaaagaaaattaaaaaaaaaagttgctttcatttgtttttgaagcaatagcatcatcgatgcatactatagttcaatataacaatgtgatgtttacttgtcataaagaacaaaataaattaatactttcacttaaataaagaaccgtctagtattacaagcagcttgtgaagcaaaacaaaaatcactcaatctaattccgttatctataacaaagccaacacaacaaagccaacacaaaaagccaagaatgtactataccttgttaccaaacgtcaataataataacaataaaatattatcaagcatctctaattatgctctcttcattgcgattccatattaggcgggattactcgctgaatttaagcatatcaataagcggaggaaaagaaacttacaaggattctcctagtaatggcgagcgaatcgggaacaacccaggttgagaattaaacgcctacgatgttcgaattgtagtttgaagaagcatcctcagcagcggaccgggcccaa

SEQ ID NO: 37071 - DNA, 6083 bp, Cannabis sativa
atgttattaaaatgtatgagtttttataattaagttttttttgcacattttttgtaatatattaatttttgttgtacattaatgaaaaaaccccaaaataatatgaaggtatttacaatttcaaaatacaaaatatgaaataaatattaataaaaacactaccaaacatattttttttctctttatatctatatatatatattttaaaatgcaagataacagaggaatatattctttctatgtttaaatagaattaataattacgtatatagtcaactttgcctatgctatatgtaaatttgatttgttataaaattaaaacccattaattagtggcacacgttgaaaatgagcgcctaagagaggctaatttgtttatgtttatagtctgtttattaagagtaataataataataatttaaataaaaagacaggtaggtagatacaataatacaatacatgggtggaagattaggtgtagcattttttggctctaagctatcaaacctctttaccgaaagaccaactttaccagaaaaatatcacaatggtggcaataagtgtgtgtcacatgaattattgcaatgttaacttaatatcacaagtacacataattatagataaatttgacaaattatttttaataagtgaatctatattaattgaatacaattagttgaaatatttcattatcatactctttacaatttgatatgtgtttatgataacatttaaaattaagtacattgatgcatcctattcgtatttaattctttcatataataatatatatcttaattatttaagatatcttgtaaattttaaaaaaatataatttaatttaacggggcgaaaataaaatttaaacaatattacatgcgtgtttcttctattttatgcatatgtaaaatagataattaatttaagccttttttttatattgtaattattttaaatgtcttaaaactttattgtatgtcttaaactaataagaaaaatttatatattagactaaaaatttgaaaaaaaaaattataaaaatattttaatatgaatctttttttttattattatttttactcttgatttttttttatttataaaaatatctcctcagtaaaaataataaattgttttcttggttattttatattttatttatagttgttatgagattatttttgtgattgtattatagttaatttgtagttatcgtgatgttaatttctaattgttttttagttgtattttttgttgaacaaaatatatttttgtaattttaaaatttttacaaacatatttttataattaaaaattttaaaccataaaattataaataaaatatgaatgaaaaatatttttaaaaatttcttaattaataattacaacaaacaccatggtataaaaaattaatattataatatcaaaaattcaaaaaagatatatcaagcactttatactccgcaacaattgaatatgctccacaaaatagtgtgttttgggtttggcccctcgtgtactgttggtttacatcttgtccctgtgagacttaattagatggacccacgctttttaaatgtcataactacccttctgcagtaccaatattaactaacaaactaagggacaattttgaccttttagcattaaattcaagttaataatacccctgaccctgattagtgtgattaattggtttacaagtggccccagacatcctatcctcctatagcagcaacagaaaatcccttgatcgcattgtgcattgttttgtcctaactcctaaggcctaagtatgggaaaaagtccaaacaagaaatctccaaagtaaaagttccaaactacaaaaaaagaaaataatgttacataatagaacaaagggacttaacaaagttgaatggatcaatcctttgatcagcaatgagtggatccaatttctttttaataataatactctttcatattcattcaagtaataataataataatatctcattataatatcagagtaattctttctctctaagatctgttcttatggagtaaatacagggatattcttatcaagagtgtttgactttctctttctccgctaggatagcatttgagctcagaagccgtgaccctctgtttcttgaatcagtcaggtcagttccccccattttagcattctctatttttggtgggttctctttcatttcactttctagttctgtttaaaagtcaaatttataaattttgacagaaacacttgtcagataagttttattatgcaaatggggttttaaaaattccacctttatcaaataatatttggaattgtaattaatgagtggttttacgtcttacaaactggtgtcacattcatgggtttgtccaatgcagatccaaaacattttgagtactattttatccagtttcttatttgagctaatctactgaaatttggagatgggttgatgtaaagtttggaactttgttttttttttcgtcaatgggataagcaagtgtcaaaaaaagttctttatataaattaaatagtcagattgatcagtgcgtatttattgcctttaatcaatttgcaattgatcacagataaattcaatgaaaagtgtgtttattacagccctagccattttcactttagaatttagaccttatgaggaccaataccgagttttcatccatgtttacctgttaatttgatgtggatttatattacaacattggactagaaatctgagaccaccattcatatgcaagcagaaaaagtattttagtccagaaaaggtgttaaacaataaaagaaaagaaaaaagttagtacctttcattgattgtaaactcttctctcttgtgtgatctggattaaatggcagctgagaagataagggcaagagtgcaaaactttgagaacttgtttgttgcatgtttgcacaggcttggaattttttggcattcttgactgttcacagtgacttttaatataatagaagaacaactgcttcaaagattttaatgtcaattgaaatagctaaactttacatatggaaagtggtccagataagtcatttctgatgttctgttctgttcggttggataggacgatttggctgttatttccagacaatttgatcaagttgttactaccacccctgtaaatatgatagtaggcacacatgtactcaatataccacctacaaaattggcttaacatgatgacttgtttgtggagtgaagactttctaggtttggtgaatttcttctgcacaaatgcatacttttatatgcttcttatagtggccctttattagttgagtggctaatttatatcttttgaattattttagccatatgaaatttatgttgagcattttgatttccagattatatggggcaactgttatatctggtgaagatatagataattgagtgatagagatagcagaagcaatagtatagtgtacttaagaatccagattttttcatcatgcaggagtaaccttttaaaaagcatgagctcaagtttaaataaatcttcttcgaatggctgcgataaggttttaccattggaagatcagcaagcgaaggtatctcctccagttatctgttatttcattatatccttaatcaaatcacctcttcttttctttgaaatgtacaagtttgaacaaggtagagttagaatagatttacttagcaatgcttttcaatatttgcaggtaaacgaagtgagaaagtcgataggcacattgccagataagttatccatatactgttccgatgcatctatatgccggtatttgagggcaagaaattggaatgtcaagaaggcaactaaaatgctgaaagataccttaaaatggaggtcagagtacaaaccggaggagattcgatgggtatgctactgaaaccttatgccctggggggatatataaaatgttttgtcaactttgtgctattacttgagatttggtgtcatttcaattttcattggtgatgtaggaagaggtagctgatgaagcagagacaggcaaaatttacagatcaaattacattgacaaacatgggagaacagttcttgtcatgaggcctagttttgaggtttaacagcctccttatccccactgatcaaccattttaaccattgttttttcacttcgattagtattactagtaaaatatggaatttctttttctttccactcaagttgattttacaggtttttctgttttttgttgagttgttaattgcagaactcaaagtcaactaaaggacaaataaggtatttggtttattgcatggagaatgctatcttgaatcttccacaagagcaggaacagatggtttggctgattgattttcagggtttcaatctatctcatatttcagtaaaagtgacacgcgaaactgctcatgttttgcaagaacactatcccgaacgccttggtcttgccatactatataatccaccaaaattctttgaaccattctggatggtatacttgtttactgttattattctttatgctgcattttatgttaatttcctttgttgtttggcttctaacacttgaaaataaagaattaattaataaattgtaccctttcagttggtgaagccatttttagagccaaaaactcgcaacaaagtcaagtttgtgtactcggatgacatcaacacgaagaaaataatggaggctcactttgatatggatcaactggagtctgcatttggtggaaatgatactacaggtttcgatattaataaatatgcagagagaatgaaagaggatgacaaaaagatgcctgctttctggactaaaggaaatcctccagctccagcaacctcagaacctgtcccgaacaatgacactccatctttggactctaccatcaagttagaagatgatgcagctgattccatcgagaagagaaatggatcggaaggggtgctcccagcccccaatcacactatgctcactgttgacagtagcagaaatcctactaaagaggctcagtaattaaggatccataggaaggccaagtaataacaaatttccatgtattaaggatcaaacttgttaagttgttgtcaatggtgttgcaacggtaacgctatggacgttcactaaattcagcttattttcatgccatattaattaatggcttaaaatatgagatttatcaggctcttgtccgaattaacatctccaattacttgaaatgggctacacataacataagacatttatagaaatattgtatctttggtctgaactcacatggatacaattactgaatgacattagaccacactacttatctgagtccacatgagcacttttacaagccacttattagcacaagatgaaggataactagataccataatcactattactaataataattacagcatatatttatgagcaaaattagagtctagagtctaataagttgaattagcatgtccctctcacacgtttaataataagcttacatgatcaacttattcttttcttcattcagtaattagtattctctagaactttgcaaagcattcaattacttctttgaatcaatatattatattgaaatatttgcggagaaactagtcaattattgtaagtgtggtagataaatacttaaattttttttattggcaataataatactatctaaatttctacaaatgtgacaaataaatattattttttattgacagtagaactacgaacatttaataaaagagcatagctattaggcacggcacaatgagatagcactttgtgaataattaatgatattctataataattattaaattataacatatgagattcgatatttaattatactaataacgatatgattcgcagacactagtagtatcgtttatcattcctcttaataaaatagtgctatatcacttctcgctacacgatttccatggcactaagttcagcgtaagtatttcaataactaggtaacatacccgctcttcgcgcggttattctttaaaatgttcttaaaatataataggaaaaaattattaatacaattaaaataataatttaaaa

SEQ ID NO: 37072 - DNA, 13007 bp, Cannabis sativa
aaaaaaaaaactgttttgaagcgtaaaaatgaaaaaacccctttattaaaaggataatttcacaaaaacaacaaaaaaattacaaaaatacgatctcacaaaaatttaaacaattttacgattttttttattttatttacagaaaatatgatctttttatattgtattcatgttaatttgtcgttaattttttattatctgtatgttattttttgttgttttgatgttatttagatgttattttcatattatttttacgtaattttcttgctgttttcgtcttatttttacaaaaaaccgtaaaaatgtaaaaataaaaaaaattcattaaacgttaaaatgtaatttttttataaaaaattgtgccttatgtaattatctaattactacacatttaaactacttgtcatccaaacactttgtatttaaattaccagtgtacttaaaatacaatttaataattactcttagtagtgacacaattacttctaaaggcactctgaatgatgtatgcgttgttaaaaaataaaagctaaagtaacatgaaaaaatatatactaggaactttattttcaaaactttttacttctaatgtgctcgtgtgttcgtgggggattcattctaagaaaatgttttacaaactacatatagaaagttaacccgtttatcctttccgaaaaaaaaaagagttaagtttatccatcaacaaatcagaggattaattcaaattagaacactgaaagccattgaaattaacattttatagttttatacaatagaaacatgattcgaatcaaccaaatttttgaggactcgtatacagtttcactggtcaaaaaccaagtatttaataggggcactatttataaactccaatatgaactacacattttttggcactctttccttaagatcagacaatggcagattcttctgctacacaaattggctgtgtctttgatcaatcagtagtctgtgcactacaagaacaaaattttaagtgcttgacaaaacttggttatgccaaccgagaactgacctcaaaatatctgcaatgctaatattattggacataacacacttttaaacaaagtaaaaataactcatggtcctaacttcacagtatccatgtgaaatgctcttcagaagtaaggagcaccagtttgtttacatgtattctttttcattttcaattaatagggaaagaagtcttgcaaaatgtgcttgtagggtatcataaagcatacactgtatacataactaaccccagctaaattcttcaagttaatttgatacatagtaagcttgaccagaatagtatatgtataataagaagaagaagaaggaaaaagagagaagggaagcatatctcgtactaataaaggcactattatataatggtagactagacgaggcaagccaaataaatcaacttaccaggaaaaacctacatgaatgaagccagagacaactttggcatttttgcaagacatcttattgctcagctattaaagctgaggtatcaccattagagaaaggaacaagattactatgagttctgatggttgtttcgcagttggaatcgctagcttctccttcaccctgataataaaggaaaaaacaaagcaaaagttagacaggtaaatgttaacacagaataactcaagccaatttgaaaagataaaaataccaggcagcataatacaattatacctgctccaccggagttgaagaatgatcctgggtcttcttggaaagatccctcaaagtcccctgaaaaaaccaacgtcaaatatttaaggcctttctttcattgcttctacacatgtttaggatttacaattgaaaaaaaaaatgcaccagaatgctcatccattcaccatgtatttgacatacttgccaatccatgtttactaaaaaagattaatatggtgattaaacttctaactagacaaaatgccttttctggagtgcaagcctcgttacgggacaaaagaagtgcatcagttttatagcacaataatatcacacacaacgttgatagatttcaattcctatatccttaaacccttccgatttatagaggaagtgataaagagaataaagcaatctgattgatatctctaggagaaaggatgatatgatcctgtcttgcgcacaaagaaaacacatctatcagcttacagttagaatagttggttaaaagaatgttcttttaaacagcaacaacaaaagctaatttcgctaaacatacaataaaacaaactcacaggaccttctctattgcaatttaaaataagacacctttttatccaggacactagcattacattacgctaaaattacagtatttacctaggcaagtaaaatgcagacaatatatacgaaatgaaactaatttcaatagatatgataccaaccctatttgaccaaaaaagcccacatgcgttgcagagagaccttgggccagacggcccacgtcgcatcattggggtagactttgaacttgtgccgcaatgcgtacatctaaacaagtttaagatgcaaaatagtgaagaaaaaaatgtttaaaggtaaacaacaacatgagagagtataataggaaaaagatacttaagaatgtatgataggagaatatacaagtgactaaaaggaacaaaaaatgtttgttgacttttaaaaagcataacacttacgaagtttcaagtaaattatcctcttgtccagactcctggctattaccccagctataagatccatctgacttttttgaagtgaactggcccttgttgcgctgcatcctgatataaatgcatatgtgaaataagtacagaaagcaataataagccaaactgttaagtaggtaagaacaagcacaacaataaatcttgcagtagcagcagcacatggaaaacatcaaaactcctagatctcaaacaaacagacgtttcattagctacaacaaattaagaacacagactgtataaaaaaaactatagtataaagttcacagctcattcaatgtgcagagccaaagaaagaacagttaagttccagatttaaataaaacaaggtaaaattttagttccaattaacgtttccaaatgagtcctgagggttaaactactttcctagatgcttttaaaatcaagtagctacttctgttacatttaccaaagacaagaaagaaagaaagaaaagaaaatctaaagaacatttggaagaggagaggataacttaatgaaagatagttcttaatggtgcaaaggagtttatacaaatcagatcatagagaccaataccattcaaattgtatacttgacatcttgttttgaaaacaaacattatactgtacttgatatcattaaggttaaaaatagcacaaaagaatctgctgcttttactactttttctaaatggtcataatgatttttgggttagtgcactgcagccacacccaccaaatctaaccaaaacaactcattgatcccttgaataaccaattacaataacacacctaagtgcaacttcttgacggacacaatatctaactttcttatcaaagcaccgctcttttctcttctgccggaacctatttaatgaggccgctctatgagactgactacaccgtactggaatgtcgaccatagcctatagaaaatgcaaaagcacataaaaataataataattaagatcccaaatttgagcatttataatagtatataagtacctttgtagaagaacaaaaacaaattgaaaagaaagttaataccctttgattctgagactgcatccccacaccttgtgccccagcagagatttcacatccccccaagagtaacaacactgcttgaacctacaaaaacgttagcaaactttctcaacaaaatattcccacctaggagtagccaaatccttaaccctgcctggttcctaagaaattaaagttcaaaaaaggaaaaacagaaagacaaaactcacttacatgttacttaaatcacactaaaagagtgtgaaattaacacagtaattgagcagagatttagtacaactttatataacaacaacaactaatttcaattccaaacattctaaaggtcagcactaactaactaactaactaccaccaccaacttcaatttcaacattctaatgttcaaatcagtggaaaatccaagcatgtaaagaaaaaaatcaaagtaaaaccctaagatcagatcaaagtaaaaccctcaaatctgaatcccgaaccttatctggagtgacagcgtcgaaaacatagacttgtccacggaacgagagggtgagctggctgctcccatcattacgatgaacgaccagctcatggccgccgccgccaccataaacagagtcgtggttgacgtcctcaacgacacctccaccgccggcgacaaccccggcggattcatcgagagcatgaggctcgtagcggaggtgaggattattgtcaacggactcggcaccggggccgattcctgaggcgtcttcgtcttcagcgatctggttagggatggtcagggactgtgcgtgtccgtacattggcggttccagtgaagcattacagggagagaaaatccgagtagtgaggaagaacaaaagccgaaagcagaggagagagatagtgttggtgtgtgggaaagaaagggtgacctggtttttgtctggtgctgaaagtagaaggaatataaggtaagaccatgtttggttagaatgattaaataaaggttgtgatgagagtgacaactgaataatctttatataatatctaatctataaaggcagcatggatggtaccacaccaccactccttctactttgtttgtgtgtaaataaatcaatatacttacttcaggcaggaccagtttacatgcacatgtgttgtgatttcacttattatagttaaaacttgtacatatcctccatattctcctaaaattaaattaaatacagcttcaatcctattcgtgtaaaaatataggttaaaacgtaattgttatttttgaggctttctccttaatacataatattgtttgtaatgctcattacgcatattttgtttacattaaaaaaaaaatagtttaattttcttatttaagatattttgtaaaattttaataaatttaaaataattaacaatataaaaaataatattcaaacaatttattttacacgtatatataataaaaaagtcacgggtgtaacatacagcttgaattatgtttttggcatgtttaatttttttaaatttattaaaattttacagaatgtcataaatagttagaatgtacacgaccataaaaaaaaaattagactaaaaagtctctcaaatgcataaacagataagaatacattggtacattccttttaaaagagtacattttaaattttttaaatattataatattctttgagccaagataattttgctttttgctgtagaaaagacaaataggctgcctgtgttgttgcaaaaagttccctcgcctcaacctcttgctcttgcaaattctcatcaaaagggttctgttgcaaagcattttgacactcttgcagctgggattttgcacgattcgcagctgcaggcaaatcgacaaagtgtgtgacatctagttgtcgaaaaaaaaatctttcaaagtcttcagtttagcaacagtctggaatattttcgaaccatataccacttgtttccaactttcagcaaccatattcacatacaatggatgattagaccacattttaaaataacgaaatggtttttcccccctaaaatggcctcccgtaccgtgactacagcaggagagtgatcaaagatcccctcgaattggaagcaaacttctgcagcagtaaaggcaaccaaccattcagggttagcaagcaccctatcaatcttagaatagatcctatccgctcccttttgttgattacaccatgtgtagtacttgcctacatatttcacatcttgggagcaaaatgtagaatagaaggaaagtgctgcaaacggttataagacaagggaatgttgtttcggccacacaagcagaagtgcttcttcagagattttctttcgatgaagttaagcaagaagtttttgcaattcctggaaataaagctcctggccccgatggctactctagctttttctttcaagacaattagaacctgataggtgctgaagtttgtgaagttataacatcctttttgcactcaggcaatcttcttagggagataaacttgattgtgttgactcttattcctaaaagtaagtgtcctaactcagttggtgattatagacctattgcctactgtaatgtcctttataaagtagctaccaaattgatatgtaaaaggctgaaatctgtcttgcctttccttgtatctcaaaatcaaagtggttttgtgcaagggaggttcattggacataatatcatgatctgtcaggatctcataagacactatgggaagaaaagtgggaagcctaattgcatgatcaagctagacttgcaaaaagcatatgatactctggaatgggacttcattgaggaaatgttgagtgccttcaagtttccagaaagcttcatcaaggtcatcatgatttgtgtcagaacaccaaggttttctttgatgttcaatggatcaatgcatggattctttgaggcaaaaaggggattgagacaaagtgaccccgtgtcacccttattatttgtcttcggtatggaatatctgtccaggataatgaagaagataagctcaaagtaagattttaagttccatgagaggtgtggagatttgaagttaaatcatcttagttttgctgatgatgttctgcttttctgtaatggagattacaaaagcatctattatatgctgcagggactaaatctattctctcaaacatcaggtctattcccaaacccttcaaagacttctatttattgcaataacatgagtgacacagacattcaaagaatccttgatgcttctggattccagagacatgaggtgccttttaggtatatgggagtgccaatttgcccaaagaaaatatcttcatcggaatgctctttgctagtggagaaaatggtagctcgaatccgaacatggagtactagacatctgacttttgcaggaagagtggtgctcattaactctgttttaatggccattcactcgtattggagtcaaataatggtgatgccaaagaaaattgttgctgagattgaggccatttgcaggagtttcttgtggagtggcaaccacctactcaaaagggttgctgccgtagcttaaaggactgtttgcaaggagaaatcaacagagggtttggacctcaaataggtaattgaatggaatattgctgctatgtttaaatatatttgggccattgctaaaaagaagataatttgtggatgaaatgggtgcattgtgtatacataaaagagcaatcttggggtgggattatataaagctaaaagcacagtgatagttggtattggaaaaagattgtggcaataaaagagagagtaaaagagatctatgatttagaagaaagggagcatttgagtaacaagtatgtcattactcaaggctatctaaagccatcatagccgaaccaaaggaacattggccgagtattgtttggagtcggctaaactatccaaagcatagttttattatgtggatggccatgcttaaccgactcaagacaaaggatagaattgccaaataccaacccaaaattgataaaatttgtctattgtgcagtagggaagaagaatcgatggaacacttgttttttaactgctctttcgggcagacttgcttgaatcaagttcaggtgtggctgaactggaacatgtgcaaaaggtcgctgccaggagtaataaaatggcttggaaaggccaaaatcagcaagtttcgaagaggtgtaatggttgttgcacttgcagttttggtgtatacattgtggtgctcccgaaattcaatcttttgggaaaacaaagttgtaaaaagtgatgtaatcacaacacaagtaaagaatattacaaagtgctgaatctcttgtatttggcagaaaaaagtgaccaatagagatagaatatagtttgaaaccttgtaaatattagagattatttagactctcttgttggagaatgctatagtgttgtacaaaattttttggagtaatgaaattcacttgattcataaaaaaaaatattcttttaaacaatgaataaattgatattataatattagttgacaatatataaatatatatttatttaaaaataattgaaattttcttacaaaagaaatatttaaatatagttacagttatataaatatatgaattgaaatatatacaaataatatttatatatttaatttgtgtttttatattcacgcttacatatcgtgttttcatatcgtgttttcatggttatatatgtgtgtgttattgttgtgcatttgtaattatcgtgtctactatacttatttatatttttcatgtcgtggctaaattcatatttctttgtgtcatactacatttaagcaaatattttttgctatcaattttgtaccgtggcaaaaggtttagttcgaatatacaacattacttagagttaatactttcatttctatcacgagcaaaatattggattttaattttaatgtttgggattatttaatttttatttcattttgaaattgtaaagatacttgttttttttttttttttaattttatttatttattttgtaatggtaactgttattataggttagaaaaaaagccaaaagataaagtgaagagatttctttcatccataaaaattcattgtctatcataagggcatattgaaccaatctatgggccgcaacattaattttgtaacttacataaaatagagatgcttctagaaagctatacaataaaacttaaataccaaaaaagaaatatgttgactccgaaatttgggttagatttctaaaccacactcgctcactagattggcgagaataaataagtggttaagtaattataagagagtcacaataaatttatagtagtttactccctgtatcacgacaataatggagctacgtctatttaattacaaaataagactaaaagtcaaaagctccaatttctagacagagaaactagagagagaagctctaaccttgtgagtaatttttagaacttgaaaaatgagcttatgaagctctcctttatatgtgaaggaggcctacaaaaataggagaaaaataaaaataagatatttttgactgttgatgatgatctaacggtgaaaattagttctttgtggtgatggcaatttttcggagcctggctggtgccattgtgggtaactcgaagcttatttttgtaactcccttggagtgaaattttatgacgatatctttagaattatgtctagagtgtgagacatgaattgatagagaattaaattagcttaaaaatacaagttgaattgcgtcaatcagatcaaaattgagtgagttatgactattttactaaaggtagtttatgacacagcccccaagttgatatatgacgtcaacctggacgttaggtgagtaaaaaacatccaaagggatatactttaagatgcatacgtgatattttaatatcacttagtcagtttttgtgttctggcaaagttggtcaccagttctcatagatattgttgttttgcaaaaataagagactcgaaactcttcatttctgagtgagccgaaaatgagaaatgtaaagttgtgaatttgacttctctaacttcatagatctttgttaatatgaaaactagacggaaagtcaaaacaacatcagaattggataagcaaaactcagcgcaccatgccttttgtcaacctaggcgctaggtacttactctcgagctcctgggatctcattttttatacttccaaggtttctgaacttgaggatgaggtctcctaccctattttgaccattttgaatttaatggtcacatcagttttggtatttgagcaaaattgaaggcagcatcccaggttgattgtcaacctgggcactaggcacagcactagtcaacctgggcactgggcccaacactagtcaacctggacgatgggcccctttttaaggggctcaagtttatggttttctccccaagtttgctttgaatctttattatttctgatgaagaaaaaaaaatacctagaacactttttgatgaactggatcaaaaataacccgggttgacattacgttaacctgggcactaggcccaaccctaagtgtcaacttgggcgctgggtccaagttttgcccctttgaaaaatccatttagtccccaaaactagaatcttaatattttttgaaaatgaagaacatgatcgaaataaattcttgaaaaactccgtttaaaatggcccaggttgacaaaatgtcattctaggtgcagggctagccctaggtgtcaacctaggcgctgggctctattttttgtacccaggaagtgttgtttattctttaaaagggcatatttccctatttttaatgaagacaaagaagatgcaaaagtccgatctctaatttaatgcttgaaaggtgtctatattgacaaattatcaacctaggcactaggtgctcagggccccaggtgctcaaaaatgaacttgctctgattctgatgttgatgcctcaaatatgtttgtggtatgtctagttgttgtcttaatgcaggttttggcgcttttcactaagacagtcctgaacattgaaaccctaattagatatgtcaacctaggcactgggtgaaaccctaggtgcccaagttggcttctaaattgcaggttcgtgtaatttcatctcctagggcttggattaggtttctccatgtcttcatggtacaaaatactgaaagataatgagtttgattcaagttattgaagtctgaacttccaacccggagatcccaaagttaaatgggtgtagggctaaagtcccctcccaagtcgactattataaatcgggtctactcaactttgtgacatcatcattcatgcgacgtgtcaaacattgatgtccatgtcacatggaaagttttcgggttaacaattgctccccaattcaactggacacttgtgtggagttgacttgatgatgtgaactgagcccttttcgcttgacactactaagtgggcatcaattttgaaattcttaggcacttgtatctattcttcaagcatttccaattgaattaggacttcgaacactttagcttagtccttgataatttcaaaaattaattaacaataaaaaagaaaaaaaaacttatctttcttttcactatcttttacctttttctttgaaattttgaaaatttcttattttttgttacgatgttaggattaattggatttgaatcctaatcctatttgtaaatgccatttgaaattagagagagaaaagaagagaaaagacttttagccttttacttatcatttatctttttcctttaattatctaaatcttccttaatcttaatagcattaggatttcatgttaccttttaaatttgtattcatattcctatttgtataggaatttagaaattagcttgacaagagaagggaaaagatataattatatcttttactggtcatttatctcttccttaaaagctttaaatttaaaagactcccattagctttaggattaaaagattgaactcgcatgtaaataagtgagttgacaatcaaattttcacactttctcattctctcccacatgcctatagccttttagagagaactttggaatctcatcttcataaagctttcaataattcttcattccaaggtagataaagcactttcttttttctttttctttttccttttttttcaccagttttttttttattatttttttcttcttctcctcctttgttgaacttattccaaagacttttttgactcccaaaaaaacctttgaaacacttcttccaagatctccaaaaattcaaaacaatctcgtagaaccttgaaaaattcctcccaagttactttgactttttcaacctaattttgatttttcttgagttgtaagcaacttgtgttgttgagcttgaaatggctaaaatgaagagaagtagaaggttacctaatcagtatgacccccatgtagctcagttcattaaagctaagctaattgtgcataagtctaagaacttggacaaggcgcgtggtgggaaggtgatggcaactgaacttctcaaagctgccattgagagtgatgatccaagagatccagcctttaggcttaggcctcttgtttagtactctcaatgaacattaagctcaattaatacaggatgattactgtttccctgaaacttgtaacaccctattgcttaggtacgctacaatgattttctacttactgtgcacacctttgctaataaaaggatttcttgaaaatcgtgtcaaattaaaattttttcattaataaatatatattccaacattaaagtcaggatctcatccttaaaatttacaacaaattaaaatacacttgataaacatgttgcacaacaactacaaaatgaaggccgaagtcgtcctgtgaccaaactctccaagcataaccatattgatatgtacaatcatccacaagctctagactcattggtgctcagtcttagccttttctttaccgacacatgcaaacattatctatgagtcaatagactcagtaataaaaacatataacatataacatataacataataccgacttgtatttaggcactcatatacctatttataaggcttaacaaataatcatgaaggttcttaacaaaagtacgatctatgtaccacatgcactaagtactcgtcctgtactagtgttggtagggatgaactataccccgagtaccactgagtgttgtaccatatactgttgggttttatgcc

SEQ ID NO: 37073 - DNA, 2501 bp, Cannabis sativa
gttaattattctgttgattgttgtatgagttttatgttaactttcggaaaaaaaaaaaaatgtaaaaaacaatgattattattgtgtaattattaaaattattattaagattcttattcaacggtatgatatagaaaaagctaagcaattatattaatcttaattagcataattatagatatgaccttttcccatataattaaacaaacgtacggcctaattagtaattactatattataattaattagaaatatataattttattattttttatcttcttaatttttcctatggttaatctaactcttcctcgtaaaaatattatgattaaaaatgacgtgaccccacttaaaattacatacttattattatttgaaaaaattatatacaatttatacaagtaatactagatatacagttaaattatatatactaggcgtattaaaaataattatttatatttttaagttaaatcatattacttaaaattatatagttacaattaattacacatcattatacataaaaataatgtgtaatatttagatgtgtcttcatcattttccaaagatatatatttcttgtaacaaagagatattagaggtcttttagtaattgtttgacctttctatataatgcttatataaatattgggcaccttactttttagatgcgtcattttataattagttagcgatacatattttaaaaattatcacattaaattatatgaaactcgatacgtaagaagatgctatgtaaacacaattaatatcttttaacatttctctatatataaaaaataaacattgttattgaatacaaatagtacatagcactttctataagtgtgtcttatgattaattaataatattttctaaatattattttttgaccagtatgacaccaaaaataatactagtcaaacttttaacatttgtatgaaaatatatgtatctctttctctatataatataatataatattatatgacagggattttgtacgcgtagcaaggagaatcaggatagtgccagcaaagtcaaattcaaattcaaggaagccttcaagagaagaggtcttagtaacaacagctactactactactaccacttaattaattaattaattaattaattaattattaactacatacctagctattacaaacgtaattgtaaacaacaaataataaaaactatagtacttaatttgactctgcttaattattattattattattgttattggaaatttggaagctcccatatttatttcagtattagaatatttgtactcaaactacctagctagctagatagatttctataaagaagatcatcctaatttactttaattaattttaatataactttaataagagttggaaagttgaactaagatcgttttaaggcccatccagtcgaaggtctaaaaaattatattttaataatttttaaaaatactatatttattttaaataaatatagtctaataatttttattttcttaaggcttacccaatcttagagctggccttgttctaattaataattaatagtgataattttgcaataatttgtacttcctaatagtgatgtaaatatgtgtgtttttaacacgaaaaaaatatgaatttatgcattacacgacacgaaaaaaatatacaatatgaaaagtccaaaaagcataatatgtaggcataaatagtccaacatgaaagtttaaatccttataatttaataataataatttgagtatttattaataaatcttcaaaatttaattattttttttatatgatagtctataaaatattattaacaaattatataaaaaaattgaagcaatataaaatatatatatatatagtttcctaattctctagttaattaaatcgaatatatatggaaaagaagagcacaaattcgagctcatataagaaaataatgagctgctcgagtaaagcacaacacaaatctgagcatgatacgaaaataccaaactaaagggttgtgccaagctaagtcttctctaaaaataattggcacgcatatgaacgatacgatctatattttttttatagcatgattcatattttaaaaagcacgaacaaatatatgtcgggctaacctgcacgtatttttacagcactacatttataaatggtcaatatttttcgtatttataattttctttgtattaattcatgatatgatagtttcttgcttgattgataatattattgaatattttatgtctaataaattagaaacgttttcatggtaatatattattaattaaatgactatctcttctatctatctacctatatgtaaattattaggaaatcttttgaagatttgttgtttgaattttattttgtgtgtaaagtcatggttacaccaatatttatttatgaagattaattgcataaattataatagttaaatcttaatctattcaaacttaatatgataatttacaaaaaaaaaaaaa

SEQ ID NO: 37074 - DNA, 3084 bp, Cannabis sativa
caaacacacgatctcgggggatccaccaacgccaactaccttcatcttttctcaagaacctttcttcttcctcctctccgtcaaatacctcttttaggtttttctgtcaccactgttctcacaggtatgaaaccttgtttatattttccatctatttctaaatctaaatatatgagaattgttttggtcattaatagatcttcatttgaatttgagattatgatgacaaattctggatttgttacattttgttcgtagatctaattacacaatctgaatttttgcttcttgcatgttgaaaaattgtttttaagtaatcctatttgcttgtaagaacattttattgaaactcgattcgatttcgctataatgttagtatttgcgtttgcttgcttcagatttttcaaattcttgtttatgaattcgctgtgaagttttcagatgtaatatatgtatatctgatcattaatcgtgtgtatttggtggttttttaagtcctacaattaggtttcatctgtagggcgatgaaacacgaagagattggtaattcgcgagaaatataaagattatatgagtaatttataatttaagaattcggtctcagtttctgcaataaaataattgggtctatggaatttagttgaagatactattttgtgttaatgtttttattttggaaaatattggaattcaggtttaactattaaagagctgcgagcaaggaaacattaggcaagaagcaaataaaaaagtgacaaataatgcctccacaaaagattgaaacagggcaccaggatactgtccagggtatagccatggattattatgggaagcgtctggcaacggcttcatctgatgctaccattaagattattggtgttagcaacaatgctggttctcagcaccttgctacattgagtggtcatagaggtcctgtttgggaggtagcttgggcacaccccaagtttggatctatccttgcttcttgttcctatgatggtcaagtgataatctggaaggagggtaatcaaaacgagtggcagcaggcacatgtttttaatgaccacaagtcatctgtgaatgccattgattgggcacctcacgagcttggcctttgcttggcttgtggatcatctgatgggaatatctcggttatcacagccaggactgatggtggttgggacactaccaggatagatcaagcccaccctgttggggtaacctctgtttcatgggccccatcaatggcacccggttctcttgttggttcaggtgtaacggaacctgttcagaagctagcttctggcggttgtgataatactgttaaagtgtggaagctgtataacgggacttggaagatggattgctttcctgctcttcagatgcacactgattgggtaagagatgttgcttgggcacccaacttgggacttccaaaatccacaatcgcaagtgcttcacaggatggtacagtagtcatatggaccgtggccaaggaaggagatcaatgggaggggaaagttctcaaggattttaagaccccggtttggagggtatcatggtcgctcacaggaaacttattggctgtggctgatgggaataacaatgtaacattgtggaaagaagctgtggatggtgagtggcaagaagtgaccacagttgacacataggtttcaggttattatgattttatttccttaaactaatatgctatcctttcaccatgaactagtttcttaaatttgacatgatgattttcttgtgaatttactttttttgaaagtacttccatttacatatattggagatgtcttgagatttatgatttatcatgtattgctagtaatttcacgtttatatatgatgtttgcatgatgaggttattcaaagtttttttttttttttttgcttcaatagaagttggttttttctatcgttttttcaatgaataatgctatctttttcttatgacgtcaatctctatagtttagatcctctcctattgcaaatttcgatttgggaaaaggtaatatgaatgtgatagactccaaacaccattgttgttaaacttgctgtacccaccaatattgggattccgttttttgattaagttggaaagtaaatgttaacattattcgtctcagagttgaactatttttgataattgatacaacatattttctcgaaattctatacacgagttgttgcccataaacaagacagctgttgtgttatagtattttgggacttgggtaaattcataatattaacaaagtcccgtgtacaacaaaccatgctaaccaaaaagattaaacacaattatagtgaaaattataataacttgagtcgcagtgttgtctctttttcttttccttttaactttatttgaaaagtgttgatgagtaaaaagagagaaaaaagattgtgggtaattaataaaataataacaataaaagatgtaaaatagtaaataaatgtgtataaaaatatgaatggtagcctcacaaaatgtgagatgaatatacccatgtcacttaattcttttttacgaagataaggttcacttcaaggagacacaacaagctacctttataaatatatttactcaagttattagctagggacgaacaggatgactaacatccaaatactgacaaaatcatatttggatctcaatctttaacatctccacattcctattaaattagttgcaattcatatgcatgtttctatcatgctcgatgaagacacgtctcatctcagtatcctttctggaaataatagttgacgcctgcagtggttcgtttttgagaaagagtgttctcgaagatagctcctcaacacgatcagttgacgtacatgatcatgacacttcatagtcctatctcgattaacatcctttgagttggaaagagagtgctctaaacaatatactttatttcgcaaatcgttaaggtacgaaagagcattaggagggagttcttttagttcattaatgggattcatgttgtgtgaaaagtgaggagatacactgtgatctccagaagacataccttagggttgatattcaaaaaaaaaaaaaaa

SEQ ID NO: 37075 - DNA, 9613 bp, Cannabis sativa
agatattgcaccgattctcattcctttaatcttgacacatgttctccagccgaattttgggtataacatatatatatatatatataaataactgaatgttcaaatgttatttggcgcccatctttttccttcgttgttgttaaagcagatggataacctaatgctgttttctttccctactagttagattgagaaaggcataaataagatacaattgtttcatgtgcttttttttgaatatatctcatgattttggtcgcccttccagaatcctcacctgtcgatccgtgattctaatttcaccgttggtcaaagccttcaatgcaacttagcgattaaagatccatcaattagtaatactttgtgtaaactgaggcacatacaggtatgcctatttgtatcaaagacaagattagtttaatatttacatacctcatagtatgaagtatatctcttgatttgatttgttggatactgcaatgtcatattggtactgacatatgtttactgttaattttaaatcattgtagcgtggtacttcatctgttgcattgctggagatcatggggggcaaaggtgatgtaaaagtgaatggcaaaagttatcggaaaggttctagtgttattttaactggaggtgacgaggtcgtgtttagtgcgtccctcaagcactcatatgtatcctttttatcaactttgccatattgcctaatgcctagagcaatgcagtttgttatttgcattatttagcctttcgtgatagcgtcttcatactatcttctattgttttattttatcgaaatgaagcatcctgcatgattacatttcttaccttttctataatttgcaaagtaatccttgacgtcgcttaagatttttcagcagcttgtgaatgataactttgctgcttcagttagcatattagaagcccagagtgctccagttaaaggaatacaaattggggcaaggtctgggtctggggatccctctgcagttgctggagcatcaatattagcatctttgtcaaattataggaaagatttgaccctacttccccctcctggaaaagctggtgaggagatgcagcaagatgcagaaatatcctcagtacctactggctgtgcaggatcaggggatcttgctgccgatgttgacatgaaggactgtgctaataataatgatcagaatggtttgtcaagggaaaaagatatcactccatctcctgatgctggcaatgcaaactccaaccttgatggcattggactggatgcttctatagatgctgaagtgggaaaggtttctgggacatcttatgaattaaggccacttttgaggatgcttgctggttcatcttcttcagactttgatttaggtggcagcatttctaaattatttgatgggccaagggaaattagagatcttctcaaggatattgatcgtccgctttggatatcaagtaggcgacaagctttcaaagataaattgctacaagggattttaaattctgatgatattgaagtttcatttgaaaattttccctattatctaaggtgctgttttaaatctttcttttcttttcccttttccctttttctagataaaatatctttggctttacttatgttttgtttgcattcatctgcttcaattattcgtaaaactatactaaattagtgtgtggtccctattctttcttcatcttaggtgatgattgatttgtagattatttatacttgctgtttatagtcggttatttgtgggattgatggcaagttttggattgttacagtgacacaacaaaaaatattttgattgcttcgacatatatacatttgaagtgcaacaaattcgcgaagtatgctttggacctcccttcagtgagccctcgtgtactgttatcaggaccagctggtacgtaaatttacttgcaaaacattggtttataatatgtgacctctggtgatatttcttattctgatcctgtcttgcatgtaggctcggatatatatcaagaaactttgataaaggcacttgccaaacattttggggctagactgctaattgttgaatctcttctcttgcctggtgtaagttatttagagtttgctctttattcaattaccattttttggtttttccttcattttcttttgtatgtatgttgttatcggactcggttagaaaattgtctcttataaaagaaggaaatgaactaaaatttagtaggaagctgttttaagaatctattacttgggtcggtatgattttattgaatgcatatttgtttggacatatttatttatatgttgtcctgttaaacttcaaatagggaccaatgccaaaggagcttgataatgtgaaagaaggaccgagacctgaacgattgttatttgccaaacggactgtgcagtctactggattatcacataagaaaccagcctcgagtgttgaggctgatattacaggtggatccactgtaagctcacaggttccacgaaagcaagagtcttcaacagcatcatcgagaggcaatacatttaaaaaaggcatgatttctatttatttatttattagctcataaatttaatttgttttacgtacttgtgttaacccttgcaatatatactcaggtgataaagtaaaatttgtaggtccttctggacttgcttctctgcagagttgccccctaaggtgttgttttcttactttttttttccttacagaaaagtttctgtatttgtcagtatatggcgattttttagttttatatatatatatgctaaattaataagaaagcagtagtaatgggaataggagttgaataatgtttaatggaagtttaagaaaattattgtgcataggaatggcctttcctcattttttttttgaggaatagcaattccaccaaaatggtggatttgaatggcattctaatgcttttatattttaaccaaacaaagatttggaactaaagtggatttcttctcattctttcctttttctccaacctaacttaccctaaatggtattgctgccatcacaagagaattaatttggaatgcatttcttgatccttcatctgctaattgtttgccgaacttttaatcaaccctaaaaccttctccatttaggagagtgacctcttgaattttagcttctattttttgtgcccagtggttatcgataattttagcattttgtatgttaacaattatctattagttcttattcctttttttaacaaatgtgagaccatgtattggtggattattttctgatatatgaaattgttgtatatattttttcatgcttgaagctacataatttgtccttcactttgtttctcagtggtccttcatatggttatcgaggaaaagttgtccttgtgtttgagggaaatgggtcctcgaaaattggggttagatttgacaaatcaatcccagaaggcaatgatcttggtggcctttgtgaggaggatcatggctttttctgttatggtgatttcttggcacaattattttttccttagcttacactttgatgtgggtttacttgcctgttgttagtgtgattttagtttagacttattttatatatttactttgcagccaatcatttagctcgttcggatagttctgcaggcgatgatgttgacaagcttgctatcagtgaactatttgaggtatattttgttagtttttcaaaatttctgctgtttttagttgtatttgttaagatgaaaggtgtctcatctacaggttgcatcaaatgagagtaaaaacactcccttaattttgtttgtcaaagacattgaaaaggctatggtgggcaactcagatgcctatgcaattttaaagaataagcttgaaaatttgccagagaatgttgttgtcattggctctcatacccagttggacaatcgtaaggaaaaggtatgtgttaagagtgtcactatgttagcttgtttataatagcattggaagcctattgatatatcgttgagtgtttgacatagcttgttgatctttccagtcacatcccggtggtcttttatttacgaaatttggaagtaatcagactgctttgcttgatcttgcattcccggtatgcaatccatttagcaagtttctattgtatattttgctcacattttgtcaagaatttattattaattttctcctgacttgttggtagtaatactgacagttttttgtgatgcatagcttagcttttttccagaaatgtttgacttattactaaaaatgtaaataatatcctagttggactgtgctatgctaatttgattttcctggttgatttgtagcttatggattattattgtatattttagtttattttttgaaaaaaattgacatgtgttttactgccttatgtccaggacaattttggtaggctgcatgataggagcaaagaaactcccaaaacaacaaaacaactcactcgacttttcccgaacaaagtggcaatacagctgccccaggtatggataatcatctacgtaccagtataaacataactaaccatggtgatgaattatatttttatggactcgaatggagttgttttacaaatgtggtactcgcaggatgaagaagtcctttcagactggaagcagcagttggaacgcgatgttgaaactttgaaagcacagtcaaacattgtcagcattcgatcagtgagtatattgtgtcagacgaatgaaaatattgtataattttgtttagttgcacatgcttttttaagtaaaaaagctattaaaaaatagggaatgtgtcaagactattctcatgtcaccattatgtcatttggaatggctcctttattttatcaaggagaataggtcaagttcaagtataagtatatatagcgcagcaaaatggatattagactttagtgtgcatctagtcggtacctgtactttggagcagggcgaacttgacaagtataagtatatagtgcagcaaaatggattagattttagtgtacatcaagtcagtacctgtgactttagagcagggtggattattaaggggtttttattgatcaagttataatacaggccgatgtatttattcatcacgaggttaaggtttttttcttttctgttggttgccttttctattaaaaaaatttaagatttctaatttatctaccttattaagtcgaatattatttacgttggagttgggatattattgtggagctaaaagtgtcgcactgttaccgctatacaaggatgtttacaaaacaccaatcctccaaattcttattcaatttactatgttgatgatatgttttagtatatagtagaatctatcctacaaaccctaagctgtggaatatttactcaatagcattgtgtttcttgctgctgtgttatgggtctttatgaactactggtgctttgcaggttcttgatcgggttggcttggattgccccgacattgagactctttgcatcaaagatcaagcccttacagttgaaagtttgtattcttgaatccattctggtactgctactttttatgccagttgcctttatgccagttttcatttatgttatttccccttatgctatttttaggtgtggagaaagttataggttgggctttgagttatcacttcatgcattgttccgaagcttcagtcaaagatgagaaacttgtaatatcgactgaaaggttgtcattttttttttctttgtaattatcctattttatgatatttattgattcattttgaatattgaagtttagatacatctctatattcttcatgctaacctccgtatttggtttaatactgcagtattacaaatgggttgagtattcttcagggaattcaaagcgaaagcaagtgtgttaaaaaatcactgaaggtaagcaatattattgttttgtgtgcttccaagacctctcgggggcagaatgttcttcctccatggactctttcacaatcctccgccccccatgctatttctgttttggttgttttgttattattattattatgcctttttggattgtgatctttcaaatgttttcaggatgtggtcacagagaatgaatttgagaagaaactattggccgatgttattccaccaagcgacatcggtgtgacttttgacgacatcggggcattggaaaatgtaaaggacacattgaaggaattggtgatgctgcctcttcaaaggcctgaattatttggcaaaggacagttaactaaggtaggtggcctgttcctacaatttcgttttctaaattatattttgatgtgcactcaggtgttttcttccttgaattgtggttggcaaatatttttctggtgattatcttattgcattatgtttattttatatgccttgtcatgccacagccttgtaaaggaatattgctttttggcccccctggtactggaaaaacaatgcttgcgaaggctgttgcaactgaagctggtgccaactttatcaacatatcaatgtccagtatcacctcgaaggttattaacgaatatcagaagtttttctttttcttgtgcaagcatgtacttggaagttgtatgacaagttttatttatggttgcagtggtttggtgaaggagagaaatatgtaaaggctgtgttctctttagctagtaaaattgcacctagtgtgatatttgttgatgaggtcagttaaatgcatctgtgtcactttattctctcattgctctcattttagttttctttaggattctacttgcctaatcatgtcgctgcccataaaataatggatggttattattgtaggttgatagcatgttagggagacgtgaaaacccaggagaacatgaagctatgcgcaaaatgaaaaatgagtttatggtgaattgggatggtcttcgtacaaaggataaagaacgtgtacttgtacttgccgctaccaataggccttttgaccttgacgaggccgttattaggaggcttcctaggaggtaaaaagatcctttctttttcttttcattgattttttggccaattttatttaagcattaattgataagttcatacttatttgtttgcaggttgatggtaggtttgccagatgctcccaacagagaaaagattattaaagttatattagcaaaagaagaattagcaccagatgttgatttggaagcagttgctaatatgactgatggatattctggaagtgatcttaaggtttcctattgattttacctaatattatctactatttcattttccgtttgttttgttagagaataagaattcattcatttaatcttgtatttaattgcagaatctatgcgtgacagcagctcatcgccccattcgagaaatattggaaaaagagaagaaggttagttgtacttacaattttacactgtttgcatgaactatggaagttgaattgaggagtatagcttacattggttgtctgtgtaacttgttatctcgattgtggaatttggattctgtgcatatggtgatttttgtctttgttacttaattcaggagagagcttcagctgtgtcggagagcagacctccacctgcattatattgtagctccgatgttcgatcactgaagatggatgatttcaaatgtgctcatgaacaggtaagacagtgttgtatattgctaatagtgagatgattgtttgtgaacttatctgctgcaacagcaccctcgttgggttgcgtcaggtgttctattgcattaactttttgttgatttgaatgcaaaggtgtgcgcaagtgtctcatcagagtcgacaaacatgagtgagcttctccaatggaatgacctttacggagagggcgggtcgagaaagaagaaatctctaagctatttcatgtagaggaagaagaagagttggttttttcatgtataggggtgcggcagtgttattcttggttctttgtcatggtagaagcgtggcagagttggtggtgtttggggcctattatcaatggaaatgccaattgtaggtccttttgtataatatacagggctctcttcttgtttaatattttttccgcccgaaatttatttattttctaaaagttaatgttagaaattttacagatgttaaaatcaaaagtcgtttaatctttttttttttttccaaaggagaagacttggtcctgggcctttttgcctgtacatatacccaaattaatctattaatgaataagaatattatttcttttttggtcttcgtgtattgtatttttctttaaccctacctatggtagagggaacagatagatgtaaagtaaaatttgcagtgaaaattctgagttaaagaaaaaaataaagagatttaaactaggctaattaggaggttgttttttttcttctatcataccttttggccttttttgggcatgagtgcggtgtgatttggtcggagttgtatttatttttattgatattgtgtggttggtttttctttgttctttgatggctcgttatcaagttactattagtggttgagaataataagttctctatgactgaaaaggttgttagaagtgtagttacttatcttgcataataattgagtgactgaaaaggttgttagaagtgtagttacttatcttgcataataattgagtgttcaagctatgaggttgaatgaacttgttgtaacaaattttactgttgtgtcttctgagatgtaagtgaaactgaaaaaatgtgttcttaaggttaattgtgatgctgcaatcttttttatattattttatttttagtgtttttatcaaacaatttgaaaattagacgaccgattatttgacttgtttttctaattctttaccaagtccatgtagctgagacattcaataaaaaagttaaattttgatattttatatttttacgttggagacctagtgcttacggtaaaaagactagtttaactatgagaataaaaggcaaatttgagacacaataggaaggacttatgttgtcattatggtcttcttaagagaggcatataaactcttagattcagaaggccgatgcatttacctacgtgtcaacgagaagttcatcaaaaagttttccacttaaacaaaagggtcttttacctatggtgtaaactgcgcacttaaaagaaagaaagtgtgcaatgagctacgcaaggcttgatctcgttcctggtacgtaaccaatttagtttataactaagcccagtcacacaaaataaaaaaaaaattatctcctctcaaaaaaaaaaaaaaaacgcaatgaactacgtaaggcttgatctcattcttggtacgtaggcaatctagtttataactaggtccaagcacacacaaaaaaaattatctcctaaaaaaattgtaaagaactacgaacgacttgatcccttaaaagggtacgttgagaatctgaacaaaattggatgcaaccacaaaaataaaatatatattcctcctacaaggaaatcaaaattctaaaatgtctaaatgataaaatactatttgttctcaaagccaataaacaaaaaaattaacagaactaaaaactaaaaggaaattttttagaggcaaaataatgggatcttcagtcaatcttaaaa

SEQ ID NO: 37076 - DNA, 1091 bp, Cannabis sativa
gcagtcgcatggtccaagtattttggcaaaattaagggcaacaatacccattctttaggcctaaacaaattagtgggtgagtccacgagcggagccgaaccactgctctaagttcaactataactctatctcgacaaagccagactttttggtcccgaaaggatgaccctggtttagagaagtgaagactcaaagaaacacgatgggatatcctaaggagtaatcccggaagagtagtcgaagaggtgtttgggagtagtcctacatggcaccccctttgacaccaaatctcatggaatcaggggtttgtcccctatgtaagacctgggaattgcgcataaaaaaactacttttggcgaacatccactactctaacatttattgtacctgatcggcaatgcatggctacttgtcaacaaaaatttgtatggactgtacggacaacaaaaaaacactttaatatcaccctattagtgggcttatttcacatgaaaaccctagcgagtccaggttcactcgagaacctgacttcagtctataagttgggctttaactcttcatgcaaagggttacaaaattttagccacacactctggttagaaatttgacaagaaaaattgtgtaagatactccatatccatagagttcaatattaactcgtggactaaggctcattaacgtcccaacgatgtaaaaaatctttgtctcttttatctttaattgttttttttagtttaatctatttcttaattagtttttaaaaatctcggtaaatattttgttgctttcaataaaagcttgaaggaattttttactattgttgtcttctacaaccatggtttcaactagatacttgactggaaagacatctgctcaaaatgataatggaaaagatgttgttgatattctaaactggcctcccccagcaaacattcatgtgggtgtcatgggagacggtgtaagacataaaaaagtggccagctacccaccttggaaaagctagcaataagaagaatatgttgatgaaatttccatcaatgaagataactaagaaggccaagacgaggattaaagagacgactatggcaaaa

SEQ ID NO: 37077 - DNA, 3639 bp, Cannabis sativa
tgcaaaacccattaatttggaacaaggtcagtccataaaagacttgaaaaaaaaaactattaacctcatcaatttttccagataattatgccttgacatgttgctgaaccacatgaagggcttcatggtcttcaccataatcctgcaaataatgatgaaacaacaatataagaaatggaaaaaaattgaagcaaaattgtacaaaacttgttatggcttgaatgtggaaacataccttgacaacaacacaagagcatccaactaccttcctagcttttccctcagaatcaatcttgcacaactgtaatagagaagaccccgaaaatcaaatcaatgcaagtatagaaagtttggtaagaaaatcaaaccaattggggtttagaacaaaactaaattgataagctaacataacatgaactcaatttgaatcaaatttgacaaaacacaatgaggggggttatttggaagagcacttacaccaacccactctccaagagtcttggcacttggaacagtcatcatgtttacattatgatcagcacaaaggcctttgacaagtttaacataatcaggttgatcacagtcctctgccaacacaacaagctgggcagcatgcttttcaatgaccttagcgccttcatgaaggccacgagcaatcccgctgtgagccaaagacttcctcaacactagctgcaacgcagtcattatgtccatgggctctcccaaagctggggctggggctgccacctcaactgccactgctggagcttcatcactgcatcgagcaaactaacttttattagcaaaataaccatgcttggtctcacagtgtaaattcatggtggttattttgctaatttatcattttaatgttattagtttagcaaatttctcaaaaccaacatgaacagattcactcaataacaataaacatctacctatctacacacaaaagtttcccacattcataatctctattactcatctaagaaatacacatacagtgtttgtcgttcttaactataattaaccctaaaaatctaaacttttttttgtttggggaaatacccagagactgattgagataataatagataaatcaaccatcttttaaagattaaattcaatgacaagtacataccctgacattttctctggctgatgtggttgagactgattctacttactgaactgcataaacacaaggaacccattataagatacacaaaaccgaagatggatcgtatgtagaagataatgagagagaaggaggattaccttgattgagatcttggatggagatagcgttcagcggaaataaaacgcagccgctatgagtttgagatttatatgaaaaaccctagggttcgcgtgcctcacttgaaacttattaaaaaagccccaattttttttaattaaatatataatagagttaatacgaggttgggagtgtgttttacaaaaaaattactcatgtgattttttataaaatggtataaaatagtattataaacttaatttttgataattattttttaatataactaatttgaggataattttttagcatgaatagatgtaataaatgtaattaatataatcgtaatacttctagattaaagttttattttgacaaaatataagtgaactattttagatagggcttaacatttgtacctgaaagcctacccacctggcaaacccaggccttatgaactcgatcaaacaaagaaaaaaaaatcgggttttaaaaaatagtgggcgggtttgggtgtaacccggttgcaaactaggctgggttcaggtttgagaaattctatgattttaaaactcaaattatacccaaaacccggtacccctttatttaattatttttttaggtctggcgaaaccttaccactacaggtattcttttttcctttttttttttaaaaaaaaaaatttgttcttcccttcctccagcatgcgtagaaacagactggcgcatcctccttttggtatcgctccagccctgtggtcaagctcaaatctctctctctctctctgtaatttctttctttatttttctcttttagtcttctttgatttgggttggttgggaatagaatgggggttaggatattttgaaactacactcataaaaaaaatggtatttaggtaaatcagattctcactcgatacctgcccaaaactcgatctcaccaactcggtcaaactcgagcccgaactcagtcaaaatttatctacaaatgggcaagttcggtattgaaattcccacaacggaaacccaaacctgataatctgttcgaatgtgcacctttaattttaaaaaatatagggtccaacttatcatttaacaaaacagaaagttcaattaataactttcacaaaatacatgttgataccatgaataccatcaaaagaaataatctgaattaaaacatacaaatctaaatcacaatattatagagaattttacattccattggtttaacatttttatttatttagcaacatatattccaaacaaattcaatacacaataacaatgggatttttttttttttttgcttaacaataacaatgggatttttgcttccacaacagctttgatttctttctatgatgcagatgaaggtcttcttctttggtcaacgtttttataagtgtatatttaggagttttcttatgtacgtctaatttatggataatgggttaccatcaaattttaaaatgtgtatatttgtaaagactccaatatataattttgacacttctttttcactattttctagaaaccatcctttttttttttttttttgaaatcctaaaaactatctttaactatgcttttattgtaatttatctcataacccaattccacacttaattttgacacttctttttatatatgtacattttctctaaaactaacaatagtattttgctatttaaaaagtgtttctacatattactatttgttttaagtaacaaaaaacagcacataattttctctaaaaactcataacttattattttactattgaaaaaaatgtgtttctaaaattaaagatattttttgcatgggataaaaccaaaagcaaccgtataaataaaaatcctaagttacaaacgacatgtcgtataagagaaagaaagaaagaaagggtaatttattgtcatagaaaaattatactatctgtaacatttcgctgaaaacagaacacaaacaaaaatatcaaggagcttgaattacagtttttatactattttacttttacatgataattcaactgttgaagaagcaaaatacgagataaaatgaaaaaattagcttcattttcttcagaattttccctctttttccaccaatcaataaaacttggacagaatataaagattacaaagaaattatccaagcaaaatcataaacctatgcagttgtcaattacacaagccatagaagtagcatattaggaaacaaaatgatacaaatgaatccatggaagacatgaaaaatgaaagtaataacttcaatctcttgttaggaaagacttaaaataacatattttcccactatttttccatcaataaacagaccttccacaaaagataaaaactacacacaaattatcaaag

SEQ ID NO: 37078 - DNA, 4472 bp, Cannabis sativa
  modified_base (4365)..(4374): a, c, t, g, unknown or other
attaaaacccaataaatgtttattgaattattttattataattaggaaattcataataataattatattaaaaaaactgcttgattatacaaacgtttcatatatatttacttacagtaatattattaatactattctgattcattgatataaatctatcgaggtagtttgtagcatgaaaaacagttccaaacgagagattaaaccgacttcggcactgcaaagaaaagcaaatcaacaataaaatcaataatattaaaggagaaatgctaaaattaatgaatggaattcaactcgatcatattatatataggacattatataatattatatactaaccttgataaaccactgaatggttctaaacctagcaacgatcaagttgttgtagtaaagatattgtaagtagttaggtttaggaaggtaagtattctccttttctaggcatatgttaaaagccaactcaatgtcttccttactcatatgacgaaactgatcattatcaccattattattaacatcatcctcatcatcatgactactaatttcatcaaaactagtacaactacgttttcttgtaataatattttctgtcatttgtacagaaatattgtcatcctcatcatcattcctagaagcagtagggctcgagggccaaacctcatcgcaaaacaaattgatgtgatccatattataatatatatttgtatttgtcagtgtacgtacgtaacaatcattttctggtctttggtatttgacttttgtataagaaagccagaaaagaatggaaatcaatcaaagtgaaggtgaaagggcatattaatatatgaatgaataagggagttagggagttgatatttatatagagagaaagagttggtatgaaagtgaaagtgggggatataataagaaggagacgtccctcatgaaatggttaaatgcataaagcatatatatgtgtagttttgactgcagtaaccaattacgtgagcatacacacgagtttaggtctgttgataatcttgtcttaatttcaatggctttgtggtccggatttgggcaatgaatcttatatattatttattctttttatgtcataatataattaagatgggtcccagttgagaagaaaggtcactttcccaattgagtaggtgggggcgccttattgtgttattcctcaacccctccattcccatgcatgatctctggtcatgagcctctgatgagtttgtttcaatgttctttttgcctttataatattaattaactaattaaccaaactacctttgtttgatgactagttaattacaaagagtttttgtcattctcaactcagaaacaacactgttactaattaatcgattatttgtcatcatataaatgaaaagttcttgactttgaggatattatttattacatactcatacaacataaagtagacagctgtttgttactgctcaatcgtatgagtccacttgttggtattaaataatcgcacttcatgatttaatggaacagatatgcactacttatattcctattacagaggagatgagtcactagtctgatctttaagctagctgggttgaacacaagggcaaataacccatattacggttttactcgaaaatgagcagcatcacgtgtcagtgtcatgtgactccgtttaattactcaataatatacgaccaagattatttagggccagtttaattataaattagtttaaaagtaattatgagatttagaatgtttgttcatgtaattacacaataattatataatttgaaggaattgaaagagtaaatactctctaattttcatgaccagtgtaattaaaatattacaatttatatataattaattttagacaataaaattatagttattatactaattaataaatatattttaagtttttattttataacttctgcttactatattgttataccgcaaatatttttttttattattaattttgtaaaaaatatatttaaattttgtattaattttaaactagtaatcaataataattagtttggtaagatttaacaattttattaataattttaaattttatatttttgttgtcataaatttattataggaaattacaaaaaattgatctctaaagtaaaaaaagtgcatgcttaattcatttcccgattttgactatttaaaaaattgaaaataaatttataaaaaattaaaataataacaaaaacatttagatagacaaataaattaataaaaatagtgatattatattttaaaaattcaaaaaatgaagaaaaaacaacaaaatttaaaaaattaaaaaaaaaattaatgaatgttcaaatattactatgtcatatgataacctataagcttataccttcatacttatacatatattcattcaattatttttcttttttatctgattactttttatgtaatatcccccaaaatataatgatatttaattgggcatattttattaaatatgtgattaagtgggtattagagtaggattataatcctacttaagctagttacgagttaattagtgaaatgtgattaaaggaacaaataaagcataatttattaattacagagattttatcggactacaggagtattgtggatataccatttcaaaaataaaatatcttcgggtttgacggtcgtggaaacttgacggagtggtcaaagatgtcatgacgatataagatagattatttggaattatgccggattagtctagaatttgaagttgtcgatttggcagattagttagaattactaaattgccctaggtttttaatagtgtaagttttgttaaggagggtaaaatggtcattttgggtgatagttgttggtgttgttttatttgtgttttagtggctgaaatagctaggttaatattaaaataaagttttaaaaaatggataagataataaagaaaatttgaagtcaccattccctttctttcttccttcctacccgaccccttagaggagttgcaaccatggtttttctttaattaattctacaattttggattgaattagcaagagatagaagttggttaagcattgaggtaagttcttgatgtttttccccttgaatttcttgagtttcttcagttttaggtcagtttaggttaggttttactaggatttcatggctgtatgtttagtctaggtttagagattattttggtattaattttatgagtgtttaggtttcaattagttgaattttatggctgtttcattttgaagttagagttgttgatttaagagtgtaattttggtttaagcatgatgaaatggattggtgattaaattactatgtttggtgcttgaaatatgttgtatttgggatattgttttgaactggagcagttgggcaggtgtggttgagttttgctttgagtttggggaagaaaaccgaagaattttggtctgccagaaccggtcgaccgattgtcctataggggaaattcttgggttttcctcaaggtcagtttttggctcaggatgatacctaatatctaatttaagttgcttaggtgctaaatggcctatttcggagctaatggaagttaggtttttttcggttacgggaattagggttagttcccagagtttcaatttgaggtatttattgaattttgctgttgtgacataggacctcggatcctcaagctttgttttcactcaggtcagcctgcacgcctgatttctgaactgaggtaaaaaaagctttatgcaccgctaagtgtatttgtaagaaacatttatcatcgtttgtgacttgattatgaacgatgtaatattgtgaaacgattattattgtttgtgactcgatcatgagcaaggtaacgattattatcatttgtgactcgattatgatcgagaaaaagacacgatcattaccccgttaatgaatgaataaagatactgtcattaccgttataagtaattactcgttgaaactgtagataggtttcttacttattattggctttatcaggcaacgatagtgacatacatagctcgtgaataatgagtggtaagagtgctttatgaggcactaagattatgtgatcatggtaatatgtgattagagtgctttatgaggcattaagattatatgattatatattgagtgaatacccatttattgtaatgaagaagtggttaattatgagttgctatgattttcttataatgcgtaatatatgtgtttgtatagacgttagattatatatgcatgttgaatatgtaatgaagcacgtgtatgtatattatgctgtgatgtgaatacttgtattttcgatgctcgatctagtagcttttcttgctgagnnnnnnnnnntcacgggtgcttcgtggtgcaggtaaggaagataggagctgtgttcagccatgagtcagaggtctcccagcaacgtacatattagtcgtggtgtcttg

SEQ ID NO: 37079 - DNA, 2636 bp, Cannabis sativa
aaaatgtatgtatgttttgtttgatgcgaacataaagcacaattcttgtgtcattccttctaaagagcctatcaaacgatttattttgtgactgatggtttttcaataatattcatagcttaaaattcttgtatgtatgaatagtgcaatacaaattgcaaagacacaacaacattcattgtttttttttctgaaattaactacattcattgttaatgctcgatgtattaggctttacggaggttttaaatatggcattttaatactggatacgtacactatttttaaatgttcaggtcagttactgtttaaatagtcctttgaaggaaagaatttgggattctattgagtgcaaaataagaaccagggggtattgattccactacagtagttaactgttttatctatattgagacgaggtttttgaccccacaaactctgtacttttatcaagcaaaaccttgaaaatggataacatgatacgctcatgattactcaaaagagttgcaatgaataaacataacatctgcaataccattaataaaataaataattaaaaaaaaaacaaaaacttgatacaaacaaaaatacaacatgaacaaataggatatcctttccaaactggtataggggataaagaattaaacaaattccctgaccaaacttaaaaaaaccttaattttgaaagcatacaagaaaactttcaaaatctgctctgcataacttttgtatcaaaatatgaaacacaagaaaccatacacaaaaactgaagcggcaaaacccaaaaccatgatgccaagctaatatcttttcccaagaatgacgccaatgatcacagacaccagagcaacagtcaatgtgatttttaaggtcatcaaaggagaatgctcagcactttgtgtgcggacctccgatgaggacgacggtgcagatgttgcttctgacttcttcttgctctttcgttttgaaggagcggatacgtttaatcctatgtccctggatttaatttccaaaccatctttaacctcggattgattacttccatcaccctgcagcataatctatttggtaaatatatgtttctttatttctgagaattgtaattattgtggagttctacagtgattataggattgttatcgagaagccatgaatatcttcactgcccttaaattgcaggtagggataaatgtcatgttattttaaggaaaataattgaatataaaagaatttttcatcaaagatgaatcttgttttgttatgtgactagtggaatgtaactccaaaccaaagtttctcttttctaaccatatgagctacagcttaattatatttgtagaaattgtaaaatagatacctcttgaagccaaatgttgctattgaaaaggaatttaatgcttgtagataaaaagtataccttttctgttattttggcatcagcaagctgcaacttgtgctcaagatccttgacatgatcctctagaagtgttatttgtttgttctttgcttcaatctcatcctgagaaagcttcactgctgcttcttgttccatatcctttttagcatcagcatctcgcttttgagtctaaatttgaacaagaaacatatcacgttgaaggatttcattttaaaagaataataaagtatgactttcttttttcctaatataagaccatatatcgaaacagatgaatgaagcatattactcacaaattctctctttcctcttaatttttacacttatttgttatcaaagatcagcaattttattttctctggaatctactaactagtattcctcttttatgaaaaacaaaagtgaaaagaatagaaaaccacaaccaaagtagcactaaccaattcagcaatggtggcctgagcgagttgcaaatctttttgaagttgtactacttggtcatctaataagtttatatcacgggctttatttgcatgatcctctaactttgatgtaaattctgcttctcttgcagcagaaactgactggtttctttcaacctaaaatattatacaagtcagaatttgtatttcatgtttattctattgattttcagaggcaaaaacaacagaagattggtatttattcagggaatagtttacctcttcttttagctgagtttcggctttcagcaaatgttcctcaagttcctttaaacgagattgtagagaagatttttcagcaatctcagccttaagctgttcattctcagcttttaaagcgtcaataatttccttggtttcttttaaattcccttcaagctggagaatggtagactgatgttcttttctagcattttgatatgtttcgtttagcatgttgttctcgtccataactgaagatatctgtgatacaaacataaaatttaatacataatggacaagaaaatcaatttgaaagtgtaatctcaaaaaggttttgaacttggaaatttggtttatatgtaataaaaatcactaataagcaaagaatattttttgctaaacctgagactgtagtttctccccatcagaagtaagttgttgttttaaatcttctacattctttattgaactgcgaagctgttcatctgtttcgtgtttctcagcaagagtagtgtcaagtttagtctgtaaatcac

SEQ ID NO: 37080 - DNA, 2951 bp, Cannabis sativa
tagttcagggggaatttttaacagccaaaaaagttcagggacatgatttaatacatgtcaaagttcgggagaaaaattactaattatctattgtaagaaaaacaaaaaaatgtatataaattaaattatattaaaacaacttaaatatttatctggtggcaagtgacaacgtaaaagttttgcccaagacaagacattaaagaaaaattcttttaaaattccatattatcaaaatctaactatcttatatccttttcacttttcacttttcactttacacatttcatcatttatttaattattattatatattagacgtacgtaaataccaaattttgagatcagatctcactttacgaataaaccgggtctctctttttctatttgtattgctaaaacaactttcgcgtcatcactcccaatttttttaatgagggtattgtagtaaatccaaccattagttttcatttaggtgacgtgcatattaatcatataatgctatatgcaatttttttaaaaaaaagtgtaatatactaattaatatatggagtgttttttatggtatataattaatggtgtagatactaattgatagttgagagataccagggccgcggtttcgtggaagagataataattaagtgtgatgagtatagaaagggccatatggatccagaagatcagtgcatgtgagtggtctcttctgtttgttttgacagataataacaaaaatgaagtaaagcagttgcagcccaattatattgttgggctccccactgtttctgtagtactactctccatttatttacgcattagtgggattatgaggtacttgtacgagtattttttttaagatatatatcacacgctaaataatttatatatataataacatccaaatatgtcaacttcgtgatctatgtaaccatccaaatctaataaactaaatatatatatatatttatagctcatttttgtgctgtgtgtggcaccatgccagtaaaatactaaaatgatacgcggctttctcattttcaagctgttcatttcttgatcattcccacctatgtgactctggtgaacttaggattgttaattacgtgtgaagcaaagactttttcgttgttgttgttcgtatagagacacaacgaataaaccaaatcagctcttattaaatacatgttggtggttaaagtcatgttgaaataatactttataattaattagcgatattttatattatttattaaattaaattaaaatttataaaatttaatattaaaatacatcaataacaataagacacatttttatagtatttcacacttttttttttttgaaagagatagtatttcacaccttaagttacaatattacaactagctaggcatttgtaattgaggggatatgatttaatctttccttttgtttttaattatttttctttgttcaaatccatattgattattactattatatatttgtgatttgtgagcaaccattttttgacgcaattgttttggtatttatttgatttttcattaaatgaaaaaaatcgatgcaatctcaatctcaattgggtaatgggtatagattggaaattgcctcactattggcaaaacaggcagctaaccatgtgatgtgaaacaacatcacaatgtctagccggtgattgctccattgataattgatatatttctcattttgacttttattttctctctcttttctttttctttaataaaaatataaatagggtgggggaagggtttaaataattatatatttttcttttgcaattaacattaatgaagcacaaatggagtatttagctcatgcagccaagtcaactacatatatgtatatcttaattagtacggatatttgatgattaacaataatatttaaatttaggaaatttaaaaaaaaataaaaaaattattgaatattacaaaaatactaatttattttataaacagcatttaaaaattggtaaatatctttaacattggtaaataacatttataaaaaaattagtacaatatatttgtaatgagttgtttttaccagtttattttttttctaagaaattatgagaatcttaaatttagagttagatggaaatgaatgtgttatttgtgttattcaaaatattttgacaaatagagtaataaaatatttcgttaatcaaaatttaaccataactagaatatttataattaagggcatatttttaaatcaaatcaaatcaaatatttgacttaccctatataaaatattctaatattttctaaattcagaattttatttcactttcttttctaagcaaacgttctaggatggcaggggacaactatcttgttttgctgttgtgattaggctttctttttttctcaacacggtcccaactagtaacatttcacaacaacgtacataactggaccattttatcataaactttccaaagcatgattttagttcatgtagaaaaatcaagatgagaaagatattatctacataccgaatataagtactcaacccttgttctcccaaaaaaagaaagtatttaaccctttcaaatataaatatatttatatttatatatataattactttatttaccgaatctaggtacttaatcctttcaaaaataacaaaatatttataaaattacagttctacagctttttcaaattttacaattttttttaataaaaatatggatttgttttttcaacaatgttacactatgttgctttcgaattcgaacagttttcatgttcatttatatgtgtattaataatgttgttttgaataaatatggcaaggaaatcctgatggaccagacagagcacctaaagataccatctatagcccagtccacatagcactacactaaagcccacccataccccacattcaactttggaaaatttacaatcacaaacact

SEQ ID NO: 37081 - DNA, 7481 bp, Cannabis sativa
  modified_base (7422)..(7424): a, c, t, g, unknown or other
aagtttcatcacatgagaatcctactgcaaatactggccccacacatcacatgatcaccaaggctaaagctggcattttcaagctcaaagccaaggattgtgattgaagcacttcagtacaaagggtggaataaagctatgaatgatgaaagcataggtctcaagaataacaaaacgtagattttacttcccaggtcagaggccaacaacctgattggatgtaagtgggttcatagaattaaaaagaaatgcagatgggtcttttcaaaggtacaaatcaagacttgtggctaagggtttctatcagagagctgcgttggactatggagaaacctttagtcctgttgtcaaagtttctacagtcataattattctgagtattgtttcaaaaaaactaagatattagacaactcgacataaacaatgcttttcttaatggaaaccttgaaagagttgtatatatgtgccaactagaaggctttgaagatcctacaaagcctaatcatgtatgcaagtttcacaagttcttttattgactcaaataggctccaagagtctagtttgacaagttaagaggcaccctgctgacctggaattccagaaactcaaaagctaacacttccttattttttttatatcagtaatggcattattatccttgttttgatctatgatgatgacattaatctcattgggaacaataatgccaatctgaacaagtttattgagaagcttgagaagctcttcactctgaaagatcttggagcattgcatttctttcttggcattgaagttgctagaaaagaagcatgtctttaccttactcagacaaaatatattgaggatctgctggaaaataaaaatatgcagcatttgaaacccttccctacacttatagctacagacaagtctttatctctcacagatggcaaactgataaagaatccaactaactacaaaagcctcattggagcattgcaatacctgaatcacaccagacctgacatcagttacgctataaacactctaagtcagttttttaaatctcccacaacatcacactagaatacagtcaaaagaatcttgagatacctccaaggaaccagtacacaaggcctacatctcagctgctatgacaaacttaatcttgttggtttttctgatgcaaactgggctagcaatgttgatgacagaagatctgtttgttcatactgtgtctatcatggagagtccttagtgtcctggtcttctaagaagcaggcagttgtgtcaagatctagcataaagactgaatacagagctcttgctcgtgtcagtgctgaaataacttggcttgagtcattactcaatgaaatcaaatttcatcttcctgctcttcccataacttggtgtgataatatgagtgcaagtgcccttagccttaaatctagattatcatggtcgcaccaaacacatagagattgacaaacactttgtgagagataaagtgttgaacaaggcattagaagtcaaatttattccgtcagcagatcaaatagcagattgcatgactaaaacactttcacactcaaggttccactacttgattgccaaactcggagtgaagaattcaccccctggtttgaggagtggtgttaagaaaaatgattagctgctacttaatgttaatctcctattttagtgtttgttaatgcctgttttattattttaaaaggttgtaagaattctattatgtttgttccctttggctccaacattagggccacttatcacattgtaatttgtctttgtattccctttgcagactataaatagaaaatgtttagcctcagccttctttagctgagaattgtcaaaatcattttgtgtatacttttactattagcaaaagacgtgccaaatatggctaaacggaatcattgattattgatataacaacattaaacatgcaatgtcctcggagtatagatttctactctccaagagtacgtatgtaagaaatctcttctagaaaacaaaattaagtaatacaattataaaataaaaagaatacaacatcagaagatgttaagtataacaacctttaacaagaggaaataaacatcatgaggaccataacttctctagatcgatacaaataaacttatatatattactgaatgtgtaaaagatgtgaattacggggcgagtgtaaacgagggatgggtgagcgagtggaaaaagaatgatggccaactctagagttgaagtccgtgaaattattattaacctcagattgaaactttgtcggagaatctgacttgaaaggcatacgaccagcttcgtaattcatcatctttggactgccaatgtaagcatctcgagcgacatttacagctttatgattcttgcatcctaaaagagtactagtgctagaacgtcgtctatgcataatctccgcgtccaagattcttgctttggcagacaagacctttctcgatgtcgtatgaggtctgactgttgtcgtttcttcacaatctgacatagcagagtagtctgctgcactggccgttacaacgctccactgaatgctagcctcgctgggcgcataaccatgtgttggggtcatgcagctggaggcagtatcgtccgacaacctccgagctcgaaaagggttagtcttacccgtcatactgtctatctcgaaaaggtctgagctggcatcgctaccagaatcgtggtgtgttattccaccagtgggaaagacaatttcctccggttgaggcatagtgtggtcccaagacatcatcgtcggcctccgatcaaagctcatagtcttgttgcctttctccaagactgttagggaagaagaagatccaaaaacctcaggcgacttacagagattaatctcagctctgcccagaaatggactcttgatcattggaggagcattcgtaagtaatccagatggagattttgtacttcgaaagctagaagaaccttcttggcaaggaaaatcacaagatcttgctttttcaattttggcaggtgttctgttcatttgattaattgcgtcagcaaggtccatacttggtctaatagatgaaaccaagttgggttttcgaatggcattttcataactgggatgattattgttattattaaagcttatttcaccagcatctttagtatcaacagagtctttatcagagcaagaacaccctaaactagcaagaaacttcattctattcatcttactagatttactccttgaagagtttaactttttttcactattttgtagtaacatgcttcgactattccagctcgattcggaacgaacgctaggagttgagggatgaatttttgattgaatttgctcaatatcaggcactcgctgatgaatttgacgatggtcaccattattcttatgatggtggttaatatcatagcttcttacagagctaatacttgaaattctagaactggcgtcttcgttgattactccattgaagtatttttcagctccaaaaactccaatttcctcgtcatcttctttccttcttcccaatttctcgtggttggttattaagtatggaggaaatgaggcttcgatgttgcgagtagatgttaatgtcaccatgtcttcttttgtttttaattctatcaggttggatggaaataaaagaaaataaataaggacgaaaagaaccagaaggaaacaaacaaaaaaaaaagaaagaataaatgatgggaagaataatgcttaattatttagagtcagggtaagcatacgtattactagacactagaaaaatacaaagagatgaatacgaaaaggacgcaacagaaaaaaagtaatatattaggatagagtttgagagagaagaggtgcttaacggttgaagtccctcaaactaagagtataaatgtataatgagcttgaaagaaattagacatgaatgggtttgatggttctgtaatttgcaggagctcagctaataattagaagaataagaagataaagatgatgaatgagaggcttaggcttgaaagaacttgcttggcgtgtcttcagatctagttctttaagtagacttgagcaataaatatcaataaatatgatgttaataaggtaggaccttattcttgtggtctacatgtacaagttgttgatatttttttttggtacgttcttgatttttttctttgtaataaacttttcttttatttgattcagatatgattatattttaaaattagatcattaaaccatcataaggaaaattgtgcatgcaaatgagagtggacaacattcaatttaatttaattataataaaatgaaaatctaattattacaattagattgaatgtgaaaagttagatcgattataattaaattagataggttatgattcaatgaatttgattcttatcaatacatggccaaagataaaaaataaaaaaccactaattaatcgacgaccaagtgtatgatatataggaagaagatttttactaattcatggccaaaagattgataaggataaattaaaaagaaaaagaaagaaacaaaaaccatatattttgacccatgtatataggtattaagagtttagcataagagtcgagacctgtatttcttggtcattaatattctaaaattaattggttatatatttaaactaccttagatatattacttcttggaagtaagctcaaatacaatcttttttcccttttggcttatgagtacaaggttggttctttaatattgttatctttgttcttttttctttgtacgtgtatgttcttggtatggtttgtatattaatcatcccggaccctctgtctaggatttctgtccacccaattaaaataggaatttttatagaagataactaaaaattattttttttttcttttttattgtgataaacttttgttttctgtttttacatagtattttttttttcttttacatttatacagttgttaggtatttaggggacatacactgatggacgcggacctcacttcttagctcttactggtggaagaagaacggagcaaatgacgcatttagattttttatttttgggataaaattattgtgagattagtatttttaaataaaaaagagagaaagaaataagaaaaatgtaacaagtagtagtggtagaagtgatatgtatttattgcttttaaaaataaatgatatgtattaataaaaattgaaagataatttctgtttatacattacaaaaaattttactagtcacaactatttatgactaaaagtaaacaagttatgactaattataaattatcatttctacgttgttgctaaaaagtctgtgacgaaaagtatttgatatttcgtattttaatattctcagttttattatttaattaaatctataattaaatgcagaataataaaactggtactgaaaactgtttttccgtggttagaaaaaataactctgtaactccagaagaaaccagaaaaacaaacagtgcagaaaagtaaaaagacacaagatttttgtacgtggtttcaacaatccttttagattattactagtccacggggtcacgcctagagttaagattcaatagatcggtctcaataatacaaagtaattgacttatgcataaatatactccctcttattatatgctggaagcttgatgtattccacctactaactgaatcttgaaaaaaaactccaagtgatcgaaatcccttcgatcaccttaaagagtgcttgcttcctcccgatgcaagacttgaaaagcaatctcgaaagctttgtaaaaccttctcccgatggttgagtgcttgcttcctcccgatgcaagacttgaaaagaaatctctcgaaagctttgtaaaaccttctcccgaaggttgagtgcttgcttcctccatatgcaagacttgaaaagcaatctcccgaaagttttgtaaaaccttcccccgaaggttaagtgcttgcttcctctcgatgcaagacttgaaaaggaatctcccgaaagctttgtaaaaccttctcccgaaggttgcactaatgttcttcttctttgtagacttgaatatagactcaagacaatacaaaatacaaatacacagagtatgagtcgaacaactcttctctttaaaacaaagacactctttccttaagatatgaatacaattttaagtgtatgaaagagatactaaacgtagctgctataaggtgtatttataatcaatatacaccttattgacagcttacatacggtctgaacaagaccccagtccactagaaacttttataaaataaattttcaattagcccaggaatttccatttctgtacctacagaatcgtgagcagtaagtacaactttccttttatagaaaaggaaagtttagctccggttttctcttcaagaaatctgatctaagaaaattggagactcacacaagattagaatataccagctggttagataagaattaattgtgtaatcagaattaccacttttaccacaattttcataaataggaaagctatacaactttctttccaagtttggatacacaaaataaggaaactaaattaaacacaccagccaaaatatacaataaataataaaatatttttgtcaattaaatatgtcaaaaatagaattaacaatctctccctttggcactttgattgacaaaatattttattatgagaaaacctgcttcaagtgttagaaaccaaagtgaatagctttctaaagataaaagagtatagaaaatactccccctgcatgaaagcacactaacacataaaacaaaaaaattttttggggtgaaaagcttacaaaccgaaaataaaccaactccccctaaaacaagggtccatagttgtaacacaaaatctaaaaaataaagactactccccttttttgttatcaaggagccaaagataacaaaaaaacatgaacaaagtcataatagttcaagaacacataaattaaagaaaagagataaaaaatggaccacttattcatcatcattggatcggaagaatttcatatactgtccatcctcctgagaattaaagcttgagttgtctccattcttcccaaacgcaagttgaattcagccatttctataggagtagaagtggaagcagatgcaggagcaggttcatcactaacaccaggggaagcagaccgagcttttttcttagcagtttttccttgaggaggcttctctggaactttgaaagtggttccaacagctagttagataagaattaattgtgtaatcaaaattaccatttttatcacaatttccataaataagaaagttatacaactttctttccaagtttggatacacaaaataaggaaaccaaattaaagacaccagctgaaatatacaataaataataaaatatttnnntcaattaaatatgccaaaaatgaaattaacaatctccccctttggcactttgattga

SEQ ID NO: 37082 - DNA, 5806 bp, Cannabis sativa
ttttttttttttaaggattattatttgaatcacttaaatttattttatggattaatgtgattgttcaactttttcttcttctctttatttaatttcatacaaagttttttaattttataattatttattgacctaattataaataataacgggtggaaagatataacttattaagaaccaatcaactaattcaagtttttttttcttttaccattttcagttttggattctctttgtcaagcatatgaaggtgtgttggatttgcaaaattaagaatattgatgcatataatttagtagactacgttctttgttttggttttctgtgtctaaatagggtaactttgttgtctgagactatgttctttactcttcttataaaaattttgtttagaaaaaaaaaaagatggaactaatttgagtgataagttttgtattcaactcgtaattattttttgttaaaaacaaaaaagaaaaaaaaaacactcataattattttttagtaatgcaactgttaaattttttgttcataacaaactaatggttttacaaataatgtttttacattttttatagttgttcatatattaattaattcaatttattacttgtatattttaataacgaatattatatattatttggccttatttaggtgaccgtgaaaatttgccttgtaacaaacaaccttactagtgagattgaacaaagaactaaccatgaagctagctagtcaaatgcattaaatcctgcttgcatttcgagtctaaaaaaaatagttcctttgatagagaagagatcttgtcaataattaattaatttttcaatatagaaatattattaatttaatttgattctaatctttcgcaaaatattggccttgttttggtaaaacctcaattatttggtaattaatgagttcacgtgtataactcaatatataagaaattacccaaaatcgtgttccacgcgttaagagtaaagacaacgtctctgaagataccttttggatacgataaaaaagaacactatttcacaaataatatctaattaaataaacatattaatttcttgccaaaacaataattataataaaataaacatattaattaaatcactactgaaaaaaggacaaatcattatgtattacttatttcaattcataccgaccgttttctcaaggaatttactttatttatattttagtcattgaagactaatacaatatttaatacttttatatataaaatattgtaaccatggtaatatcaatactgaaatttattatatggagttattaaaacgcacatttctttattggcaaagagctagagacaacgataaggtatgttacttgttgacaagaccaataattaattagtaaatgtgaatatatacatatgttgctctataaagagtttgattttttaaaaataaaaatattaattgatgaatatagatagtaaatgaaaagattatttagtagttggatccaaatattttgtaacaattaatattacatcactttccagccccaaaacattaaacacatatcaccacatgaaattttaataactgaaaatattcgtgcactaaatatatattaaaaaaagatttggtattattaattaagaaaataattaacaatgacatgccacacaacgcttaaaaacataacatatgaattggtttataataaggtatactaataacaacaaataagttttctattttttttttttttggataaacaacaataaattaagcgttatttcacactttctaaatgattatgattctgtcataattatatatattttagacaattaaatattttccttttatattttttaataaaaaaagagaactaaatattcctttacatggtaagacgataaatctcataacatatataattacccactattatcaatgcatttaaattcagacaaaaaaatattttaatgcattcaaaagtaataaaaataaaataaatcacttgggatatacatatggcatttaatattaaagaaaaaataatattgccttaattaaataatcatcatcaaacattaatcttaagtataacgtgaatcatgtagagcccactttatctagtaaattataaatagacgtaagcatttatttgttttaggattttttattgtaaaataatatgttttgtttaaaaatatataatacttcacacacacgatgaaatctctatacaattaatatagtaatgttatatatatgtatatataaaaattacttctgcatgctaagaaagatgatatacaattcatgtaacacagagcacatatatatttcagacaaaacacatttataatatttaaaattagacaaaagaaaaacaaaattataatactattcaaactttgagactaattcaaaaatcacttgaatattcatttaaataatgttctttagtcaagttatacaataattctatattgcttctacaattttattttatgaaaatggtaaacacaaaatatacataacaataaaagggataatatatatatatatgaaaattaatcaaatgtaaatcggtgaaaacaatgagaagtaataacaaaattaaatagcatgaaagaatttatcaaatataaaatataattgaaaatactataacaatcttttctcattaagtttgaccataaacagtataattcataattattctttccgcaaaattttaaataagtgtctcaatcgagttggtaaagtagcaaaatatttttaatcgtttattttatttaattttttaaaatacatcactaaaattttacttcagaacgaaaaataattattttaaaataagtcataagattgttgtagtggaagatttgtacttttacgcactctcatgcaaaataaaattgatttagagggaaacaaaaagcaattccaattagaagggtgagtgctttgatagagagatgctctataaagtccagtagtttagtatatttataaaatctaaagcctaatctggtttggtttttttccttttttcatatttcatataaatatatatatataaataaatatattgatttttctctttgtctttctctctcatagtccgttttccataagaactgtatcaaaacaaaaaaaaaaaaaaaaggaaaattccgccattgactgatagcttctgagatacccatatggggcctcttgactcagagccagatcggtaagctaagataatttctgaaattgcatttcacaaaaatttgattcaattcatgagttattaccaaaactggatagtgtttttaaatataaaatttctgttaaatcttaccattcaaatcagatttattgttatattattactcaatctgaacgaggatcagattcaggggcttcactgttgtttgttgttttctttctttttcccttatatttaatggaaagaattaataattgcaagtttttgtatagccgtttcatgctttccacgttttttttatcttcattcccattgagcaaaaacaggtcatttagctgggtgttagctgttgagaaaaatctgggagcattagtaggaggggcttcttattcctcttcatgatcttctgtatttgagaaatgggtattctttaatttggctttacaggttccagcaatggtgttaaagaagagaaaggtagtaagctggaaatttttcaatttttctatttatctgcaaaaaattagctcgtggaagaagatttcgatgagcccaagaaactgaaagtagaatccgaatctaaaaacaccaaatcatccatcatcatcatcgttttcttccttctttctagctttttctacctagaaccaatcacattcttcttaccagtcaccactgctacctacccctgatgcagctaatattatattgttaatagaccaaattgagccagtaaagaatagactgaaccttcaattttgttttggcgaggagggttcactcatcttgtggcgtaaacttgctttacaggagaaaattggatcaggtaattgatgttgtttgaaaaagggtttgtatagcaattgtgcatttcgtttcctataatgttgtgcatttgattctgaagaaaaattattaatgtgatgatttaaaactgaatctgttgcaaattctttcagggtcttttggaactgattatcgtgctaagtggcgtggctcagtaagtattcttcatttcattccgttccatccatgagaaacatataccattgtgtttttgttatgtctgggttataaagttctcgtttttattcgttctgaaccatgaaatatgagtcatttaaagcatgtctccgaataagattctttgttattcacttcccttgttaagtgtcaaacacctaattcttgtataacacagcacaaacttttcataattcatgtggtgtagtattgatttcagtagaaagacatttaacaaagtatgcttctgtttgtaccatatatacccaaaatgaaacgatcaatgtcaaatgtcatagacctcaccatgtttgaaagagctccatgcctcatttctgctacaatttctgttatgagctgagaactaggagaaaactctgatataactcagccaagtggtatttgttacttctatttgatcaaatggccatttttaagagaggatggtgcccaagtagttatagatatctcttgatcatttagaagtgtatttgggcaaatgtaatcgtcttgcataatcattagtgaaagtgataaaattgcagtatcttcatcggacatgaatgtttgttggatcacattcgtcatcaatatgtactaattcaagaaattttgtagctctagctcctagagctctgtatgccactgtagccattttactccctagaattgactcacaagttggtaaaggttgtacctttaagtcatgaaaggaaccatctttctaccaacctttaaattcttatccaatccaacccaagatgcaggtgccacaaatatgtttctttagtttagaaacctaagctcagtgtcataagcattatcaatggagtaaagcagtttagaacaaaatgactgttgtatttgtatttatattttagtgataatcattaaaagcatgaataatttgtattcttgcttcttcctttttcaaacaccattaaagtaagattttctgacgtttttattgtttgaagataattttctgaattgtactctggttgtagattgctatcatgaaatgtttgcaacattcaaatattgttttattggccccattactcagccaccaaacttcttcatagttgcataataattaagaaagtaacaagatcatctaatgatgtctgtattactttgttttctctctccctctttttaaattttataatgcactgaaaattattaattattccaattgcagtggttgcttgtataaactttttaggaggccttatatgttggaattatactcgatgaaaggcttcggtcgaatatggcttacaatgtggtaatgtctcagtgtgattagttgctttttgcttctatatgaaaagagcttagaggctggatatctgcatacattgcacccaaaatgaatttattcattgtacacatggaattcagatttattaattggttaactcaggcaaaggaattgaattatctttgccaactagttgagtagagggtctgcaaaacaatatgttggcaacacacttaatttgtttgctgggaactagttgagaacccaatacatattgatatacttcaaaattcttgtgtttaattaattgtt

SEQ ID NO: 37083 - DNA, 6831 bp, Cannabis sativa
  modified_base (79)..(102): a, c, t, g, unknown or other
tttaattctgctgcacccactgtacggtttcggaaactttatatgtgtttatttaaattgttttagaagttcatatttnnnnnnnnnnnnnnnnnnnnnnnnagtaaatctagatcctggtaacattaatccaacactatctcctctagagcactccaagggaacttggtttagaggttccaccagcaggaagggctccgtcaagtccatgatagtggtagacaccaccgccatacccgaagcctttggagtaactcccagatttgatactagaggtgttggctcctcagatccgctcccagaggcttggttctttccaccatcaccatcactttgggcgatctccctaatctcgccagatagagcctggacactgcccaagaacttgttttgatgccccatccagagagtggctagctgatctacataagacacacaaaaacattcattaaaagaaattgtaacgaaaggcaggaattttacaacacatacgcatgcaagacttcaagagggtccaaaccattaatcctagcataattgacttttctcctagaaaacagcgtgatgtcttccagacctaaattggttttgtataggaagaatcctaggaaatagatttcgctaaatgcatccactcggacatgatggtgcacaggagggatgaagtggttaggactttggacaatacaatctaccctatctatatatctactgaaagagtatctatgacgatctaaaatcaagaagtatggataaaatccacactgattaactgtcttaaaatcagacacgataggagccctaattatatgataaggcatctcaccactaccaaaagtactcgctcctggtgcaccttcattaggtattcaatccttaaagtggatggaaaactctttagcctcgctcaggctttttgggaattgtctcctccaatcctccaaccattgctcatcgaccttcaccgccttcaaaggctcctcagcagtaataattgcgatggcttctctaacttattctgggtcccccttcaaggattcctgtactgactccttcatggagaggtgagttatatcctggtgtggggaaatgagacctacttctcgaagattcgccgttgtcaccatatcctttagctgcaactccttgggcgagaggatttatagaagttgactctctctcccaacaccggagtcaacgtggattaaggaaggcagtctagcacacagaaacagtggtgatttagagtacaatgagtataagggaaaacataattttattagttaaaatgggagtcgagacttacttacaagactgatgtctaaactaagggtgggaacccacctcaatgggaagccagaggtgaagaagtagtaatccttgaagtcatgcatgtgccttgtatgactagttgggtaagggatactcgtgctatatgtttgcaacctatagaagcccaccttgtctttgtaacctctcattgactgggatttgatatggtaaaagtacaagacatctttcggagttggtgcaagttttccatgtttgacatataaaacataccatctcgacaaaagattgtagacttggggtatgaactggaatggtgctactccagctaatatacaaaactcagtaaaatagtaccttagaagcatatgtgcccccatctcaatatgagcccaactccatacgccaaagcctccttccgcgcactgcctgggcctctctctaagtataaaaagcctgttctagaacagtcttggaacgctttgaagcccttgttcggtttcgtattttctcagatttttgtaatttctaaacgagttgacatgttggtctttttcccacggactgtcgttcatgaccaattggggagctctttgaggttccgtcgactcttcttctaaatcaacctctttttgatgagagcgctttgtcatggtttctgactaaaaagaaggaaatcaaagcagccctaactacctaatatagaaagggagctgggggttttcccccataaactgcttggagaggtcccaactaaactcactatttagaaaaaaaaactcccatgggttgctcattccaaactggaaaacaagaacggtgtaagaagggagacgacacagaccaacattcgacccaaaacctgaaggactttgggcaaaaaattggtcaacacatttgacgaaattcctaaattgaaaagtcaaaaagtaaagcaattcgtaattcctaaatctacctaaggggaaaaattacaatccataaatcttaatttcatcctaaaacagaacatgcacatacaatttaaagcgacgaattcagaaggtatattcatgaataaaaacaacatacttgatgataatagtgggagagtcaaattgattgttgctgtgtttggctcaagaagacggtagcagctttcccgaagacgagaaactgtggctatcagtaagtcaatttcctttctgaaatctaggcttgcaatttctcttggtgtaacagttctgctcactggcaaaggaaggtggggatactcttgagccctaattctcagcaacaggtgaaggtagtagtccacattgccttccagggtgataaagaaaagttctccttgaatatgatttgaagctcttatatatatggcaagaagtttggtgcgatttgagagttcgaaaaatttgaaaaagaaagtaaaagtggtaactgaagattaccaaaggtatttatacccgaggactaggatccacatgaggaaggagttgatggccacgatcttttcggaataaagtacgatccctatccaacagttaggaagattaaagatctaagagtatctccgcattttatgctcttaataataaaggtgtgaagtaatgatgaagatgctcttttttggtttttgtgttagtcagtgaacaacttcctaaatatagtcgttcctagaagatgactcctcgataaccgtgccctaatacgcacttgactgccacatagatgaaccattatcataggcaaaagtcagcttccgtggttgagtaacttgtgaaaaatcattatttctttctccaatctccacatgtccagaacaaagagatcagcgcaagcttccaccatgtgcagcatcctgaaagcttggggtgaatgtattctgggtttctgacaatggacatgtggcctccaagtggacatttaagactcatcaatgggaccctcattagggatacagtgggccatgcccacttggataggaccctccgggtgttatcttaattttgtcctcacagcgccttccaccctcgacagattaaacccagaagatagctttggtatcatgagcccagagggaaaaggaattgcattctcagaagattctttcgatctccttatttgttgcctcctataaataaggaaattccagctgtcaaattgtgccataaaatcatattgcgattaaagaggaaacttcccataacaagcgtagagcagttatttcagaatattctcccattataatcggatacggttttgacttgatcagctcaagctcgattggcctagtcagcaatcgtcttcttcatgggctggacttcatgagtaagcccaaagacactgttcagttgtaagcttcccaatagaggaaaaggggaaaaccctaatttaattcaccaactactataaatacccaactaatctcatggattaggggttgaattctctcgtgtacttttactcaggcaaacatacaaagtcacatcctatgtacctttgagaatatttacaagtaaacacattactgtataaaattaactcatgggctaaggctaattaacgccccaaccacgtaaaagttgtttctctcttattatatttttcctctcgattattgtttcttcagttcttattattttattctgtttcttaaaatctcaagaaacaattacaactaaggataaaagtcacattccatgatcgattaacacctgaaaagtcataatattatttttaatcttccaattgtccacactaatggaatgatgcaagcttccaccatacaaagcattctgaaatcttgggaggtaaatattgtccgtgtttctggcaagggacacgtggaatccaggtcagcatcaaatgcccaccagtgggttccaaagaagataatatgggcctagcccaagttatataagaccttctaggaacgtaccttagctccgtgatcagatgatcttttacaagtgacatcttgtattcaaaagcaggtctagtactgtgataccggaagagacagacagcgtgttcttgaaagaccagcgtggtttccctttttattcctatgcaccaataagaaaataaatactttcctaatctcgatagaagattgtatcaagctaaaaggggtaacttcctaaacaaagataaagaaattaattcaagattaattacccacaattataggacacgtttttgattagttcaaccgtatctaattgtcctagttagtatatcatctccttcgtggacttaacttctcgagacaggccaagttatgtaattcagtgtaaactaccgaataaagggaaaaggaaaactaagtgttattctctaaatactataaattcccaattgaatcgtacagactaaggattgaactctcttgcaatattttcttaggcaaacttgagaatttacgctcattgtaatctcgaagacttttcaagttcaaagttacataataatattgactcgtggactaaggcttgttaatgccccaaccaagtaaaaattgtttgtgttgttcttactctttctcttttaattatttatttcattagttctaattttttatattggtttttcaaaaatctcgtaaataataactaatatcttggtgatgaaaaattagaattattttcttacttcacaacaggatagtcacagttcttattgcaagtgagaaatttataaataccatcgtgaagtacaagttttctaaagtattttatgcaggagatatagtgccatctaattgtgttgtttatttctgttattgcccctcacaataagaaaatattcttataattaaagtttttttatttattaaaattataaaacatttgaacaaataatacaagaggaagggatgtgaaaattattttttattattcaatatcaccttaagttgaggactccaatcagcttttaagaatttttcaatgcccatcctattaaggaacatctcttccttaggtgaaatcttattcaaactcgacctcttaatgatttaaacaccattgaagatggtagaaaaattttctaccaatgatgctacataatttgtttttaaatttatgtatattttgctgacaattgtcgtagattaactaacttcacctatttagagtagatctaagttagcaaaaatatattattattcaacgtattaaatagtgtaatattttctaaaaaaattacctcttaaatttttaatagttgttgaagttactatcacaataacaagaccattatccatctcgtacaatgttggttcaaacatcttctccaaatctctccacaaagtattcttggatgtgaccacactataaataaaaaataaaaataaataaataaaaagtaaaataaagtatataatcaaacataatataatatgtttataggttaaataaaaaaattaaaacatatactgccaaatatatcattaattatcttaaacttactaatctgttagaatggtgatatctcattttttctaaccacttctaacaatttcaatataacccacaccatataggcacgcaacaacatctaaagaaatataacattattattttagtatttaaagatattaagttcaaatacttcaataacaaagataaaaaaaaaagatacctaaaagtactttattattattaacacgcaaagcaatcaaattttgagttataaattagaatctaagtcgtttcttcctctaacttcacgagagaagttccaaccacaaaagtaatcttatactcattgaaaagttgtctatattctcctgtgctttctacaacactacacaaggagccttaacatagtaagttcttaagcctagaaactaaggtttttgtgatagtggcatgcataagattttcctataacaaaaacagtgttcaataagtataatgtaattggatgaaaaaataaaaaaaaaaatctataaattaatattacaattacctgtccgtcaataaaaattaggttgaggtgaatcaattctccattcttctaagtattaagagattcccacattcgacataccctaacttttatcatctgactctctaacttataatttaggtcaataagaaaagagtactccatgaagcacactgtacacaatctaaataggatattttttttttgtggtaaaatatatagttggtatcaaatggaagacaatataacaatccttaaatagttgatggtatgaaaaagtgtaccttctaaaatgactttttatggcattaacaaaaataattaattgtagaatcattaagaatgtatttcaaaagacattgaagacattaaaaatgactaataatgtgttatcccaatttttacctacttggtgtggcatgtccacacaggaaaggctgaggccacagaatacacctcgttaatagatgagaaaaatcaccttgcacaacatgtcaataaataagagttccaaataatcaagcaagaccaagttgaaggtgttggaaatattttaccaggatctatttactatcatgtatgttagattaacaacctaatatgaat

SEQ ID NO: 37084 - DNA, 2268 bp, Cannabis sativa
ccggtctggatcagggtttgggtccagggtctaagtccaaattcgagttaggggtcggggtccggggctgggaccggggctagccccagggtcgggaccgaggccagttccaggtccggcattgggtccgaggtccaggtctaggtctaggtctagggtctggggccaagttcgagtcgggtcagggtttgggtccagggtctgcatcaggttcagggtcgggtcgggtctgaggtctaggttaaggtctggggtttgggtcctgggtccagatccgggtctaggtccaggtcgtggtttgggtctgaggtctaggtcggggtcccggttagggtcgagtttccaagatctaggtttggtcgaagtttaaaatattgattaaaaggaaaaaaaaattgtttaaaaaaattttaaaagtgactttgttttgttttcaaaatttttaaaatattgattctcaattaaaaattaaaaaagtgaaaacggttttatagaacatacttctagaaaatattttcgcttttttaatttaaaaaataaaaaactaattaaaaaagtattaccaaaagcactcttaatgtttgaatattttgctgtagaatttgtatgtaatatttacgtcttcttgatcagtttgtaagattgttaactggtgaagaatccctttgattttattcaaccagtttaggtttgtcttcctactcctagaataaaggaccaagtcaagatccaattctaacggtaggaaatcaagctagtcaatgcgactcctaaaattcaaagattgtgattatgtataacagaatttggataattttaatcgtccacattgcactaaatatcctaaggtcaagtctttatttagctgatttagtttcctatttgtaaagatcagatctgatcttttcctctgtataaataccctgtgtatttttagcaactaagaataagtagtgccaaaaaccaaatacacaactccaagacaaatacagtcaagaactacaaagctccacatttagaaacaaaacttaattcatcttcttatagtacattctaaaccaaaacagcagcaactattaatgtagcgaacctaaccaacaagggtgctagcggttgttgactcgtatttccacactgggggaagcttcttggtctttttgtagtaacgtgcaagtctgtgtatcctgctctcaaccaaaatcaatcgaaacttagaatccttgtccttcatgttcctcttaagatgcttcctaatagagactgccttcttaataagatgatacagatcctcaggaattttgggggcaagaccgtgagccttgagaacacgcaaaatcttgcttccagtaacgctcttaacctgagcaataccgtgagagtcacgaagaatcacaccaatctgagatggtgtaagacccttctttgcaaacttgcaaatgttgtcctcgacatcttgagaagagatcttgagccaacttggtgaacttctcttgtatggaagagctgaggcggagatacccttaccgcagctgtgcatacgacccatggttggaggcgctgaagagatccgtcttcaaccttctggttactgaagagatcagaactattctccaaaaagttgtggtatgaaggcaggttcttttgaaataatcctcactgcctttgctcaagtcacaatttctagtgttatgttaggatcccacactaagtatgagattggttggtggttagtaagtacttgaacaccctttgtgattgtaataaatggtatcagcggcatgcaccctcaagtgggatcgacattgcaaaagttcaccatagagtgggccaccatggacgtcctctctaagaaaaggtatattgttaggatcccacattgactaagtatgagattggttggtagttaataacaacttgaacaccctctatgatagtaataaatggtatcagtggcatgcaccctcaagtgggatcgatcgacgttgcaaaagtccatcatagagtggaccaccatggacgtcctctctagaaaggggtttggttggtggtttataaccactcgagaaatacttaggtagtagaactcactcccaaaagctaccataagagaggagggtgcctaagtagctataaaccaccaaccaaaaccgtacttagttaatgtgggatcccaacagtcttgtagaaaatagtgattcgaattgtgtgttgatttcatagaataatacatatttatatacaaagttaggagactaaatatctactaaa

SEQ ID NO: 37085 - DNA, 10057 bp, Cannabis sativa
aatttggaattgaggagagaatactaatatttgcatactaaattacatcgcattagggttgagagactctaacaaatatttgtaaaagtatgtcattgccaaaaatatcattgttgttattatcaccttgatgatcttcatcttcattgataaccaataacttgtaacccttattgatcttcttcatcttcacatgtttaataagaatgtatatgaagtaattaatatgctgtgtttatatagatatttaacaaagattattacgtgggtacgtttaaaaagatttgataatattttttattttaaatgttattcattcaaaactgaaattaaatatttacacgagaaaagatatataataaagagtggaatttagaaaaatgttaataataaagtgtgtttgtattatttttttaataataaatatatcatatattgctgtaaaatacgtccaaaagaattgagcaaaattcaatttgaatatcggattgggtgggggccaatttgctaaaaccaagatttagagaacaacttgataaattatatatagttaaaggacctaccacgcaaataaataatataaaatctgtaaaaacgcacgtggttcttaccccagttgccacctcagcaaggataagaggaaaataaataataataaaatcagagtcacaccacacagacagaaatcaaagctcgacactctccttctttctctccatgaaagctcgagcttgattcattggttaaaccgaaagaacagaacccatcaatttcgtccccagatttgaataacccaacattccttaatgggttcttccaagactttgaggaagttggaggtggcctctccggtcccagctgatattgacattgccaacgccgttgacccttttcacatctctgagattgccaatgagctcaatcttagccctgatcattatgatctttatgggaaatacaaggccaaggttattcattttttatttcaattaatcttgtcttgtttgtgtatttgtaatgggtaaataaggctttgatttgagcttattttgattggttgatgatttctgtttgttttgtttttgtttatgtttaattaattcaggttttgctttctgcacttgatgagcttcaaggatctaaagatgggtattatgttgtggttgggggaattactccaacacctcttggagagggaaagtctactactactgttggactttgtcaagctttgggggcttatcttgacaaaaaggtaaattcttttctgtttttcattgatattgtataacagcagctctatcactttaaatttgtctttgtttttctccattgattagtgaaattagttactcttcttggaattgagcttttgagtttgagcatcttttgaaattagtatcctctcacttttattaatgtatttgtattaggttgtattgtagtgtattatattaatttgggttatatatcttattcttatataatactatgttataatttaatttataccaaaatattatatatttagttgataataaaagtaaataccacataaaaatatctcatataatactatacaagacagtgtaatatggtgtaccaaacgaactccaaaagtcttaactttttagtcttttgaagagaagacatgaattgggttgtgtaaaactttgttgactggtctctaagctttgagttatctgcctgtctctaacataggattctaacatgtgtaagtttttcctgttttaggttgttacatgcctccgccaaccatcacaaggaccgacatttggaatcaaaggaggtgcagcaggaggtggttacagtcaagtgattccaatggatgagttcaatcttcatctcactggagatattcacgcaataacagctgcaaacaatcttctggctgctgccattgatactcggatttttcatgagtcaagtcaatcagataaggctctcttcaaccggttatgccccccgaacaaggaaggacagcgcagctttagtaacatcatgtttcgacgtctgacaaagcttggtatcacaaagaccaggcctgaggatctcacaccagaagaagttaaaaagtttgctaggttggatattgatccagaaactattacttggagaagagtaatggatgtaaatgaccgtttcttgaggaagatttctattggccagggacccgaagagaaaggaatggtgagagaaacagggtttgatatttccgttgccagtgaaataatggcagttttggcccttacaacatccttagctgatatgagagagaggcttgggaaaatggtgataggtaacagcaaggctggtgatcccgtaactgctgatgatcttggtgtgggaggtgcgttaactgtgctcatgaaggatgcaatcaaccctactttgatgcagacgcttgaaggaacaccagttcttgttcatgctggcccttttgcaaatattgctcatgggaattcctcaattgtggctgataagatcgcgctgaaactggttggaccaggtgggtttgtagtcactgaagcaggttttggtgctgatatcggtgctgagaagttcatgaacataaagtgccgatacagtggcttaacacctcagtgtgcagttattgtggcaacaataagggccttgaaaatgcacggtggtggtccagcagttgttgctggaaggcccctggaccatgcctatttgactgagaatgttggtctagttgaagcaggttgcgtgaatttggccaggcatattgcaaacacgaaatcttatggtgtaaatgttgttgttgctgtgaacaagttctcaactgacgctgaatctgagttgaacgcagtcagaaatgctgctttagcagctggggcatatgatgctgttatttgtacacaccatgcccacggtggtaaaggagcagtaagttactaaagcattaacaacatagtagtagtattaataattgatatttactcattggtgctctcaaaatttctatatgattagttgaatatcttgttattcagaatatatgcaccctttctatggaaagataggtccttgtagtgttgagaagcttggcacaaaatattgtcccaacttgaaatatttatagtttggaacttttttgctattcttggttaataatcgtgaccatattgtcccagattctgttccaaaatttgctgttatctaattattttggccgaggaagatcatgtataggaaagcaaatggattttgccagtgaatctagtaattcaaattattgaatactgattttgaaatgtttaatcttgtatacatattctgcttcttgagataatgatatgtgtgtgcgtgtgtctctctctgcgcgctttgttcttttttttgttcgtccaaaagaataaactgtgggaaaggctatgaatggtgtctataactaataaatgtatttatgatgttcaggtagacctaggaattgctgtccaaaaggcctgtgagaatgttactcaaccattgaagtttttatatcctttggatattagtatcaaagacaagattgaggctatagcaagatcatatggtgccagtggtgttcaatactcagaacaggtaaaaattctgcagcattttcataccatgttaactttttttatccaagaatttctgttctaaggttaactaataatggatgtgagacccccaacaaacatgatatttcagactaaagtctatttaagaatgaaacaatatcttgttaagaacaatacttctgaattaagttttcttttgcgtctataggcagagaaacagattgagatgtacaccaggcaagggttttcagggctgcccatctgcatggccaaaactcagtattcattttcagacaatgcagctgagaagggagccccgagtggctttgtcctaccgataagggatgtcaggggtagcatcggagctggattcatataccctttggtgggaacaatgagtaccatgccaggacttcctaccaggccatgcttttacgaaattgatcttgataccgctactggaaaggttattggtctctcttgaagaaggcccttgtattgtactactcaaggctatttattggcaatgaagcagcctcagcctgtggccaaatttttgaccaagggcagacttttcactaccatggtttgatggttttcctgaaagtgtattatgttatattccttctgttttgtacaactaaacattaatttctctaaataaaaaaatcatgttaaatttgtgttttgaatgcttatcatgtccataaatgctttcagttatataactgcattttggttttgtttataaatgacattacctatatataaattagataaactctcaaagaaatatactatcctttcaatgatgataagctggttcaatttgatagggtataacataaattaaaaaaaactaaatcttggtatgttaatcaagtattcccttcttctttcttatttacttggcattaaaattgtacaatcaccaatattcttctacatggctttttcctaatcaacattctatttccatagcagaggaaaaacaaataaaaaatgtgattgacaaaaccccatagaagttcaagcagcagaaaaagaagaagaggaagattttgagtcaaaatttaggtgagagtttgtttgtaagaggcttcggcgcgagcttcatccaatttcatcaacagctccttcatgaaaggtgtattggttccatgagagattttaagtatatcaactgccttggttagagacttcacaccattctctgtctccccaagaaacctgcaaaactccatatcatttgatgttctaacataatcctcaatcacaaagcattgttatcttaaaatacaagttgaacttataatcctcaaaatttgaatattaaacactgaataagtttgaatattctcacttcttaatcatgggaaattcccaaaatttacaaactaagtcctcttactcaaccttacaactctctatatattaaatctatataaaatcctatttaatgattaactaagaaataattacaacaaatgaatctcaagaaagaaatttgagtgaatgtactaaccattcaagtttgccacatgtataatattgcaaaccaagcaatggatgaaaacttggatatactcctgcaatacaaaggatcaatacatcaagtcccaaagtgtgtaagttactaaattttaacccaaattgagtctataatctttttcatggtgtaatttagctaaatacaaaacataacttatcatttggcaggacagctaaattacaataaactcatgaaattaaattattggctaacccatgtcaatttttcagaatagctagaattcagtgttaaggtctcaagtttgagtccatcatcctctctttcaacaaaatcaacatcttttctactgtgcaagagttagcctaatcgaaagtttcaaactttttctacaagtgtttgttttaaactaaaatcggagagtagagtagagttggatttactttgttattactattatgttcactgcttaaatcaccagcttaaggaggtaaaatggatctgatttgaaagcaaacatactctcatatactggaatggtcattctgcaataagatagagcttcatgccagttttgcaaatccataaacatctgaagcaaaatacaattttgctatgatcagtaagaactaacatgcagatgatatgcttactgctaaaggagagaagaataactgttacctttaaaagcttgtcgcgagtttgcatcaagctgattgagaaacgatggcaaagttttctcttaagtttctcaatagcaagtgtagtgatcaattcctgattatctaacctcagtcaaaggttaaccttgattggaataaaagactacatatactctaatccccaatggcatagttacataaaatcaatataggataatcatggtttcgaaaaggatgtaaacagtaatttgagcatgcagtagaagaagtaaaaggatactttgtgaggatgcggaatcaagaaccttttcggacagtgattttatttcgcttgctagctcctttatttcttccttgcttctaataagtccacactgttggcaaatgaatcctttgtcacctgaacattgaaatcaagtatacagaaacagttagtttccttccaaaatgtatctttattatttgctatcattctactcttttcggttttcctaaataccagaatcacggagtaaaaagccgtcacattcagtattcttgcatccataaccttccacaattgcaccttctttgatatcatctggttgaccctttcagtaacatatcaattaaaaaagtaaaggaaaactattacatacacgaaaaggagcgaaacataactgaagccaaaagctttgcacggttgaaggaaagaagctaacttagtatgtatgtaccaatttgatgcagcgaacgcatttgcaagcgaagagatattgttctttcaaagccttttgacgggtcagagtgcttcccgcagtttcaatgtagcttatcaacacctaataagttatagaagacgataaatataagcaaagatttcgtaagataagataaaatacttggaagatttagtttctcgcaaacaataaacattgaaataccatgtatgcaatcacaatatttaagcacttttcgatgtaggaagtaagcaatttattagaattggttaaataacatcgaaaatacatgcaaatgttccgatccatagttagatcattatacaatatcacttctttttcagtctgtcatgaaacctgttttccaacccgtaaatgacatgaagctgatctacaatgtggatacgaaattgcagttaagaataaaaaactgttaatgtccaagaaatcatatgctactacctcagaatctttgggtatatgttgcacagcacgcacgacagctaactttccctcaaaaaccagaacagaatttggcaagcagcttaaacattcaacagactgaaatcaggagaatggtacctaaaacatatcaatgaactaaaatttgttaaacagcattattgaactgatctagttacctgtggttaataatagatatgacaggaaacagcccggtccccaggggtctcaactcattatcacaaattgtatgtgcattgcaagcaagctgcgtcgatagagaaagataaaatcaatcagtctgtcttacaatgtacagccaaattcatcgttgagttttaggaagtgagcataattgttctaacaaatctgtgattaattatgactgtttataagagtaccttggaaaagttttctgcaatctcttttatgttgacatcaggcaactgaagcatcaagttgacaaggttagccatctgagcatagagcaccagttgcttctcatctatctcagatatatctttttcaaaaaggattaaagtaaaacaattgaaacctaacacaaactctgtgaaaacgaaaaagcaaaaactaatttcggggaccaacacaacttgtttttgaaactatgcttgcctaacactacaatatttgagctaccctatagaaaatccaatgtaggtatcctggagggacttgaacctcaaactttgtgagaacaaatcacatgcctcactatttgagctacctttctcggagattgaaccgaaagcaagttgaaaaggatacgagagatcaatgcctccaccaatttgtagttttccatggaagtagcaggaataacctattagcaatgacagaaagaaatgagtgaaacagattgtcccatatatcaaagtgcaaaaatctatagtatatcatagtggaaaaacctatagtacatcctccaaaatggtcgttctggtacaccccctatccttttcagcatttaagaattgtcataatcgtgtatgttctagttatactttaaaatttctagaaaatccttaatagtttacaataagattcaaacaattgcttaccactcgtataagaaaaaataatcacctgtgtagtaaaatattttaaccatcttttcgacactataaattatttaaaaaacttatagggtgtagtcctaaataactacaaagtatacgattatgaaaaaaattagactaaaaaacttattggatgctgaaacacataaagagtgtactagaacggtcattttgggggttgtacggtagaattacccaattgagaaattgttagacattcaacaaaaacttgaataccaagaagagataatccaaaagccaagcagttcttagcttaccctttcggattccaatctcctcctaatgtagagtctcagcatcaaacgcaaagaaggtgtaacagattttcttctttctttatcaagctttgaaagagcattacattcaagacgatgcaatttccactcttccttctaaaaatcatctcaaaccagtgaataatcataacagcaaaaaccatacacagataaaatgaacatatttatatatatatacctgacatgaagtactacagtaccaaacaatctgacaaactgaacatttcttaagagaactggtcccaaaacaaccatcacatctggacttattattaggcaccgaaacataaggcttttctctcagaataacttcccctgaaaatatcataaggtattacaaattatatactctaaagacttcattttttttcttgcccactaattagtattcattaatttcttggtgggttagctaagtttgtaatataatgtcagaaacaaagtaattggagcaatctacactagaaaactgtgctcaaagtcagaacagagagagacctggatagaagtgtttggtggcgaagaggcaacgacccttgtctggcaaagtagagatggttaagaaaccctcgttgagatcagtctccaattcttccattgccgtcgctggttttgtaaacagagatattaagcagaaaaatggtgttttacggggaaaggttcctcctttttcattttaattatatttagaagtacaatgatcgctaatagcctagtatagggttaatttgtacaacacttcatcaatttctaatcttatttagggctaattaggattttacattttaatgtgtacatatatttgtacattttaattttaagtagaataattccttaaaaatattgagaaattcattccattaaaacacattctatatattacattcaatcaaacatatctaatgtcatgttcaaaaaaaaaaaaaaaacatatctaatgtcataacatgaagtagaaaaatgatggtataggtgtaatactactatactatcccataatgttataaatgacaagagagaaatatataaataatgttattaacaatggacaattttcacatattgacatattagtctaatacttaatatcattgatttttatatattaacacataaaatttgttacactatatgaaaatagtgtaaggcctattagcaatttattaatatataattgtaagtggtaaaattaaaaatctagaaatatgtaattctcaagtcattaataataaatataaaatgataaaaatacaactttagttcaataaggagattaacactctctcaaacaatgcatttggaaatttgctctattggataatatattaggatgaaatataaaaatattgaggcatatataataatatatgttactctacttatcgccaattgtttcaccaattggttttgagatagaaacacatgattctcaacataatttgaaagtcatatcctaaagagccttcaatccatacctattagatatttagccagccgcaagcgagtaaatgacactctcaatggcgaacaataataagtgagtaaaatgacaccttgataataaggtgtgtagaagcttaacaaagcttgaagaggtaaaacctgatggtatgaaccagagagaaaaccagaagcaaaacagaacaaatagcagagaaaagctcaaaaaaataatattgagctgagagctttattta

SEQ ID NO: 37086 - DNA, 4114 bp, Cannabis sativa
  modified_base (1822)..(1827): a, c, t, g, unknown or other
  modified_base (2905)..(2913): a, c, t, g, unknown or other
ctcacgcaatttttatgggttcgacctcgttcttcacaatctccatactacaataaagattcgtgcgcttgcgagttgataaatgtaaaaagtaccactttcggtgcacaacaataggcttgactaaattactttgcttttgcttctccatttccttgactatgatgacttgtacttgcactaaaatctcaaccttggttgtaccctctttgactccaactagaagcaagagtttggaaaccttgcgagtatcccatgttgaatcccaaagcttgtggcctgaactaatattgttactgacacttctggcttgattggggtgtgaaactgtaagcggaagattgagtatactatacataactccctatgggtcagtcgtgagatgcttgaaacagttgttatcattgtgggtaatttttcatcttatgaccttgttgaccaaaactaaaacactgatatggaccacttcgagtatttccagaagaaccactactagtgctacccccactgaattattgtccttaggaccacttcccttggtttttcttagtcatctttgatcatttccttttcctctacttgtattcttcctcttattaagttatacatgagccttagttcgcaaagctcctgtcacatactaagtaaggttgttaaaggtaaaatgtgatatttgatcgcatatcgcaaactttaaacgacgcatgaactattaaataaccaaaggtttgtcaacaaaacccaaatgagtaaaaatctacaaaattcattcattttcaaagccccttatcttaaaccatcaaatattccaatcagaggtctcctatgagatggaataaaatattgttccctaaaaaccctctcaaaatctctccaagcatcaatttcttctgtcctaggcaaggtttcacaccaatctgttgcaacactttctaacttgtacaaaataaaagtaacttggtacccttcgggtgttcctattgtgttgaagtttttctttattagcctcaaccacatttcaactaccatggggtcttgtccaccctcatagtcaggcacttagattcgatgaaagatttaaaaatgatgactttatcgagctttagcatccatctatttggcaagaattgctcttaaggcttaaagaagagcattcatatgaaattcaacttgtggatgttatcttgagtagcgtcttctccaacagttctctttgttcttcttcattttggagaaccaaaaggtaatcaataaatgaggaatggatgccaccaatataaatatgtgttatacatataaataataaaatatttattattttaaataaatctaaataattttgtgacatagtttgagtactacaacaattacgggttttagaggcagtttttaatccctttctgcgttagttttgacaaaatttactaccgacactaattcaagcaacgttgtaaggtcaaacagaactgatgccatagagggaccatatggcatcaattattattaaataaccaacgccagtgtacactatagaatcagttatttaataataattgacgccatatgtaataagaacttatgtcatagctaaataaatcaatgccatagtgtgtaaaaatcaatttatttttttagttttaaaacctattataaattcacaaattaaatgaatttatctaaaaattaaatatttattaatttaaaataattattgtttaaattaaattaaatatttattaatttaaattatatttaggacaagctaatatacttaaaataattttatggaagcaaattaaaaaaattacaattatattacacnnnnnntttaaaattagtccaagtgttaacaagttaatatatgtatttaaacatataaaaattacaagttaacataaaaaaaataagctagggaagaaaaattcttatacattttagcatcaatcttctaacccttcttgaactattgccaacaattgttctatccactatcgctggaacagtaataattcagtttttgcatcatatgtcttcttttcctcaaactctaaacacaagtaaatatttatattagtacatatatatatattattgcttgttaatataataaataagataattaataattaaaacttacaactttttgatcgtttaaataatggttagggtttgcacgtggaacgatgtcaatcatgtatttcaatacatatgaaccacattcttagtttttaggttttcttggacaatttcctaggaatatattcttggccatgcctcaataaacgcatttgatcccccttaaatctcatatgctctattttaaaaattatattaatattttaattaattaacatatatataacttagttaattaaaagatttattacataaggagtaattaaattattatctttttagtattgcctgaatgtgttgggaaactgtgtggctatttatatggtctaaaaggataatttttcctagcgcaatgacctttagcatccaatgcgcactaaaaaatatatatacatgtatataagtgttgaccttagaaattggccaactgacattggggtcatattaaactaatgcttgccatgtgttacacaattagaactcaaaagtaaatgaatacaaggattttatagaggttcgacccccttagttagcaggttatgacctactcccattttagttgtattgataccgagagataacactattcacatcactaaaggtgggatccgatataactctcttaaagttataaagtaggaatcaaagatggcaaatctaaattgttgagagatgctatagtgggcatgagagagagagagagagtggagtgagttatcaaatgtagaatgaggcttagacatagggtttttagggttgagttaaggcnnnnnnnnnaggagagcttaaaccctaatttacaaataaaataagttcatatttacatattaaatcgtttcaatacaaaagactaaaatgccccttaaacataggtctttttcatctactttattgggctgtaaaggcccaattcactatccagcttgtagtccacgtgtaaggctgcgtaccagaattctgctaggtccaatcttggcttgctaggcacttgcaggatgtaggttggctagccttttggtgtcggctaggagtggccaactagtccttgaggtggctggtctgtcacttgttagtcgtttgagtgtagggatccctgtttgctagggtgctaacttgacctccttgttggtgatatgtactgctacgtgatgttgatattttccacgtaagcatgccatgtcatgtgggcaaaaatcctgataacgttttcccccaagtccctgtacggatgtctgtgaagatacagacttaccagccgagtcggaactactatagccttagccaagtagatgttgctgcatcattaacctttgaaatgtctactcttaattgtttgatctctttagttgcggtaaattaactgctttgcatttctacatgtctctttgttgagtatatgtggcaagtgaaggagtggtcccacaaaatctattaaagtctttttggggaaactcctcttcatttgttcacctttcactctctcactagaaagtaacttttgaagaagctcctccttctttcgagaggactgaacccacatggcatcattctcctggtgtttttgcattgtttcgatgatccaagcttcccatcttcttcatcaacaatttttagttgtgggtaagcttttattctcaccattcacttgatttagtagatttttctataagtgcatgaaccttgttctttgctttgaatatctttgaattcccacattagattgtaatccttttggtatttaatctgtatggtagtcttaatatttgtaatgtgtgatttcttgatgaaaaagatctgattccgacctttgttgtgattcttggctctttgagtcacaaagaacacaaagaacgtgtttgagttcttaaaaaaacacatgttctaatctcgtacaccttctttctagccaaggaggtcttgttcaagacctggctagccaagggaggccaccatggagttgttgtaaattattttacca

SEQ ID NO: 37087 - DNA, 5830 bp, Cannabis sativa
atatttatgagttaataacagaagtggtagtaacggtgtaagagaattgtaacattgggtatttttgccaccaaaaataaacattaggtatttgattgtataaaattggaaatattaactatttatgccgcaatttaccccttaaaaaaatgagttgctttggctaatgccaaaaggacaattttgcccttgctttgagactcataaaacaagttttagttcaataatcaaaattgactctttctgtattcaacaatggatcgaactcagttgctgttggttgggttaccaatctttctcctctgtacggacgttgtgaatctcttcacacctgctcctcccaaacctcaatcacaacctcaaactcaacctcgtcacgatcaattccaatccactcttctccaagaacctcttcccttccccaatcccacccaccaggtatcttttctctctaaaccctaatcttcaatcttacaattgcttatgtaaccaacactaattctctttttgttttcttttattactactgatgcagaatcccattactagtattgggggaaatggcgtgggaaccaccgtcaatatcaatttctgcacttcctgctcttacaggtatcttggtttcgttttctgttttaattgcaattggcttggttcttacatcgctcttgtattgattgatgagaagttttattgtgtgaaattgaatggttgaagatccaagttgagaaatttctatgtggtttactatatttgtctggaaactgtgtttttaaaagattttcttgtatgttaatttctagaattgaatgaattaatcatctactttcgagtcttatatggtggtagtgatcaagatttttattttatttttatttaaaagagtttctgtttttgaatgaatggtatgaagaccaaaattgattataaatcctaactactgaaaacaacagagttgatcattaagacatttcaatatcatagatacatcatgttacagacattgaatctatgaatggagatactcccaaaactgacatagaagaagtgagttatggcaaatgaaggatcactcattcaaatcttttgttgtttgaattttcacataaaaagcggaggtttttttttttaattatttgtgcttcagccgaatcctggcttctatttttgcagaagagaaagaaaaaaaaaaccccatttcattcttaattttagatgtaatacttatatttgtaattattgaggcctttaccctgagcagaaaagttattcaggcattttttctaatccttctatgaatatcaaagttacttcaagtgccaccaattgttttattcttcttgtgatcatgtatatccaactttgataagaatgaaatgattttgttggtgctgttgttttgttcctttcccccatattgtatattttcatttcttatcaaagcttaagacttgaagtggaatatgttttgtgctaatgtaaattactacaatccttttgtttttcatttagatactattgttttggtttgcaattagtgtgattattttcatagaagatttatctttagtatgtattattaagtattgaaccttatatccttcttttcttgacctgtatggtttctatttacaggggaaatgctgtaacaattaaaaacatgctggaaaatgcttttccagggattaatgttgtcttggcaaaccaccctcccgctttcccgaaacggattgtgagcaaagtgataccagttgttcaagtaggaattgtcggggtaataatggcaggcgaacaaattttcccaaagttgggaataatgacaccaccagcttggtatttctccctgcgtgccaatagatttggaagcattgcaagtgtctggctctttggaaacttctttcaatctgctctacagagtactggtgctttcgaagtattttgcaatggtgaattggtaagtatatcttcatatatctatgtcagtgacactaaattcttatatcaaatagtcttgctcattagtatggttttgcttagctttccaaatagtgtcttatcccaaccttaaatcaaagaagaatggtgattattgtaaattttcttgtattccctttcttgggtttgaatgaatccaggggaaaaccagtaccattatgccaccttccttaattgtctagggaaccaatggcatagaagaacactattagatcaggctgtattctgatcagagccagtgtcatttgttaatggtttttatagcatcataaacctgaaagtttgttgacagtgtttacgacattagagatgctcaaattctatcttcttctcactttcgtggctctttggatctgcaggtcttctctaagctaaaggaacaaaggttccccggtgaaattgaattaagaggccttgtggaaaagagaatcggtatttcaagaacagttagtggcctttgaggaggaggtattttggtcctaatttttgcttttgggattgatgttctaactttccaattggacacagaaagtctggcagagacaacaatgggaacaatgttggtagtttcataattcatatactcaaagtgggagcccaagattagagattatatgcctacttttactggccaatactgacatgtttttgtttttactggtaattaaggtgttttgtttggctggtactagccattattaaataaggggttatttgtaatggattaatgttaaaaggggaaagctaatcttcatattacaatgcttgttaagaagtttttaactttttaaaccccttaatacttttactgtagtattctaactactctaaaatggtgtaatattttttttttttttttaacaaaaagaacttttttattcaaacacaacaaaacagctcagtacaaggcaaaagcctactgcagtaagcaacaactcaaaagagaaaacaattaccagttcttaattacattataaaaatacaaatctttcccttttagcttgttcacaccaagcaacctgaacttaatagcatttttaacatgagtgttacaatagagattaaaaacactacagttcttattcatccacaaaaaataaatggtggcagccataatagagttctgaactttatcctacagattgaggagagcctttgaataccagtctaacaattctgtaaatcaaagggtcaaggtaagatatcaaaccagttaccaatctcagcaataaatctacagtctgtcaagatgctgaagagtttctgtttcagcttcacaatcagggcataaatctgagggaatagacaatattttgctgggatgatccctagtcaagagttgggttgttaattgcttcccaacatatgaaacgatgctcagggatgttcatcttatgccaaacttttgtaaatggaattgttcgagagaaattttttttcccaagaaggtaatggaatttactacgatttccattcacctccaaagaaaatttctacaacttttgtctatagccgttgtcaccttttgatgtaaaatgaataagctcatccacccattgctaatccttaaaagaaccgagtgaatgaattgagcacgacttgccaaagacaagtttctactagcctagttattgagatttttatgaatcttatcaaggattataccacaatctaagactttccacttggttggtctaaggttaacacccaagtatttaagcgaaaaagctctttcctcaatctgaaccatgctcaatattgtccttttacatatatctttgacacccccaaaataaattgaagacttggccataatagctttcaaaccaaaagagtcgcgaaaaagtttaaaagtttcatgaatgtacctcacacacttttcattacctttgcagaagatgattaaatcatcagcaaagcttaaattgacaagcttgaggtgtttacaaagcgggtgataaccaaaaccatccttgcaagcataatgaccaaagactttggttaaataatccataatgagaacaaagagaagatgaaaaatgagatcaccttgacgcagccatttttctctcttgaaagaaccttgaagcgtcccattcagcatcaagttataagaagttccttgtaagaaaaccaagatccatttaataaatcttattggaaaacaaaggcccttcaataagtctacaataaacagtcaatcaactgtgtcatatgtcttgcttagatatatcttctaagggtgtacgtcggtcgttttggtcgggttatagtatatttttaccaatccaatataaatatcgggtttcaaatatttaattgtaacccaccctattaaaaattagaaaaagttcagcccgccaatgattttgtcggtttggtcggattaactcgtccaaacagttcttcatttttttttttataattattattattagtttctaattcaaaaaattagatctaaagaataaaaatatattatttatatttcaagctaaaaaatactttagtctaaattaattttaaggactttaatattaaaataaatataattgagtaaacataaaataattgaataaaatgataatattatatagattttaaacgttaactcaatatccaaatacaataaaaattattaattataaagtctagattttaagttaaacactaagatgtccaaactttaaatacaaagtagtttgactaataaatgtaatttatgtaatatatcatgtatacttttattaaataaataaataaatcggtttattcgagttaatttggcagtttagaataatttgtaaaccacccaatatattcattggacggtttggattttcattgtattatttcaggttgtatttttgtcggtttattcggtttggtttggacgatttattcgggttgggcggtttgtaaattttgttgaacacccctaatatcttcatgatgcatctagccgagacattcttccttgtataacctttgggaagatcttgaaaaataagaattttgtcagccaagtgtctattctttacaaaagctctttgattgttgtaaattaaatttggaagaacctctgaaagtctagagcatatcatcttagagatgcatttatagagagtattgcaacaagcaatatgtctataatcacttgcatttctagtgctgtcaattttgggaattagcgagattactctttcattaagctcattcggcattattccatcttaaaaccccccaaaatagcttgagaaatgtcctctttaatctcattccaaagacccttaaaaaatctcaaaccaaatccatctggaccaaggcttttagaggcatgaatatcaaacataaccttcttaacatctgaagaattgaaaggtctgattaagcgaacttgttgctgaatgcaaatttgttgggattttatgtcctaaataaaactcatttcaatataatttgatttatcaattaataaaaaaaagcagaaatctttttatgttgcatagttcacatgtttactttcatgattatatgtttaatatataaattctgctaaatcctgaatatataattgttcatgattatagtgttatctacacagtagaaaataatcatgattatatgattcaaagtctttagtcccatgatttatcattagattgaatttacactgacgtgataatcagcaataaagtttacttacacaatgatatgtgaaatatcttttctaaggtattagcaaagtatattactatcagatgtattgggtatacatcggactggaccgatattgacagtggaaaatatatcataaacttaccgtcatgtcttt

SEQ ID NO: 37088 - DNA, 4206 bp, Cannabis sativa
ggcataatagaaaaattgtcatatattttaaatatggggtattatgagttttgaggataaattttaattaaatgcaagcatacaaattcaaatttcccttacactattatttttttccataaggtacgagtgttaccctaacaggtatagtgtacccacacgtaatcttattctaataaattttatgaaaatcaataataaaaaatcaataaattatgttcaatgacataaaaaattactagtatataattaattagtaagtaataattctattatttataaaattaattaaaaagaataattactaataattaacataataataaagtcttatagatggtaaatgattattttaagattttatatttttataataattattataaaaataatttttttatgtatttttcaaatataaattaaatgcatagcgttaaaatatgtataaacataaatatatacaatcaagtagacatggtactcctacatgcgtactcttccctatacccacatcgaatacatattttcatactcttatcttaccctaaaccctaattcaacatgtaatatgggtagggtacccactggtaaacgagtttccgacaaaattaccatccctattatgaaagtgagtaacaaggataacatcttataaaatttacagttagatgaaaatattaaacaacactgacaataaattttggtcgtaataagtaaaaacttatgagaatttttagggagtttgacttcataacttaaaaattatttttagtttttaaatacagaaaataacttttaaaaactaagagagggtgtttggccaaattttttaaaaataattttatgcaaactaaattacaaaaaattaaaaacagaaaatatcaagatgttgttttctatttttaaaaataatttttacttttttgtctaacatatgtatatatatatttttatatttttgtttatattgacgataaaaactcctcaactaaactttagttagaaaatcaaatacaaaagtctaaagatgaaaagctcaaaagaagttaagagcatcaatggagtaaactcatattatattgaatatctatgctctcttacaaatggtgattttccaagcccctcttcaatggaagagaagagtatttatagggagctctaatggctccaacatacaagtgatcccaaaagttaggggacaaaattatgtctgtaacatgaatatcaacactcagaagggtaggggagaacttgttcaaaaaaaaaaaaagaagggttggggagaactggtggtcatgtgtcaatttgtaccctaagtgggacaagtggtggtgtctccacttcttgtacttgtcatgcccgttatacgttcgcctctcacctccctctcagaggtgatgaacttgtctcttatcgtatattcaattggttttccctcattatagttcagactcacaatatgggaatatcattaaaaaatttagttaagtgttaccccattgtaacacacgttctatgagtacaacatgtgccttgccccctcctcgtgtagttggcctcctattttcttgcacatatactttcaaagtgtactgcgggtactaagttcaaagcttgtcccctagtatataagaattcttttcgactaaattcgatgagctttgtctccatcgtttagttctgtggttgcccctctaggatctatctctaccccttttatggtggatacttgtcacgtggagggagtgctagccttttgagctttctcgatatcttttatgagttatcattttgtttgaggaagctttgtgccacttgaactttctcaaccttttttatggtgtaaccttttcattgagggagtatagactattagaggagtctcgacctcttttcggttacctattggatgtatgggagtttctgatttcttaggcaatgctcaaccttttttaggatttaagattttaatgggggagctttggccccttagatagtgctcaaaccctttcatggtataatatttacttacgggtgcttgtggcctcttagactcgactccttctatgcattcgtggcgcttatagcatgtttttcagatgctaaaaaatttatactccttttagagatttgtccctcccatggtcgtactcttttcctcttcctattttgttttttttttttttttttttgttggccttctgcggtcattcaacaccgctaggtgcttttgttcatgcgtcgtctcattcaccttgataattttgattgacaagtatagtgaacaagtcgaatggatttgtggagagtgataactgctacacgtaaagtaaaaaatttaagatttcattgataagacaaatatgcaagcgcctgggtacatttgcttttttttttttggtggccaacttaggtgccctacttaatttagtatattttattaaagataggcttgccattgtcaggagtgctctccttgatcgattgttggaaatagaataactttactttgaagaacctcttggatgtttaatgtttatgtgttgtaggttggaggcttcgctcgaatgtatcaacttataactgttgggggtatcacctaacagacactataagggtctaatgagcttcctaaagaacactcacttgtattgttctcaagactctgttaccctccaccatatggatgtacttatctgctctctcgtaaaagtaatctatgcattccaattctttcttcagcatgttcccccatactccatttctagggcgtactccagcggttacgatgaacttgagttcatctttagacactttccctattttggtaactttggcgttgaagcactggatgtagcttcacaagctttcttgttctcctttcttcaccttggtgatacttgtgataggcataacataatcacatgcaacttgttgttgttggagaaattctcccaaaaatttcttccaggatgtgatggttctcgaacctagccttttgaaccacttatatgcagctcctttcaatgtgatcacaaagcattgacaccttgccttgcatgacacttttttttttatcttcattagctcattaaaagctccgagatggtacttcagatcaggtgtaccatcatatggtgtcatacgctactccttaaaattgggtggaagtggttcaacttcaatctcccttgagaaaggggattcttcatcaaactcatcatcatccaagtttcccttcgaggcggtatctatttttcaaagtaggtcttgcatttccgcttccagctctttcattcttctgctcatcctttcttgggagttagcgagtggaacttgggtcttctttgtggtttgcatagggcttgcaagagatactccttttgtcccatcagcatgttacttcccaccaagactgaaggataaggctttacgtttactttggtcttaggcgggggccataggcaagatgtcccctagcacgagaccctttgggcaagtctcttcataaggttatgggattttttcctcagtgaattcttcttatggtgggtaggcttgagttgtctcaaatgacccatagggtccttgtcttgcgatgttctcgtccaccctcacctttcggggtgctataagtagatgacatggagtccacttcaccaacatgtgcggttgggacctcgtgctcctgctggtggattttgtactgaaagtgtgaggcttgggttttgcccttgagtatgccactcaacaccttttgcatgctagccaccatagtttatagcctttgattcttctagcagaggttgtttatctcctcttcataatggagagtttgggatcttgagctcatcgagtacacttgctttttctttctgggtccacatcttgaagtgtcgagatcttgtggtatagatggtggagggtgtcacatcaaagatgaccttcccaatggttgaatgattccattggtgaggttagccatcaatattgtcgtcaagtcatgttgtgttgggagctctttttgagcaatggcttggtggttcacgctttgattattctcccattggtattcttaagcgatgggaggtgttgttgggttttatgccctaaataaaactttatttcattgtaatctttatcttttaaatatcaataaaagaaacaaagtattttcatcactttgtatgtcatttggttcatgtt

SEQ ID NO: 37089 - DNA, 6152 bp, Cannabis sativa
aaaaaaaaataataataatcttttgtacttgaatttttttgagaacgattagcaataatacaaaataagcgatgtcgaataatgcataacaatttaaaaaacaataatacaatattgcatggcatcacaaatagaaaaacgacacaattgtagaaatacgacagttacaaataaaaacacggtagaagagaaaaatagaaaatgacaatatcttccctttttctcttcttgagataactttttggagcactttggatatttttacaagaagtaaaatatatagggtggattttgtaaaacttttctttctaaatttttaaaacctttaaattacaatttttatgtttgataattgtttttgaaaaattaaaatatgtttgataactattttattattttaaaaataaaaaagaatgtggttggtaacttctatttttattttttgttattttatttaaggagatagaatataaagtgaggtgagtgaaaatgaagttgaatattgatgagaaaatacaaaatagattacaattaaaaacggttaaaaagaaaaaagaaaattgtttaaggaaaattgaaaagtagtttattcttagtttcaaaattttggttcttcttttgaaaaaataaaaaatgaaaacagaatcaccaaacattttttttaaaacaaaaatatattttttttttttgagaaatttcactatcattataactggtaatcgcttacaataacagagaaaataggatttgggatttcacccatccaacagacatcttcatccaactcaagagcatactttgctaaaccatgtgcagcttggttaacatttctcttaacatgagaaatagttactcctgagaaaaaggataaaagacagctaatatcaacaatcaaatcattaaaactagaaaggttcgaagaggtagaattgagggccgaagaaacacgcaaagcatcagtttcaacatgtgttattgataatcgcatctgtaagacccaatttacactatgaaacagcgatttggcctccatttcatcggaacgaaaacatccttgaacattctttgatagagcagccaccacattgccatgatagtccctaatgatcgcaccaatccctaaaatctttaactcttgattggctgctgcatcgacatttaatttcagaccagaaaaaggtggtggtgtccatggtatgaccctgggagtaccgcgagtcgactgaacatttggagcagcaggaggttgactgctacaggttgtagcttgctggttttaaaacaaaaatatttaaataaatgttacaaaacacatctataattacaaagacaatatctctagaaataataaatagacttttcaaaatacctgttatacttattttttggactattaatgaacaagttaaattgtatgccacatgacataaatgatatgcgtataaataacaatttttgcaaatatcgtgggataggtcgaatgaactcaggacttaacctgttaagcgatctcatctaactggatcacaaaatttatgaagagaagtattttagcattatcaggatgttatttcgataaaacattcaacatctcataatacaaagatcttgtagtggctcgtaatacaaagatcttgaatcactttataatacacagcaatgatgcataacctcgtattacacaacaatgatgattcacctcataatacacaataatggtgaatcacctcatattacacaatagtgatgaatcacctcgtaatacacaacagttattaattacctcgtaataacatagcagtgatgcatcaccttgtattacacaacaataataaattaccttgtaatacacaacagtgatgaatccaatcataatactcagtcagtgataaatcatcttgtaatgcacaacaatgatgaatcaccttgtaatacatgctcaataatgtatctcctcctaatatacagtcaacaatgcatcacctcatattacacacacaacaatgcacctcatattacaaattacttatgaattaaattttaagtaatactttgagtccactatatttatatgtgtaaataaatatgacacccagagtatatgtattacaaattacttatttaaaaaatttaaagtaatactccaagctcaatatgcttataaatttaaacaagtgtattagtcaacttgtgataattaactaaacaagcagacaacactgcttcaaaggtcagataatacagttagcatattaaaattgttatgtagttcaacgaacaacttgtactatctcgaaagactggagagataatagatagtaataacttcttaattctaatcgtaaatcaaaaaaagaagataattttttattcatttactaataaaaagatatcttctttaagttggagatatgtcataggcatattttattttggtcatacatcatgcttagtccctcttcgtcacagcaactgacctagaaccaaagatgttttaatcacttgcgggcatatatggcatacaaaaaataataatgaatgaataattgataagaacagcttaaacaatatgatgttttgtttgtttattcatgtactcattcaagagaaccaaactcgtcacttattcatgaagagtaaatgaaaatagatcaagacattctaagttgttcaaagatgatcgtattttcatttggaaaatgagtagaccaagattttcaacatgaattattaatttggtatatgaaaacatcaaggcccatgcatctggtcgtagtacatattcccataaatctagtcacagtacatactctcatggttatagtacatactcttatgcatctggtcatggtacatactcccatgcatctggtcgtattacatacctacatacatttggtcatagtacatactctcatacttctaattgtagtacatactcacatgcatctggtcgtaattccccatgcttttggtcatagttcatactcccatgcttctggtcatagtatatatttctcatgcatctagttgtagtacatactcctatgcttctggtcgtagtacatattttcatgtttttagtcgtggtacatattcatatgtctctactcaaaatacatactcctaatgtatcagattgtagtacctactccaccatacatcaatcataagaaacacaaacgagatgctcgtaatacacatgacgcagtacaagtaacacccaacttgtatgttacaaaacaagctacttagagtggtgtcaaaaagaatgggaaggcaatgtataataagtcatctttgtgtaaatcacgaaaaactgacttaggggacaattattatagctattttttggactattaaagtacaagccaaattgtgggccacgtgacataaatgatgatccatgtataaataacgattctaacaaatacagtgtgggataagtcgaataaactcaagactcaatctgtgaagcgtcctcatctaaataaggatcactaaatttatgaatagagttatttcactattgtcgggatgttatttcaataaaaatatgttgtaatacaaagatcttgtagcggctcataatacaaagatcttgaatcacctcgtaatacacaacagtgatgaatcaccttataataacacacaagtgatgcatcacctcgtattacacagcagtgatgaattccctcgtaatacacatcaatgataaatcaccttgtaatactcggtcagtgataaattatctcataatacacaacagtgataaatcacctcgtaatacatgctcagcaatgtatctctttgtaatacacagttagcaatgcaacaccctgtatcacacacaacaatacatctgctaaaatataacatggtttgaccaagtcaaagataacttctttgtattttaaatataaacagttatttatacttatctaaatgttcatttatatgtgaaataaatattataattataaaataagattataatttttactaaaataagattgagtaaccaccatcttattcatataaataagggttcacttaaagggattgggggaaaaatttgattcacagagactatgccaaattgtaaacacaaccaaaactcagaaataatattaactcgtgaagtatgtagatttaagtacaaaattacgtaaaaatattgggagttcatttattatttttgtctcttattttcttgactttattctctaattaattatcttctaagattaagttgaagaaaaatcacatcaataagttggtactttcattgagagattcaataggaagagattaagatttatcaccttcacaatctcaactatgaaattaattaaaattgagattacagtagaaccctcttctattaatcatcgtcaaaatatgcaagaagtaattttaaaatcttgcatacttcacataacatcataaatatatataaatatatatgtgaagtatatatatatttttggccactaaaaaggtatacataaaatacatacatatatatagagaaatactgaatggtgtcaatattttgatcatcctaatggcataaacaataagaagtgactttggtgttcacttattggttgttcaagtggttatcaaaggatatatatatatatatatatataaatgtcatagagccaaagtgggacaaatgatagaatgagaaattcttgttcactcatatctccaaaatgcaatctgcttgtaattattatttatgactgttaatatatcacacaagcatgagttgttcaaacaacttctcaaaaagttctcttcactaaattcataggagacctaaccaaaatatataattttatatattgacatgctaattatgtctagatagcctttgagtaccaagtagaagaggccaacaaaacttggaagatatgcaaaatatggtcatttttacactctaacaaaaagagaagtagtggccaaataattatgctcaaagataaacaactagtagataaatcttctcgtagataagtatgctcataaatctattcgtagataactgtgctcagagatgaatctactcgtagataactctactcgtagataactctgctcgtagataactctgctcgtagataaatgtactcagagataaatctactagtagataaatctgctcgtaaataagtctacccatagataactctgttcgtagattactctgttaaaagattactcaatcttcatgaagttaacccaatcttctcgcttagataagaaatggagacacttctatagtgaatattccgcggtacgtagcgagttgaacctcaacaaattaaatttctctttgctaggggacatgcccaaagataattaattaaagtggtcgcaattgtagaatagaacttctaaattctagttgctaccagaaaaagaagacatcttcaaattgtataaacttctaaattctagtcgcaactagaaaaagaagataactttgaatttaattataaatataaaaaaaccatgtcgtgagaaaacaaaattcacatgaaactttaaaaatatgaataaactagtatctaagattctaatcaacctggtccataacaggaaaggttaaactagttacatagaaacgaaaaagttacaaaatgtgaaacttatatgagcatgtgtattataaattgcttaataaataggctttaagtaatacattaagctcatcgtgattatactaaataaacatatcattcagggcgtatgtattataaattatttatgaattaagttttaaataattctccaagcccatcatgtttatacgtattaataaacatgtcattcagagcatctgtattacaaattacttatgaattaatttttaagtaatactcctaatccaccatgtttatatatataaataaacatgacacttaagggctatttggaatgagttaatactagcaaaagaaatggtaatgtgaaacattacgttttgaggatttaatattgtaatgttattcccttagtaatataagagagcaatgttgataccttaaaaagaataggattggattattccctaccattatattaatttgaataaaatttttgaataaataaataaatttaaataccattaatattttgat

SEQ ID NO: 37090 - DNA, 2495 bp, Cannabis sativa
ttacagagtcaaattcagatgagattatggcagagataaaatcagattcaaaatcaatttaatgtatctattcgtactttgagaagtgataatgccaaagagtacatgtgctcaatttcaattataatatatataccaaaaaattatgatttaattgcatatatattattgtgtaatactaatataaaacaacataacacaagaagaccatcctggaaagaaactacatcatacctctttttattaatttttgtatgcattttgtttttaatctgctattttcacccgactctacaatattttatagaccaaaaagtcatacaatttctatgtaagttcctagcctaggagggcctcgaacctaaaacaagttcaataacatgttaagaatgaactttattataacaggaataaaagaaatattttacttctgagattagacaaagacaatcaaaccatatgtactgcaccatagataaactcaatgaaaaaccagttcctgaaagcaaaatccctcgtactattttcttccaatagtcaaaattggttggtcatggtagaaattcttgaagtgagtttgtctccgtgcaatgtaaccttccaacaatctacttggagtataaagactgagacctttttcggtacaactgcaaataatcctttaaaatgttaggaattatagtagcgacaccatagctcctccaactatttcaagaatagaaacaaaagacaccagttctatcttagttttggatggttttaaataaaattggcatcggaaacttaattagaaatgctcaaaccataacctcaatgcataaatttttcctatcaaacagaccaggggcattacttaatgcaaggaactttggtgcctaatgcatagatcagacctgagcttagttactaattagactgtaaattacctcggtatttgttatcttgtgtaacaatcccaaatgtttctgcagtttcacgaatcatgataccactcactccagtgaaagcagctattttacactgggcaactgagaaaagaaggcttgagtaagaaacaagagaagagatatgcaaaatatagtaataacaaatactaacatgaaaagtatatattggtttagactgtttaagatcaaaagtagaggcatggtggtacaaacaaatatatactatatccatacaaagaaagctcatgacctaaaataatagcaccatgtaaatccgcatccagaagacactgagccaactgatttttcctgtaatgttgaataaaaataccattaaaataacaacttgtcgaaagaagaattgaaaactaagttagcatcaatatcagcgacagaaacccacccactacttttaagaagttgtgtcatgtaacctttccaaagctcgtgcattggtttaaagttttcaaatctgcaatccatacacattaaccaaatgaagaatgtaaacttaagccaaagattgcaaaacaggaaaatatatacatgcacttgtcaagagtgagatgtaaactcacttatggaactcttgaggcaaatcaagtgacccatgttttttatgttgtttcatggacatgtgtttttttgaacgctttgagtgcattcgcaaagctcttatacgagaaccagtagatatacttcgtccatggacataattatccagcagaatccagttgtcaattcttttgtttctggatccttgcatgtacttatgagctgaatcaccattttgaagaagttcatgcaaaatatgatcaactttgctttcttctctgctagaaatctacattacaacaggcagaatgttacacagaagctattaacggaaagaagttcagtgcaagagatccaactggtttagttcaaagccaatagcataccccctcaatattggttgtcaacagattctcatgtacggtttgagagagttttatgtatgctttatcatttttatcgacctctgcgcaaaacacaccaacatagttatctctctcattctctttctataaatatatatattaataagagtacaaaaaatatacatagctaatatacaatctttcttctcttcaaatttagaatagcaaaactagtgcaataccttctgaaggagcatgacctgagaaggtgaaatttcctgcagacaagtaaggtttgggtacaattaggttaatatgaatattaagctacaccaccatgaattttttatgatgttttaaaaggaaacaatagaaaccagtaataaaagtttggattcataaaagaccaacctttcttagaaggggctatagctgtagtaggagccatagaagaagaaccaatacatctaggctcttttccatattttatatcctttttttgctgctgaacaacaagatcagctttcgcagctgcaaaccttcgctctaaggccaccaaactacgcttcatttgatctcgcggagttgtgtcactagacatggaagctacaataatagtttaaacttc

SEQ ID NO: 37091 - DNA, 4588 bp, Cannabis sativa
  modified_base (4523)..(4524): a, c, t, g, unknown or other
taattataaaattgaaaattaaaagcagttttacagaacatgtttttgaaaaatattttcactttttcacttttaaaaacaaaaaattgattaaaaaagtgttaccaaacgctatctaatataattacaatttacattttccgaaacattaattatactgtgaaatttctgactcaaagaaaaatcaataaagaccaaaattaatagcaatagtatactaacagagagattaaaagcaaaggacacatgtctactttttattagtgcgacaataatgaaacagcaaaaataagacagtagattaatattcgtagagaaggagaagaaacaaattttaatttatttaaaaaagtataactcttagtgggtccatgtaaaaatatataatatatagtaattaattaattttttaaacaggatctaacatatatgacccctattataaaaaaaattaacagaaatatatactaaaagatataaagttcaatataatttagatattactaatcaatggcaaaaacatacctctaataacaatgtttgcaattgaactaactagaccaaaagacaatatagtagtatattactacagtgacggaatttttgttacaatagagaatataatttttttgtttcagcattgatacaagtgtaaattggctggagtattatacaccttactattactgctctagagcaattcgacagaagtgtaatatcacaattcacacacaatatgttacatgcattttcaaacattcatatatacaccatctccatttcctacaaaaataataatacgaatatttcatatttgctaagcatggagatcctccctttgaaaaaaaaaagcatatggagatccaaaaatgtcccactgaatattattatattaattaactgaaggtataatattagatctatgatcgaatagcataaatcttttaattctatttgctgcgatcttcgtgaatagtttagaatagaaaaatgttaaacgacactagtggcgcctaaatcttcttatgtgtcaatattactattagtctaactaagtataaggtgacatatagtttaatataataatttttaggaagtatcactaactaatcgtaatgcaacatatcgagaaagtgctaactacttacggaataacattacaaaatttttaatcttttgatggacgtgagcattaatcttttttattattacagcccattttccaaaaaaaaaaaaaaatattgtattgaataaaatatactgacttttcctgtgtgaaaaccttggctggtaaatataaaagtacatacacaaccttttaaaagattaggttgagaattgttggagaaaaagaagaggttctctggttgatttagaaaaaataattatacatatatttgtgtattgtgtaattaaagtgaataattatttagagtgactaatatatatattcgtgtaaaaattaatatcatatgtcccaaattgaatcatgtagtatttcgtcaaaatcagaaaaatcaacgtcttcgtttaaacgcacatgatgagacgaggagtagaagtagtactgatcactccccgtcaacggcgccggcgccgccatttgcatccacgtcatctttggggaatccaacggcgactcattaatcgcctgaatctgactcggcgaaagccccaccgtcaccggcactgagtaggactcaccactcttaatatcagcattaccagacgacctaacgtttaattcgttcgctcgatccatcatcggctcctcctcggcgtgctcctgctccctcctgaaccgcattgcggcttgctgggccgccaactggacatcctcgggcctagatgtggcgggccttgggagggcttcggccagctcggggaagttaagccgagccgcacgtcctcggaggtggagcgctgccacgtcgtatgcggctgcagccatctcgggagtttcgtagcttcccagccatatccgggatttcttgccgggctctctaatctcggatacccatttcccccactttcgcttccggactcctctgtacgacggtgccacgtgtccgtactcggattctagtactacttgttgttccatttttaacaatcgcgttctcagtttttgttatgaagagaccactttaaaaaatttctcaactctcaaccatatatatatatgtatgtataaacacacgagatgtgatcgattaaaatttaataaattgaaagataaatattattataattcagatgatgaggactggatgagtgagcttcgcagcagttacacgtatattgaaagttgaaagctgtcaatgaatgaacacgtgcatataactatgcattatattatataatgcagtcacatcataatctttgtaactatgtatattttaaatttttcttcatatgacgcaattgtttttttttttaaaaaaactttttctcttgtgcagtagccatcaatttttaagtttcataaaatttaaagagtaatttccataaatatttaagttttatgccgagtagcagataaatacttaagtcgtatttttggcggtaaaaatactttttgtcacacttctggaacttccgtaggtacctggtcgttaagtgccagatcagtatctacgtggcaacattatattggtccagatcatttattaattatattttatttaaaaaattatttgaatatttcaaaattaaataaaaaattgtttgaaaatttaaaaaaattacaaaattattaaacagaaaaaattaaactcaaaataataaaaataattctttttacaaaattattaaaaaaagaaaagtctttccaaatccatatcagagaagaatcatatcatggcttcttcattcaaaaaaaaaaaaaaaatatcatggcttctctcaataacagatcaacaaagcatatcaagttttcaattccaccacagagtggtttttggagtgggacaacgtaaatggcattcctcttcttctttgtacataattcttctgggttctttttgggtctcaaacccagaaataagaatctaaacccaaaagccagatctaaagccccaaaagccagatctaaagcgagagaaccattgagagcgttgagtcaaagagagatcacctgtcggaatccccattcatcatcttgttcttcttcctctcatcattttttttttccttctcaccattagattagacctgttacaccacaatccaacctccctcttttccccttttcctattttcctctcttcttcttcctttttctctcagtatccaaatcctagacaattaaaaaaaatcccaaatctatcatcactcaagagatctaccagcgagtaaccacaggatcgaagtcagaagcatgcggggttgaaagggttagtgagtttcgtactgggaatgaggatcgacaagccgaagaggagcactatactggaatgcagatcgacaaggttatctaaatgtgatttgtttttacatttacattgagaaatatgtaacctttgttaaaaaaaaatccctctgtttgcaggtgagcttgaatttttgggcatttgggtttatggtttgtgttctatttctgggtttgagtttttaattccgggtttgtgggtttggctcggtcatggtcttaattgatattttttctttacctttttcattcaaggctatagtttcggggttttactttagatttggttgttgcctttgtattttgtttgtaatatattttgatttaggatctgtataaaatttttgttcttggcaagttctgggttttaggtttaagggatgtgttaaacaatctttttaatgtttatggacattgtcaattgcatatttgggtttctttatttatttttgttttgtttgttcaaaatttgagtttgattcaggtgtgatgatgtatcactattgatcttaaatttgtttcaaaatctgagaaaagaatagaaaaagaaataaatgaaaaatccatttaaaaaataaaatacttatttaagaaaaaaagtaagaataaattttttaggtttcaaaatatatttttatttttttttatatattctaaataatttttttttattttaaaatgatttttaaataagtttaaatgaattttaaaatgaaaaataaaaaattaatgatgtggaccaatgcgaagatgacatgtggacacttacatgtaacttaacggagaggtacctacagaagttctagaagtgtgacagaaggtatttttaccgccaaaaatacgacttaggtatttatctgttactcggcataaaacttaggtatttatgccgcaaattactcaaatttaaattattgattttgtgattaattttatgttaaataagcaaatgaccagaatgccctcttacactccgtaccggatatgattttgaaatcgctagtacgttcctcctagtctctaagtgaggctgtgacgcctttgctccgcttaatcgacttcggtttttagttgtttttgttgggttttatgnnctaaataaaactcatttcattataatcagatttacttattcatatagatcagaaataacattta

SEQ ID NO: 37092 - DNA, 4260 bp, Cannabis sativa
tttttggggttttgaaaaaaaaggtatagtttttttagggttttaattattggtttataaatcaaattttttgattttctaagcatagaaaatcaaatttcccttttaaatcgagtacttataccattagccttggttcataattaaatcaacaacatataaaataatttttttagtgttagattttaaaccgacactattatacattattatatttattctacataaaattataaatttatttaaataaaattattagagaatgaaatatttgttttaagaacctgaaattcatcgggtagtttctcaagctggctaccaggcatgacaagatgaacaagattgtgtagtgtaaatttggatcccaaagatttcaaagggtaggcataccattcaagatatctaagctcagaaggaaatgagtgtagaccatgtggaagcttgaatggactcatccaaacactctctgatagaataagcaattttagacttgacatcttattaaaaactgaaggctccatgttagtcgtctttgtgcccgatacaccaaatattcctttaatttttgaagtgccctatacaaagaaataatatattatgatgctataaatagatactataaagaacagttatatttattgataattttttagttataatataatttttttataactaaatatgatttttagccataacaaaaaattacttgtaactaaataaaatatagtaaaaacaagttgtcactaatttacttttaatcacaataaatattttaactaaaaacacatttaatcacatacaaattatgattttatcaccaatacttttaaccacacaaattttttagtggcaacataacataacataagaataataatatatatatatatacactaaacattagtttgcctatatatatccaaattggttgcacatatatatattaatttaaaatataatttttatgcactgtacttttctgttgtagagaagaataataaagtatgaaaattatattattaggaaatatataaaaaataattttgaatatatttgtttctatgacacaaacctctatgttgggattataaaattatcactagctaagaaaaagtagtattttttagagattcatgaaaacaccccacaaattataagtccttaataagctttttttttcagtcaacatatttaacatgtaaaaaaaatacaaatgtaaatattcactaatagttagtatatatatataaataaatattaacatgcacttaccatgttatttcccaagacttggcggatatctttattcttccatagtctattatagtttttcaaagtattatcaacatctaagccacgaacaattgagtggcccatttcttgcaacaaatcatgcatttgaagtcgatcgaaatcatgattattataatcatcaccaagtaagtaatacttagatctctttaccaaacacttatcaacaagaacttcaatagccgcattacaagaacaataacaagcatccaacacttgtttcacatcatcttccttttttcctcgaaaaaaacatgcaatatcaagaaatatattcttttctataatttgtagtccatcaaaacttatttgcaaccttcttaggattccttcatccggatattttttcacttcctttaaaaaatcttcccatacttctcttctcttcgaatataaatgacaacccaatatttcaatagcaaggggaagacctaaggaataatctacaaactttttcgaaatctcaacgtaactttcttcgacgatttcctctttgaaagcatgcaaatgaaagagttgaagagcttctttcttgtttagtatgtctaagtggtatatcatcttctcatgtctaattatatttcgaagcaattgtccatctctacttgttatgataattttacttttcaaatttaaccaaatggggtaatctttaagcaaagaattaaattggtccaacacatccacatcatcgagaactataagtagctttttgtgatgtaatcttctctttacataccctaaatcttcgaaatcgagatctttctcctttgatagtctttgaaaaaattgctttgccaaataagttgatccattttcttggtattctttcctaacatctttaaaaaaacaatgaccatcgaactcatcacgaattttttcagaaatgacttcagctagtttggtttttcccaacccacccattccacaaatccccaaaacttgaccattgtcattagttgataacagattatagagatttgcaacagacttatcgattccaactaaaccttgacttaaataattatcactaatcgtggtagatgttgatttcaatttctctcggatataattgagaattccattcactaactcagcttcattcctaaattatatatacatatgtattagtgaattaatatatattgaaatttaattattatgtgatcaatgaagatatagtacgctttcacatcaacatgtagataattgtaccattcaagtataatattttttgtaaaaaatatgtatatattatttgcggtaaaacttccttatgttttaatttttatacacataacctccttatctttttttctttgtggcaaaacttccttatgtattaatttttgtaggcttaacctccttattatttattattttttttttttgtagaaaaaccaccttatgttttaatttttatatacttaacctttttttttttttgtggcaaaaccccccttatgttttaatttttatatacttaaccttttttttttgtggcaaaaccccccttatgtttattttttttttgcaaatttgacacgccagttaaatattaccattaaatatcaactagatgatcactgtatacacctgtgtatatttaaatttgcaaagaaaagtaaatttaaggaggttttgccacaaaaaaaaaaaaaaagataaggaggttaagtgaataaaaattaaaaaataagagaattttgctaaaaaaaataaaggattaagtgtataaaaattaaaacataaggaagtttcgccgcaaattgctcaaaaaattaaatgatgtgtcaattggtaataggtggggataagattgggacatacaaaatgggataggcgatttttattcaatgaaataaaaaacatcaagaagcatgtgtaatcaacaagtcaaaagccataaataatttcatgaaattaaaaaatgaagcataatatatataactaattgcatacttgaattgtgatggatgccatccagcaagattagatgttgttgttagagcatccttccatttttgtatgatagtatccttgaaacgctttttatgattagcaaacgcgtctgcatagcttcctctttgtttgcgcacatcagatggatcaacatggtaaaacacaggcaaaactatttgagtcttcttcttcatacatccaagaatatgtacgagctcatccaaacaccacgacgatgttgcataattttttgagaaaataacaatagaaaatttggaattgtcgatggcatccaaaagagcttgggaaatctcttgtccctgctcgagtttatcatcaatgaacgtttcaattcctccatccttgagtgcttgatagagatgagtagtaaaggttttgcgtgtgtcttctcctctaaaacttatgaaaacatcaaacttcttttgagacgccaagatggggcgttcgtcatcatcaacatctgttgatggtggctctagagaaggcaaattatcgcgattgatatacttcttccataggaggattgtgattgagataacgatagagatcatcactgataacgttgttgtcaatggagttgagatcaccattgatataatcaaaatgaagattggaagaacaattttaaaatttgtgaagatcatcatcatcatcatcacaaggggagagagcgatcttgaataaaattttggtttgagaaaaagaataaatagtaaggtgtatttttataaggtaaggtaagcaagcaagtggagaaagtactctttatcttttgttttggctaagtatttccatatgaaacttccaatccattaccttacaattattgaaaattgtactataaaaaagaaaaagaaagaatgtgaatcggacaattcaaaatgttaatctcatctcatacattaataatacatataaattgaacaaatatccaacccaatcttattattattattaattatt

SEQ ID NO: 37093 - DNA, 3549 bp, Cannabis sativa
tgaaaacttaacacaatatactgttgtatgaaacttataaaaaaatacagtgaaaaagtaaaaaatactatctgacagtatttttataaaaaaaatagcaaaagtagtataccgtgaaaatttccataaaaaaattctgtatcaataaaactataaatattacccaaaatttaacatttttgtaataacttgaagaataaatgagtacacaaacttttccattccatgatagataacaaatcaaaattgctcaaatctcatctaaaaggttgttttatcatcactattcctttttgaaaaaaaaaaaaaagtatttgtatattggtatgagtggagatgtacaaatgaatcaaaaaactagtctcatcgaggagccaatgaaactgaaaagtccataggcatcccaatcttctcagcccaattcttggactccaaaaacagcatcgaaaccaacccagcaacccgacccatatccggtcttctttcaggagcttcttccacacaatccaacccgacccgaatcatcttctccgcaacttcaactgggtacgagtctctcatccgcccatccacccactttctcaactccccaccttccaccgcagcacgcgccgtctctatcacgctcacgcgcctataaccaccatcttcaccttcctccactcgctggtatttcaatggctcctctccggagagaagctcaagcatcaccactccgaatgcgtacacgtcgcacttctgagacggagtccctgttaattgaaactccggtgccatataacctctcgtaccttctagcttcaatgcccgactcctcgactttttcggattccttttaatggcggtgatttcactctcagtttcaatggaattttctgaatcggttaccacttcgctctcgatctctccgcaaagctccgaagtaccgaagtgacagagcttcgcgtttatcgattcctcggagacgataacgatgctagaactcttgatgtggttatggacgaaattggacctcaatccagagcagtggtgaacgtaatcaaggccgtgagccacgtctgtcgcgatctgcattcgtgagagccaggtcgagagaatcgtgaagctagggtttttagggtttctaagacaatcagcaaggctcgctccgggaacgtattcgtaagctaggtagatacaatttccagagatagatgcaccaagaagcttgatcaagctattatgatggcttctacaaatcgtcgaaagccggatctgaagctccgggtactcaattggacggcgaaactttctctgaaaaacaattacttcctttcccctaagaaaacaccgccaagacgacgaagaagaagaagaggaaaatcgattcctcataaaatttccggtagcagaggatatgtcgaagaagtcatagatatgaggattatccggtaaggaggctttgattccggcgagagaggcggagctggaaatggaggagtaagaggagcctttgtagctcgaaccggtggtgaaattgttactggtgagaatgttggagttggaggaggagggaccatcggaggagagccgcggcgacgatcgggaggctcgcggggttcgctgtatcttgggttcgactacatgggtactcttcttagacttgcacatgagtacacacaaattgattaagcacaaattttgatctttgtgatggtgattgttgccaacaataacatacatatcaaaattgaatttttttctttttttttttgaaaaaaatcaaaattgaattcagattggtctaattttcagttttaatttttgaaatatttgtgttctagatttgaatattggaaaatttatgtgtatatatgatgtatatttggagttgtgaataagagttgattttttcaaaagaaaaaataaatatattggaattcaaagtacaacatttttgtgaattgggaattgttttttttttttagtagcaagaaaatggcaatgattgataagtttatttattacaaacatgaacattaattaaaaaatattagtttaaaggtacgtgcacacaacaaattgacaaaccatgttccattgttcttgctgtcaaagaatttttaaagagtaaagaagtgaagagtcagtcaatttttgactgtctttgtcaagttggttgtctactgcatttttgatgactggtattagtactaaattagtaaattatgtaataaactattgtgtctgatttttttcatttttgtttatgtaaattacagtgtggattgtgtatatgaacttaaaaccctggaatacaagtggcatagcttgtttaacatttgttgaccctcattattacaaagctaatgctatttaaaaataaaaaataaaaataaaaaccctagcaacatgaattggctaattaaaaacactctcaaatatctggttttttttttttttttttagctgaaaactacaacttcactaagctaaaacaacaaatttagtgagtacatgggactcacctcccaaaatttaagcaaaccattacaagcatgagtcagaccacatctcgcaagagcatgggctgtttcgttaaacacacgcgaaatccaactcaccacaaaattaccatccatcaaagtttcaacaagattattaaaacaaaacaaaaaaaaagtcccacttcagagcttgacccgccaccaaagactgtaccagctgaaggttatcgaaaaagaactctaccccctcagcatggagatccaaggccaaaagagcaccaaaccgcaaagtctccatttctccttgcagcaccgaagtaacaaccatcttcttggccccagcagctttaacagccccaccatcatctaagaacacatctgccaccaccccgactccattagccattgcaaaatccacaaatcctctaattctccctagtcgaggaagcccccaccgaaccctccattactcacctggaaccagaaccaggaccaccactattctctagcaatgtcttaaactccttgtaactctcctccactcgcttacgcactaaatccagctccaaaactaatcaattatgggaaatattgttctacaacctccaaaatttatgtttatgatttatattttttttttgtttttattgtttaacaaatagaaaccggttctcctactatactggaaataacattgatcttgccacaaaagttaaagtgcccattatgaaatgagcatggcaaattagagtaagtgttatgtttttatagaaactggttttaattcattccttttggtcaattatgttaacggtgtttgatggaactagtttcagtgctttttttattaattaatgtgttattttttagttgatgttaatgtaatgaaactagtttagtattatttgtttgttgttggttatagtgttaaaagtttagtttggttactttgtagcattactatattttgtgaattggttaaaaccaattttgtatgatgaatgtttagctttgatataaactgtaacaccctaactaatttaggcgtattacgagattttta

SEQ ID NO: 37094 - DNA, 5260 bp, Cannabis sativa
ccaatcctaacaatttttgagcttgtcccacttactgaatctgcagctgattacacttctctggtttacaaaggttgttcaaagcaagttttctcagatccaacaggggtttactcccaaaccctttcagctcttttgggttctctagttcaacaatcatcaaagaccaaatttttcaaaacctcatctgggagtggccaaacctcattcactggtttatttcaatgcagaggagatctaagcaatgctgattgttacaactgtgttagcaaactaccttcaatggctgacaatctctgtggaaagacagttgctgcaagagtccagctttatggttgctatttgctctatgaagtttatggctttgctcagatttcaggcatggaaatgctttacaagacatgtgggagtactaatgtggctggtactggctttgaggagagaagagacactgcttttaatgtcatggaaaatggtgttgtttcaggacatggtttctacacaacaaactatcaacaagtatatgttttggctcagtgtgaaggtgatgttggtgactcagattgtagtgagtgtgttaagactgctgttcagagatctgaggttgagtgtgggagttctatatcaggacaaatttatctccataagtgtttcattagttatagttattatccaaatggggttccaagaagatcatccctcttctttcatcatcttcttcatcttcatcaggtatgttatatatataaccatggatgaaatgaaataaaggttgttgctttatgatgttttttgtgtttatctgtaatggggtttgaatttttttgattgattcagttggtggagcaaatacaggcaaaactgtggctataatattaggaggagcagctggagttggatttctagtcatttgtatgttgtttgcaagaaatttgatgaagaaacatgatggtatgtaaaataaagattgaatctttttcatctctttgttttgaatttttcataagaaagatgaaaactttggtttttgggttataattctaatgcagtcattattggaatatatgttattttgtgcagatttttgacagagaaaaagaaaaaggaaggaaacttaaaagaggcaaaatagctattttgaggtggacatttcctacatgagtttctgaatttctttctctttttctttttttttctttctcagaaggaaatggtgaaaaaaagaacttgtcaaaattagggggtgggattaggggaagataagaagaaatgggtaattaggggaagcatcaaattaaagaatttttttttcacaaaggtgaaaattcttatgtaggaatgaaatgaatgttttgtaaaacttcaattgttaagaaaaaaagaaaaaaaaaatgaggaggatcttgtattgtaagttgtaaaccatggtatttttgagttttttattttttaattttttttcttatatatatatacagccaataaggccatgtgggtgtgtatgtccttttttcctattctccatactatattacatattttttttttaatttttttagttttcttcaaaacttttttgtttatgcttttttgaaagttgtaaaaatctcaatctcctcaaaaccagagagagagtgtaacgcattagctcacatcacactcattcactaaagactttatttttatttttgttttattgatttattgtttttggttgacaatgactgtagtctgtaacacattataattattttcaggcaaatctttggataggttgatagggccataaacgcataccaacaacaaacaagcctatgatctaatctttttgacctattttctctccatttttaatttctgtaattgtttaggttgttattagttaaactcaattagttgattaataatacaagatggtgcttcatgtaatttaaatcggtatttaacaaaataaaaataaagggttaattggttaactaagataactagtactatgaagtgtcctataataatttttattaaaataaaatgagtgggatttaatattaaattgtactaatcacaatattacacctttgaggtaactagttatttaggatatgtctatattacaaaagggttagaaaattttgagtagtttacaatgttgtaattaaggtttaaatattttgttgtatgtgtaactgttttttttataagcgtggtaagtaactatttaaatcttatttttagcactgtaaattatttgaaaatttctaaaaatttacaagtagttctaaataactacaacgtagacaattataaaaaaaatagattaaatttttttttagatggtgaaataaatagggagtgtactatagaaatttccaaaattcccctttaagggggtgtactacagaaaggtaacgtcttgccaataattaattttgtaaaaattatttaaattaaaatatgtgaaatttaatatttaactatatcaataaatagaataattcatcatggtgttgatatagggtggggggctttagtatttctaattttctagagcattcattttttcaaatgaaaaaaagaaaaacaagacatactcaagtacatgatcttttctttttagtatttggttttaaattcaatttaattccaataatgtatcatctttaattattatttaatgaacaatgttgatgacttttgaacagttttaattgttattaagaaaacataagagaaaaagaaaagaaaattgagaatacattaaaagagatctattttgtttgagtattgttattaggtatttcatattgatgtattgcattataagtagttaacggttctacatattatttattaaattaaattatgcgggatttaatattaagatgtatcaataacgatatactatctcttgtggtacttgacactttaaattgcctcttagcatttttttttttcaaacttgggatgaatgactgaaacagtaactaataataagagtattgttattgtatactagtaatatttaacacaatttaaagatgacactttataattagttagcaatattttttaaaaattattatatgatgaagagcatgcaaggcaccacgttgttacttcggctactttagtagcaaatatctaaattacaacatttgtcaataataataattaatattataaaagtacaaaaatatttatgaagatctcttattataaaaatgttgttagtactacggtgattttatgtttatttgtttattatcatgtgtatatattatatatagatttggaaaaaaggtggacaggctagaatagttagcaattatatttagaagaagaaaaagaaacatcactttgtttgatttttctattaacccaccattcaatttatttggccatttaatttaataatgttatactttcttaataatattctaaattattagtggaatctacttattaaactactgagtttaagaacataaaaaaataaaaaaatgacaaaaagaaaaaagaaaatgcaattaaagaatttttttgctatgttttaattgattcctactaaaaaggaagtattgttattgggtactagtaatatctaacaccttttataggaaacgttttacgattaattaacgatatttcaaaaaaatatttttttaaattatatgagatccgatacttaattacaataataattatatgacactgaaaaaaggtgttagacagtaatagtattttttagtaatttttatttgaaatataatattatttgtctttgatgtcatataaatttttaaattaaaatgtgagatttgatactaaatttttgataattttttttatatttttatttgttccaaaataaattttgaaaatagcaatacactaaagaagtgttgagtaagagggtatcaaaaaaaaaaaaaaaatggtttccaattccaaaacaaatttgctagagtgctaaatttaaggttactcaaaaaaggtgaaatggcaaatcttgaatatctctagacaaggaccatatattatttcttacattttcttaataattactaaacatctctcttttatattgaaaatgtgtgtatgagtgagtgtatagagataaaaaaaaaaagtttgagttagatattttttttgatataatgtaaaaaaatatattttttttaagtaagtagataatttaaatataaaaactcaagtatttctttaattactggctagtagattaaaatataataatttaatatttttaaaattaatatttatagttattttttttagtaatgacgaaccgagaaatttttctatgtgagggtttaattgtaaaaagaattggatatactttaaataaaaatgatcataatttatttaatttgtaggggcttttttataattttgtttaataattatcaaattaaataaaaaaatatttaattttcttagtatgattttttttttttttttgcttgagctaaaaaatggagcaaaaattttttttgcctacagcccccacaacctattatccataagtaatattaagtaatattgagaaatattttatatatattttatgctctaattttgtatttgatgttctattttctatcatcttttgaaattttaaaagaattgataaaatattacacttaaagttaccaagtcgtagttataagtgtaaatttatactacacttacaattactaaattatgataaaattttagtaatgaataaaataaaccatatacctaattactcaataacttaaggactaattaataaagtcatattataccatcatatacaaaaattggtttcttatttttgtatttatcttctcaactattgaaactatgtgattttgcaatatgggtaaaaataaaagggaatgaccccccaaaaagcaaaaaagaaaaaaagggaatctcataagcaaagccattccattagaaaagacaaaaagagtgacacaaaatatgagaagcaatgaaaaaaggcagaatgattttgcagtatgaaatagattttagatatgaatttgaggaatgaatatgcattatagtagatagggtgagggagggacccctattgagattagacactcaagtcggtttgtactattttgctattggacaattttctatgagttgtttcatacattttatgactgttttaagatgcttcataataattgagagaggtgaaattaattcttctgcatgtgggctggtttgccaatgagatctatat

SEQ ID NO: 37095 - DNA, 6238 bp, Cannabis sativa
gtaaaataatttccaacagctccgtgtttgaagcatctaattcttctaaagttgttttgagatacaaaagaccatcacgaccgttagagttagaggcatgaatctattgttggatgatagaagtatgcaagacaaaccagagtataagttagaaaacataaaggaataaatacaaatgaaagtagtgcaggcattaacccatatagcgtgttgaagcaagattctcgacagtcttcttcagacaagttgtaaagccaagcccagtactgaggaggatatttgttgtaccaactcaaagaatgccccatttgagacttggaccaagccaagttatcaagaccaacagaagaaggagagaaagcctggttgacaccataagaagactagaataaaagctctaggctaaaagcctctaatgagaagttagacgcatatcccaaaccatcttagttcattccactatgagaacagtcgtccatccccttagactgataggcttacgacaggccttgatccatgggatcgttcacccaatatcgctcacaaggatatcagaagattcaaaatcaggctccaccccgtcatgctactcccccgacataattggagggggagagagatgaacaaacatcgcaaagaaaagacttcatgggaaggtaaaaaatgtgcaacttaggagcttcaaggcggagtgcgtgacacctttcttagaattagtcaaatgtttgcgtagcttggtctagagggcttctagaccaggaaggaggaggaggcatggaatctcctttctgagttttagagtcagccaactttttcttctttcatttgatatgggagtcgcaacctgagcaagtgggcaaagtcgtaccctcgcaaatcacagccgaaacatcacgtggagtaaccctctcctcctactctcctactcctaattatgagtaaaaagctggacatagggaacatcttgaccctctgaggtagaggatttgaaatagaagctggaactgaaaatggaagcaaaatggtgactaaatcagaattcttcaaattggtaggagtaaataaatgattggcggtcctctcaatgtaagaaaggttatagaacttctgcaaggccttgtaggagtttgcactaagcttaggaatattctttgtcactataataaagaggttaagtgtaagcctgctgtaaagtaagaaatgccaaacaaagatagcaaaactaagcaataaatgttcacctaaaaattgaaactcgaagatcatgccaggaggcatgccttcaaccatgaaaaatatggatgtcctgatagcaatttcagagggcatccctgataagcattcaacatccttggtgctcacccgctggaaaaaataagtctcggttgtagaggtgctgtggtcaatgttgtagaccgagcggaactcctctagaagaggaaagtgatcattcacccctttgaaggcaatagcaaagcatctcaagattatgtagcagattagagccaattggagaggagcaatactgaagtaagctagaattgtaataatgaaaggttgaagaggaagggtggcgctgcatgtaagtaactgctcgctaaaggaaactctgccaactgcaaggcgagtggctcattccccatcaccagcgattgataaactgtaggaggcgtcagacagaatgcagtagtctacgctaatggcacaatgtttgttagtagtgatagaactaggaacactagcatgagcgaatggattttatggaataggcaaactggggatcaccctcctcttaggcatacctgtaaaatggagactaagtataaaatggagaccgcacctacaatcactctaaggtgcacttgagacgggaaagacatcacccccatcttgggtatattaaattagggtatcatcctcaattgaccaaagaacaaccaatgactactacaacacatcgttgacagtcatcaagaagacctacttcgctgtaaagttggggagatggtgaagacctcctcggctgtaaagctgaggagatgatgaagacctcctctactgtgaagctgaggagatgacaaagacctcttctactgtaaagctaaggggatgatgaaggcatcctccactgcaaagctgaggggatgttgaatgccttttacactataaagttaaggagttgacgaaggcctcctacgctataaaactgaggagatgaacaatacaaccttcactgaaacatagtggagggaatgctaaagaacttcaaggctacaacctaagagaagataaagactacatctatattcacatataaacacagtgtgacaagagagtcaatgctcagacaacaaccaatgatcagagtatatgttgatattccaatgtcagcatgattgtacagtatcttaaatcaatggaattcacttaaggagtcatctaaattttaagttgaaaaggaaaacataagtgataagaaaagatgatcatctttcctcttctccttttatacttaaaattttgaattccactattcaatagggaatgggaattcaaaatccaaatatcaatgagaatgcttgaagaatagaaacaattgtccaatattgtcaaaattcatgcccacctggtattttcgagagaaacgggcttagttcacgtaattaagtcaacctcacacaagtgtaaagttaacttaaggggaaaatgtttacaccaaaattaaacctaatgacatggacgtcaatgtttgacacatggcaagcaagaaatatgacgtctcatagtagttagttaagtagtcccgagtcatagcaagtcgacatgggaagcgtctctagccctgcacccaagttgacttttaaaacttcaaaatgaaagttcagacttcgattactcgtttccaactcactatctttcaatgttctgtactatgaagacatggagcaatcaaattcaggccttgagagctaaaattacatgaacctgtacgccaaaagtcaacctgggcacctagggtttcacctagcgctcaagttgacatcttcaactagggttttagtttttgggactgtcttggttcaaatgggtcaaacattgcattgggacatgaactagacaggacacaaacatatttgaggcatcagaataagattcagagaaagttcatttttgagcacccggtgccctgacacccacccaatgcctgagttgacaatttgtcaatctaggccacttccaagtatcagatcaaaaatctgactcatgcatcttcttcatcttcataaaatatgtggaaacaagtgctttcaaggaagaaacaacattttttgggtgccagaagcaaagcccaacacccaggttgatattttgtcaacctaggccaaatgcaaggatgtattctaagaactcttcagagcatattctctgtttttagaaaaaattaagattcaactatttttcagggaccaaataggacttttaagagggcaaaactgggtcccaccacccaggttgacacctggcactgggcccaacacccaggttaacatattttcaacctcgacaagttccaaccagtttctcaaaaaaatgttttgggcattttgtccgtcatcagaaataatgaagatacaagcaaacttggggagaaaaccagaaactcagcctagcgccaaggttgaccttgtgttgggcccagtgcaggttgacaattaacttggtgcgcttgtttcaatcaaatgccaattctattttgagcattcttttcaaaatagtcaaaaatggggttcaagacttcttcctcaagtcctagaaccttgggagtatcaaaatgacatcccaaaagctccaaaatgagcacccaacacccaggttgacatatgggctagtgcactaggttttacttatttgattcttattctgtcccgaccgttcgtaatgactaagagccatgaagttagaaaagtcaaattcaaaaatttatatttctcatttccaatatggtaaatgactcgaaaatggggagttttgagtcttccattttcgcagaacaataatatttctaaaagctagtgaccagctttgccaaaaaattaaaataaactaagtgatgttaaaatatcacttaagcatcaaaaaatatattcccaagatgttttcccactcatccagtgttaggttaacatcatatgtcaacttgagcgctagatatcaacctaggcgctgggatgccaatttgggcactgagccgagaaaagccttcagtaaaatggccataactcactcaatattgatctgatttacgtgattcaacttgcgttttgaagctgtttcaattatctatcaagacatattctcacacttcaattgtaattttgaagttatcgattccaaattttactcccaaggaattacaaatttaagctacagcttacccagagcgggtcccgccgtcgtgacccaggccccaaaaattgacgatcaacctcagaagttaattttcaccgttagatcatcatctatgataaaaaatatccagcttatatttttttcttcatatttttagattattttattcttattttcaaggacctccacattcagaaaagtagccatcaggtcagagcatctctctctagttactctctttagaaattagagcttccacacttagccatttttcttgtaatctcgtgagaaataaaaacttgaagtagatgtagctccattactatcgcgacatggggagtgaacaactataaattttgtgtgtctctctatattatatacttacattcattattcatcttgccaagctagaaaactggtgttggccactttttagtgtcaacaagtattaataaaaaatataaattttgtgaggataaaattaaataatatgtggaaataagaagtaaaagtctaaattctagaagataaaaataatgtaaataaaaaaaatatatataaattctatagtaatcaatataaaaatatataaacacataaatcaaaacataatatctttgtggtgttaaaatgtaaatacttaaaattttagatgcaaaatttatattataaaaagttgaggggaggaaaatgaccccacatgactccctttctccaccagtgctcatcaaactcaaaaaatcttataactaatctttctcccccactatcattatatatatatctacaactatcacattacaagtataaatatatatacatacattttatatacactatatatttataaagaaaaagaagaagttacattagccaacatgggatgagggagagagtggaggagaacggttgctagtgctaatgttgttatttaggttaggtttagtgtaagatatatatatatagatatataaatataatgtattgagtttagatttaacctgaaacccaatatttgaaaattcacaacataatgtaccaggtggactaggtggaaaagttttgcaggcccaaatgttcagccctatcttgaattatacaaattattttgaatatcccctccaattacattcttacattctgctcatttttcaaaacaatttgattatgtggctatgagttataggtataatttttgtatgagggtctattcaacaactttaaactacttaaaatctaatttattgacattaaacatacaaatattaactctaaatatgcatatacattgttatcctgatatttacacaagtgacgtgccaatgcaatgtctggcacgcgaaataatttataacatgtcccacaagaagttaaataagagaaatggctaatctgttgcatatcctgaccaaggttctagacagcttaaaatgtctattgtggactaaggaataataataaacctgatgtagccgtgaaagaccaggtcctaaatgctcattgtggtctagaatttatggagaatattcaataattaataatatttgtaactaatgatagtgtgtattttgcctataaatattagcctataacacatgaaatgatagctgaatttatgtcaataagcctataagcccaagatatgtttcaaagaaagggtgaaaggaaaatttaaaataatttcaaaaatttaaaaacctcaaagacaattcatgcaaatattcaagtttagtaaaataacaaagataattacaagtataagtagttaacaaacttgaaatgtaaagagtttagagatagaaattgcaaactttcaatttttacaagg

SEQ ID NO: 37096 - DNA, 6228 bp, Cannabis sativa
aaataattttgattatcaatcatatatatactatatatatgttaagaataaaaaggaaattatatatatttatatcggggtcggatatggtacggataatattatccccgcctccgccccatccccgcttcgggtattgaaattgtctcccaccaccgccccattaaccaccaagacggggaatctccaccctattaggggcaggtccccgcggttacccatccccgcggtataaatttccatcaaaaatcaaaggagtaagggtaaaaaggtaatataccaccctttgttgtttcatgtttggcaagttaacacattatataaaccaatcaaaattttgtcaaatttaataggctgccaatcaattttcccaagtcaacactccaaaatttacacccacaaattaaataattttctttttttgatcaaaataaataattttttttccacactacacatagtcaatagtatacacctctaagtattacttaaaataaatagataaatgacacgtggcaaaaagcaaagatttgattggctcatacaatatgccggtctcaaaggtttatttaccaaattaaatataatttcttcttacacttaacaatgccattgactaagattcaaattgaattgtttatgacaaaaaaataataataataatactcaaatggaattttccaaagtgaaaaatagaaaatttaaaatagagtattgaatgaattgaggtggtccccacctagcttagccatgattttcttaaacttaatcctttaatgtttcattgattgatcttgatcttgatcttcatcttgatttttgtctgattttaaaggcaaatgtaccattgattggtacttttaaattgggaccatatcaaagggatatgtagggttgttatgttgacattaataatatcccatactaacttatcttgagagaagcttttttggttggtttttggtaagagtgagcataacatttatgaaattgtaaatgaaattattattaggtgtaagtgaaagtggctgaattttagtgggttataagaaaaaaaaattacttttaaattcttatttaaaaaaaatatatataatatttttcaaaatcagtaaaaaaatatgtatttttaaaagatgatttttttttttttttgagctcttggactagatggaccctaagcataaacctaacctgcttatacttaagatcgggcctgtatcaatggtgtctaataatacttatatgagatgatcatttcaaccctttttgttagggataattacactacatactgaaacttttaatttttttacttatatactgtggggcggaatattttttaaaaaatattgtgtactgtgttaagttttcactgttattttacggttatttttagttgttctactgttgtttttagctgttctgctttgtgttccactgttttttttatataaacacggtattttttaaaagattttcgtgtgacagtatttttgtaaaaattaacctaaattttagtatttttgtaagttttccttttatattactaagcattccaacttaagcccaacaaatgagcccatttcatttcaagcccatatttgcaaagacgagtttgttaatatgtttttattaaagagcctattagagaaaatgaaatagttttaatattttatcactttttttttttttgaaaaaaaacgtatttcattaataaaataggttagatgtcattactatttaatcaccttacttaatatataaaattactttaaatttattcctcattaaaatatatttatatatttatatgtatacatcattttttatttaaatccaaggaaaggaaaatgaaattctttgagcaaaattcaaggtccaatgagatgactattttttagaaagaaactatattatatttaactatttaccatgcatggttggtaatggttttaaattattattattatttttcaaatattaagatacaattatatcaaatattataaagatattttcataatttacaaaaagaaagttagaagtctaatcaaggtttaagacaaaaataattcgataatcatccataaaaaaaattcacttagttaaaaaatttaatatcataaattggaaaaacattccataaaaacaaaagttaagaaatgactaaaatgaaataaaaataaaaataatataaaaaaaaaagaaaaatatacatttatatatagatattaattatagggtatactttgttccttattaaaaaaaaccaattatatattattgtaagaacataagttaaacatgacatttagctataatagcttatttattatttggtattattaaatatttgttggcacttcaccaaaagtaatactaaaatacaatttagcaatgaagtcacattataaccaaattagaatatgcacttttgaagaaaaaataaaattgaatatgataaaaaaaaacaacaaatttaattgaaatgtaatgagaaaatacaacaacacaaagggtataaaggattttttttttttttttggcttgtgtataaatataagtacaacaataattgattcattcattacttacaatggaaaatacattacatgacactcaaaaaaaaaaaattgtattgtaataaaggaatatatttatatgaatatttattttctctctctcttttgctaatattgctatatttatactcaaaagaagagtatagttttggttactggtgacctgattctttgtacaagcaattaactcactcaagtaaccaaattaagaataatacaatctaaatcacacccaaataaaaatttcaaaaaaaaattaaaaattcattattttttcatatttttttcccgcctaattctacaatatttcgaggactaaaaaactataacaattgttgtgtaggtacttaagaaagttcgagcaaatcacatgtctgaccatttgaattatccgagcattgctatctttgtaattcttgtttacaaagagggcaacaagatatgattttgagccattgatcaacacatttgagatgaaacatgtgagagcatggtaattgcctcacttcttccttgtctttatatttagctaagcaaatacaacattcctattaagataatacacaaaagaacaataatgagttccaactgtttgataaaagtcctcaaagaaaaataaatcaacattttgaacaaaacacttactgggtcatcattaatggagtcagaattactgttgttgtctaattctggctctgatttgttgtctaaagctttgtatttccaattgggtagttgcgaaatttggtcttcggaagctcctttgtcgatggagcccatgttcatgttgtatccgaggagagtgcttatcaatggtacacaacaacataagaggaggaacaataggaaggggaatgagtagcttatggcattccaagctagaagagtgatgcatagaacatgtagttttggagctcgacggaatgaactgaatcgagaatcgaacacccaaacattgcccattacaaaccatatcgcgaagaataactcgagtgatgtcctgcacttgttcatcaaatgtgttgtcctgcaataagttgcatataacaagctcaaaactagaaagaaaaggtagccatttggatagtgttttctttgtttcacttcatgttgtttacttaatttgacttattttataatagttctaaaacataatcgaaatgctttaattaaattaaattattctctttaataaaaaaaattataaataagttttttttactagtaaagattttcctgaagtagttaggagaaagactaaaacataaccgaaatgttttagtttgacaaaattattcttttcaataaaaaatataaattaacattttttttacgagtaaagactttctttaataggccctctcagcataggtgaactagacttgcgtctagggcccatcagagacccaataaaccactaaagttcagggccgatcctattttaccgcacagataattcttgttctttttaagtaaacatgtcattaatactaaaaacaaaacaatgaggatcaattgcaagaaaacaagtaaatttttgtttaccttgattcttcaatccctctttgttgttcaacatcaggaaggctaaaaagatctccttgagtgagatgaagataccgataccggccatagagaagaagaagattaagaaaacatccaatatcatagccaacaacccacatcctcataggccaaactggtttttctctctttgaagtagcaagagtaattgttgttaggcctatctgaacaaccaaagctataaactcaagcatcatccaagtgcttgaattgaatggactagactcaagatctgatcttgctccattttggtaatgaaatactcttctcaagaaactaaaccatcttgctcttgatactctcatagccattcttatcaacaatgaaggcggtgctcgattagccctatttcgggtagctgctgctgctgctgatgatgctgatgatgttgttgtcaccgccattcgttctcctatggcggacatggatgaaaatggaagtgttgtattgccagaactacacaaggaggtgtctgatgatggagtgaagtatctggtattcattacttgattttgaaactagtatgactaataatcaatctcaactctgttttctataggacaagctttaaaagggtatggaaatttccatttgattctctccaaaaactcaaactttaatccaaaggttcaaactttatatctgcaactctggtttttctctgtgtttgactatacaaggctgaaaattatgagaattgaaatagaaaaaaaggatgaatctttaccatttagaaactccaaagttttgaactttaaactccttagaccaaagggttggaagattctcaaacttgaagcggaaactaaagatgggtaagaatcaaaaacctcaaaacaagacttttaagagcttgaaatcacaaaaatctgatctgggtatgagagaataagggtactaagagaagagtttatatgagaaagaaaaataggtatgaagagtgtgtcaagaaaggtagagagagttgggttgggtttgagatggtgaccaagaaagaaaaggcttttgctttaatctcaagtgaatttttcagaagagagtttggagggaagccaacaacggttggcctaacttctctatagctcttttgtttattaaggaagcaaagctgaaaccccaactgccttcttcaactgcaaatctctttctctaatctaatctataatacaaaattaccaaaatagcaaaacctatacatatatatatatataatattattcttattgtgaagacaaatggccaaagagactaatttgttttcaccttggttttgattggagtaagaacaaagttagttaattcttttgattctttctttctttaccatattgtgttagattaactgatttgaattctggcgggtacagtgtcttaaaacaaattttatacacaaaatattttaatattttttagaagtaatcttagacacacacttaaattacacacggcataatgtgtattaaatactacacatttatatttttaaatgagattattttacttttaattattagattaagtatgacttaagcatatctcgatcacaggatcggttctgagttgatttaggttataggaaaaataaatttttggggcctttattataaaaataaatagtcttttaaattcaaaaaatatgtatatttataaaaatgtattttttttatataggctctagacgtaggtttaacccactgtaacttataggatcggtcctacttaataatattatttttgagtacacatatcattaattttttaacacattaaattttatctatgtgtaatatttgtgtgtatcattttagttgatattcaaatgatataaggttggccacctaatccaactatatgaatatatatttatatatattgtgcaattttgaccacaatttatttttcaagttgtgttaatggggccatcttcaatatatccattattagagccaagtgttatctatcctatgcatgatcatgatgtgtgtattaagtttatataatataattaaaagtttgtaattatgaacactattatatgatttcaaatgttttaatattt

SEQ ID NO: 37097 - DNA, 7985 bp, Cannabis sativa
  modified_base (6656)..(6656): a, c, t, g, unknown or other
  modified_base (7940)..(7946): a, c, t, g, unknown or other
taagagtgattataatgtagttataaatattttttttatgataaataagtccccacaaagtaaaagttttgagtccgtcactcttttcagtaaatgggtttaaattttggatttgatttattaaaagcatagaacacggtcagcggtgagtggaggtagtgttagtgatagttggcagagcgggtggtcagtgttcgatgtccgaaagtaacaagagattctaagatcagctccagtgggagtagtctaagagttgctcactcacaaagtgggtccttgtttgatcttcataacaatgccctaatgaagtagtcggcatctgagttccacctaaaaaattgagtgagacatagcaaaaagatagagaaactgaaactaaaaaaacgcatgaaacatcaagttttcctaataacaaatgtgatcctcaattctcaaaataaaattatgtgtcccattgtggtttgatttggaagaggaagcagttggaatgtgcacatatctatatacatatataaatatgagaattgttaaaaggtaccattgatgcttaatatttttttcggtattatattgttattggtgtaattaagtatcgagtcttatataacttaagaaattaatttttaagaaatatcgctaaccaatcataaaacgccacctataaaaagtattggactccactagtacccaataataatactctataaatatatatatttagtgaggtctccatttgtgtggtggtattagtatttccattgtggtggcgtgtattttaacagttgtaatacaagttgttcacattgtcaatgtgttgtctataacattgtcacctgttgtttatagtgtactaatattgaaaataaaataaaaaagaaaagtgatgttgagatcctttcttgtaggggccaggacaagggcatgtgtagtttaagtctcatttttcatagccttattacatacaaagttactaacattcacattaaactaaccaactggcaactctcgtaatcctaaactaaactattttcatcttcacacgagatcctatgcaccacctactcaaaattctaatcccgaggggtccatcgttttctgatctcagtagaataaggtggttcattcacacaaaagtcagtttgttgagtgagctacaatcaatccaatatgtaaactaagtaataaagaaaagaccacacacattgtaacaataataagcaaaaacttattcgacaattaatgaataaacaagtaagacgatggagagctctctcagatttagattggagtttttacatgacacaattgctctctcagtctcagctaaattacggtggagaaagaaagaacaatgaataaattaataatactctttcaaatgtgaaaaatccccaattcaaaagaagaaattttgtgtgcaccaaaatacaaagatgacgaagtagcagtagtagtagagcaaacacctcccaccacatgagtagtaattgatgatgatgataataataccacctccctgtattgaaatttcatttggtataatatattattatactttggaatcacccaattgaacatcttttacagactccattccttctttcaacagtctgatttcctcttctgtcatgctatttttcacacttgttaaggccttggaattggcttgtttctctagctccacagcccaactgtagattatcatcccaaccactgcaagagccatccccatgatgttcttgaaagtcagctctgaatcgaacagcagccaccctaatgtgagcacgcacaccgttttcatgtggcctaaaacctggaaggagacggccgagaaccgtcctatgcagaggtactgactcatgttgcagaacacggctagggagcacgaaagaagaatgaatagctgcacatacatgacatcaaacatataggattcaatcatttcatcacccttaatcttatgaaactactaataacaaacaaacacagacagagacaaaggaaattgcttacaatggcaccagaagacatcttgtagcttgttattaatttcccactgaggaaataatcaatgaatgggccaagaacaaggagagacagagcttgaattggagccgtcttgctcagcagttcaaaagatccaattgagtacttcttttgaagggaaccaatggtctgtttatatcaaaatcaagtattaacaacaagtagacataatagttaaattgagtcaaacaacctctgtttctaaacgtgaattggtctttttaaatcaaaacctagggtttgttcttctatctagtgaaatcaactagcaccaatctcaatcccaatttctttctattatagagaataacaagtaaaagaggttaactcacaatttgctgcaacgaggttgagagaacagctacgcaagcacagatgaagcctttgagattgactttgacatcagtgacagtacaaacaccaacgccaataaccacaacgattacagctagcttaacctctctcgagtagtgcttgctgtgaataatccactccatcacgcacaccaccggaatcatgctcagcttcgaaatctatgtgggaaacagaattatcagccaacgaagaacacaaatcaaatctgaactatacatcgaagaaggaggttaggtacctggtaaaacccgactgagttaagcatcaggctgaagttcatgccagtgatggacatgtttgcaacaatggagaaccagagaagctcccagagaggtacgtgtttggatgcagaataaccggtagcattagagaccagaccgacaatagcagtgacggcgaaatgaaatccagttagagtggtggctgtgaaattaaaattcgttaatagattagattagatccgtgaaaaagaagataagaatatgaatacatttttaaatataccgaaagtgaaagcgtagccagaagaggacatgagctgcttgttagccatgattattccaacggagctgacgacgttcatggcccaagctccaacatctgaaactgcggccacagatttcttttctgtgggctccatcattgccttctctgccttcatccttgccgttcggaatggaaatgaagaaatcagaccagatcggatcggatctgatcagatcagatccaatatggagagagaatttgaatttgaattctgaaactgttgagttttgaggcgctattgtgtggctttacccacccacccactcaccacgccacactcacgcctgttcccgtagctaagctaagctaagcctcttctcttcttcttcttctacaccaacaatttcctctctctttctctctctctctctacaaattctatattatgtgtctttatatacaatagaaaatatcgtcatctccattcattctcttttcggtcaatttctttccttttcaacttcactaattttaaaatacatgttaattatgatttttgtcctcaatttttaaatatttactaaattatatttttaaaattgttaaagtgttaagtttttatttgaattattaaaattgttggatttaaaattttttatccaaaaaatttaacataaattaaagttcaggtattatttggtacatattaaaatctgaagagtataatttagtacatagataatcactaaattagtaaagttgattaaaattgaacaaaaattcttgaataccataagagaatttttaacggctaaaaaaataaataggatctctaaattacactttctaaatgtatattttagtaaatcccctgtctattactttaatcaagagaatttatatatagtataattattttggtgaaaatttattaatagccccaacatattacattgtgaaaaaaaaaattataaataccgaaataaataaaaaaaccttttagagaatctactgaaaaaaatattaaaaataaatattaaaagaaggggaggagacagagagagagggatttaagatggagggtcagttttcatccaacacaagatgaggaaagtgaaatgaaatctcgttccatctcgaccgttggatgggtttggtttcgtcccatttgggccagctagcattacaataattatcttatttaatcacttcacttcactttaataattacagtaacaatattgttagttaattaattaatttaaattagcttacggacggacaacgaacccttattaatggaagtcaccggatgtgtcttcctcttttagtttattaatgtaattattattattattattattggataatgtttcactacagctattaaaatggagagttatttttctttaatttgcatcattgattcattttatatgttatttttttttatttattattctttttaaaaaattaatttttaaaaatactatcatatagaggtgtacaataacttttttttttacattattctttaacttacaacttctgagtctttcaacctctaattttctttaaaaaaatatcaaaacctttagttttgattacaattttagattctttgaggaacaatttttaaaagaaaaaaatgaaaaaaaaaatagacaagtgtcaagaaaaataatagtatttctaataaatatttttataaacaaataaataaaaaagcaacattaaatacaaacataaaataaaataataataaatattaaaaaatcgattctaggtaaattcgttttaatatatctactaaagcattatttattattattattatttagaatatttgcgatgaaattctcttataataaaaaaattaacgacaaaaatattttatattacaattttattgcagacgtatttttttttagctattaagtgtcaactcagaaacacgtgacaaaatattattggactatgtattaaataaataaaaaaaatatatcgtcttatgtttttgagctcagacttatagtttaattggtatttaacaactaaaaaaaagtacgactgtaataaaatcgtaaaataagatagtaaaaattgctactttttctaattaaaatcatatctgtaacaaatacaaatataaagagttttgttgtaaatatcccatattattataatgtttatgtgattgaccctctcacatcaccaccagacttctaattaatatttcgcaggaacatatattgcattacatatatgcttctccaaatttattgacaattttcttatatacatttaattttaggaaatttatgatatttaaattaattataaagaaaactataaaaaatttatacataaatactagtgtcatgtcagtagacatcatataaattgttgattaagattttggacaatttattaatgaaataagatgcttataaaaattaagagtagttaaacattataattacttagtttaggtcttaaaataaccctaatctaggaatcattgtattacattcctcataatttcagtagtatttttcttaaaaactgaaaattcgaattcatgtacaatgtgtgcatggtatttgcatgtgggactgggtaaagtttctctcgagcttaaataaccaaggtctcaatattgatgaagtttttctctatgcttcaacggttgtcgacactatctagcgggttcagaatgacaatgtttataataacaaactagataatgttaaccaatgtattgtttctattgctatgtcttatgcagattactgcgcctctcttctcctctcgcctacccctgctgtgtcggatgcttggctccctccaccctaggagtggctcaaacttaattgtgatgttaaagttgggctgtatagcatgtgcattgcagtcgtggctatgaaccatctgggcgaggtgatctaggtgcaaactaaactattggattttgctgacgctctgtgtggggaagcagggacctgttgtttggctttggaagtcgccaaagataaaagccaccagtttatgattgtggagtgcgattccaaggttgtggtcaatacactcaacggaaaggagacttgttggaggcttcagaactttacctaattttgtaaaaggccttttcctctttttgtgagttgtattctaaataatattagtagatcctgtaatttcgcggcccataatgtggctaagttagcgtttacccacaaacagtttggttggcttcttgtttcctccattccgtcggaactattttgtatgaccacgaggtctaatttctttttatatatgcacgcttatttaaaaaaaaaaatgctgttagactttttagttgggcttacattaaattttattaattttattggaatttgagttgattggatagttctttgctgtttagtccatattattggtgatcaatagttaatgggcttagcatatgtgtgtgtaaagtctaggtgaagcagaagtgtggacttttctagttaattgaagcaggcccagtccaactagggttatgtagcgaagtcccctccctaaatctataaacacatattgtctcatcacaattgtatacttttgataatcagataaataacactgactctgatttaaagacctaaggaggaagacttagttgatagtattgcactatcaaataatggtaattactatggatcaatcatgtacgtatatctaattattatatattattattntgttctatattatatacaaattgatcttgaatttattatcaatttttctaacatgtggtatcagatagccaaattgtatataatttaagacctataatttatttaacgattgattgatatatgttaattttctccaattacatattaatttcgttattattttttgatgaattttttcgttttttaatctttaaattttaggagttttatttatcatgaaattctcttttaattgatattttatttaactaaaattgttgagtaagttggaataattttgtgattaaacttttagggttagtgtgttttaatgataaaattaaatttaaattttttgattataattataattggctgaaattgattatgaataaatgattctacattgttttataatgtggctacatatttctattaccgatttagtcaaaaattagtagatttaatgatttttttttttgtttgaaatttttggattaaattactagatctactattgttttggatgttttacctgaatttaatccatgggtagattagattttcaaaattgatcaaagcccctcctatttctgatgatttggcgttgcttttagccagtttttgtctttgactcgactggagaaaaccgagttgcgtgaccctgttttagacccggtccaaggtaggagatgaccctccccagcgaagcccagtctcgacatcggtgcgtgggggcgcgtgcggcagttctaggagtcattttttgacgtttctttttttttttttcagcgtgcttagaatttaatttttgatttttttttatgatttttaattaatttttttgacttcgtttaataattattattaatttaatggtaattatacagttaaaaaattattaaaaatatttttgatgagttttcaaaattcataaatcatagataaaattttgagtttcttctcatcttgttagacatagtcactctcttatttaatttatcttgactatgtaatttctaccaatattctttctttcacatcttttcattatttgttgttctaaaattataaaacttgattgtttaatgcaaaaataatgtgttatagtgtacaccttattttttattatcgatatattataaacaattgataaatctccttttgaaaatttggctaataattattaattttcaatgattgttttaccatcaaattttatatgttgtaaaaaatatcatttattttggttggctatatatgtaattacttgcccaaaggtagtaattatatatattagttcannnnnnntgaagtgagttaatattaaatgtgtatattttaattatt

SEQ ID NO: 37098 - DNA, 6274 bp, Cannabis sativa
agaagaaaagaagggtaactaacaataactgcatttcatttcagccttgacatgttttcgatgaacagttcggaagaaatgatacatgaaccactactagtctactaccaagtccatcaaaatcatcttgtccccactcatcactatttatttgctactactacaactagcaaacttttagcaacattacaaaagttcctatacagaattaagagagggactttagaaatgttatccatagtactaataataatagtggccaaaacaattgaaagtgattgaataggtaaaagttacaaacccaagtggaccctaataacttttataagaaaaaatgtttgcttgttccgtagtccgtacacatcaacatacaatccattctagtgggcaactagggcattagagagctcataaaatagtggccacaagaagcaacttgttggaatttaacagctaagggagggagtgatgtcagacaaagccaatagtttcctccaaatttattgctgacatcaccagagtttatccatatgacatcatacccaaatggacactgtgtctatcccagttattatgattcaaaatattaaaaaatctcataagataccaccttgtattcgaatatactaaatcgtggatttctcagatattcaactaatatatagtattagttagattagattatagtaagaagaacagtgtaaacatgttgctttcaagattcatgtgaaagaatcaaaagtttaatttcattatctccagataaatgccatagccaaggacaaggaattattttacaaccaaattatcagtacaatttgggagatggaagcagtgttagtagtacacacatattataacagtaaaataatcagtttgtagtaaaagcaaagttctacattgatgtggtctaaatgaatttgagcaggatcaaacaggtatactaatgaatagtgctggtctacttgaattagaccttagctccataaaaactacgaatttgatatcttggtgctgctgatcacattgttggtctccccactaactcttccttgtgagatgtcattgcaatccacaaaactgggttgatttgtggatgcaagaagtctagcccacatcctatccgtcaactttactatattttgtgtctcggtcacacgctgcgaaaccataccgagccagtcatgataaaataacagactactgaactcttaattggacattaacactgaaggcatcatccaattcaatacaagagaatacataccacatccaagctaaaagcactacttttcactattttagattttctataagaagggtgacttaaattataaaattagagatgataagtatccattaattattttctaaccttcagaattatagctagccaatttatttttacactaaaacctgtttccattaattttggaggacttaatgttcttctgaactatagcaaaaagttgaaagacatgcatgaatagatgcaaaagaaagttcttacggagattggaatataagcatgcctactattcacaggtccaactgtgaaaccactgaatccagccatggccccatgaacagcactttgagcgagaagagtacagtaaatgttgtctgatgcattacttggaatggctcgtatcatataagtaggatctgtaaagagaaaataaatcccaaaggaatcaagttttctatttggggatcatcttagacagacatactttcatatatatgcatagagtttcatataactagataatgtaactaattcatagcaagcatcgttggagaaaaatatggatccttaatacaactacgcaatttgctattaccaaacctagccatcacaaagtttcgtcaactgtaacttttgaaaggctatttttctttttttaattcttaaccagtataatatacgaaaaaacaggcagaactaacacgatcaaagtagattgcccaatgccactccggatagaatacattacctatatatttcatatttatcgacatcttccgaatcgttgtaaaatgatcctgcaggtaataatttgaaagctagtttagatcaaaatggccttaaggtcaaattctagtagatgtacagtgtaccttaaaatcaaaaaataataccaataatctccaggaagatcaccataataagtatacacaaaaaagagaaaagaaaaaaaccacaccgtggcttttggagtgcacgctcacaaagttaaagcataccttgatcttgtcagatagccacagaccaacatccaagagtagcctgtttcctgatgcatctttcttcacgttcgcttgcatttcttgagcaacatattcctgacctgctccttcagctatcacaattaccatatgtccattttctttaagccgctcctcaataaactcaaaaagcccaccctgaccttctaaatagaatggagactctggaatcaaacagcaatcctgtcacagcaactgtcagttgttctttacctgttgtcaacttgaaagaatattcccaacacctaacaaccagatcagttgatcaattctaactgacttgtagtataagcacaaaatggtaggtaacacagtgaataaaacctaaaaattctctatgtccccaactagaaaagtgtgtccaaaacctattacttctcatctatctagtgactttttgatatgttttcacataaaaggatgtgtcaacagatatctgcacaatcagataaagatcttaccacatcacgatttgctaaagttgccatcatagcaatgaatcctgacaatgaaaaaaaaaaatagacagcaataaaatgagttgaatgctatgaaaggtgataattccaattccattttccacacttaagtactttgaagcacttaccactgtatcttcccattagtttgacaattccaattccattttcgacactttcaacctccacatgtgcagcattaatagccctctgggcttcttcaacagcagtatcaaaaccaaaagatttgtctatgacctataggtgacaagtgcatcttgtcaaagatggaatgatgcaaataaaaagggtataatttgaaaagatagaaccctaaattcccaatacatttcaatcaggagaaaaaaaccattaatggaagttggttaagattaataaaatataaaaactccaagatttatcaaaattgactaaaatgagattatgtaacttgaggtaaatatatacgatgctttcatgcatccaggagaaaataattatttttataatggagaatgacatgaaggaaatggaaacacaagctcgattgacatgaatgataaatattaaatataaactgtgatttataaaataagcaatacaagctcaattaagatgaatgataaatagtaaatataaatgttggttaagtcaaacgtacagcaatatcattatcaattgttttggggattccagcaactgccacttgaagaccacgtttctcgacttccttgaacaaaatatattcatgtcataacatgctatagagtagcttcatcgacaccagttgaaggaaacaaaatttccctggaggtacagttaccttgtatattagatctgctcctttctgagtgccatcccctccaatgatataaacctaaaccaaaatttgtcaatttgctctatttctttatttcattcaatacatgttattttctttatgcactattgagtaggaaattgtgtgtgagtagcatgggttatttaagcccctgtaatataaaaagtcacaaaaagttaagcaaaagatagcatgatctacctgattaattcctcggtcttgtatgttatcaactatcttttgggtatcatggcctcctcgcgaagtgcgaagaaaagtgccaccacgcttatgaatatcattgaccaccttaggggtcaatgtcattgtatttttagagtaaaagcctctataccctccctgagaaatttcattattcaaaaagaggtcaacaactcgtgatgttgataatgcaggtcattggaaaaaatgtgattataaaacataattagtcacctcgattccaagtatgtcttcaacgccatacatgtagttcaacccacacactatctccctaatcactgtattaatcccagggcacaaaccaccacaagtcactatgcaagcacggacttcttcagacttaaaatacacctatgcataccaaaaaaaactctttctatcatcctttgatcaacccaaaagaaaagggcacatttattaatccagaatctttgtagaaaattatttgaaaaagaaagaaaatgaactaacagctatagtaatccaataaaacaaccaataagtgtttcttgaatgtgtaaaagcaaattgacgggtgatacattgaagcactttcctaagtaaaataggccaacaaaatttacttcagaggaataagtaccttctctcgaggcccagcacgcctaaaatgcactcctctagggctacctttttgaacaacaatctaaagccacataaacattattgtaaaagaagtaaaaacgataacccaccacaacccaattgggcagcatattgtaaaagcaaaagaaaaatgctgaacagtgaaggagcaattgcaacttactctttctgcaaccgcatcttctgggttcacaaaagtttgcctatggaaaaagaaagctcaatgtgtaatggactcatatcctaacaaatgatcaagatactctccataagcaagtaaatataagggaaaacaatgaatgaaaactcacttgacaatagcatatgcttggcttttttgtagaggatttggatatgtctgatatacaaataaataatttaatctttacgaatatagatacacctatatatacataatacaaagatactagaaacattgtaatgagaaaggaaaatgttaccggtaaatctgggagaaagttggtcaaatgaggaacatcttcaaggacgaaaccattgtcagctgcttgattggagctttgtgatcgaataattgggtggttttggcgcgaaaagagaggaaatatgctgaagcttctggatttgaaaaagggcttaagaaaataggactgagtggatgataaagccgaagcttgcgatttcgatcgaattaaggggaaagagggaccaagtggaagagacgatttggctaggccagaagaaattgtgcactccattgacaatttgcggagtatctataactatatagataacgatatctgtgaaaatatatatatctatatacaaatggtaagaaaataagaataagaatattgaatagttctgaaatagggagaaaatctgggaagaatcaagaatgtgtttgaattgagtttctgcccatttcggggaaggaggatggaggcgtaatccagtacggtcgaacctactgtacacgaacaaataagatgatcgataaacgatttgtcatttttggataaaatcgtatccattgaatggaatttcataagttgcctattattcgttgactatgagtctatgaccgtttaacacgttgttggtacaaaaacaaagcttataaaaatatccttctttttcaggcttttcaggtattttgttttaaagaaaaaaatttaggagtgcaagttttgatgggatctggtgcattagtgttggtatgatcgcacaagaaaaaaatttagagtgcaacaggacttcgcaggaggtcactcatcctagtactactttcaagtattttaaactagtaaatatagtcacgcttcgcatagttttttttttttttttttgaacaaaaagaatgaaacttttattcaaaagacaaacaacttacaagcaaaagcaagctgaaaaccagctgccccaaaacaaagaacaactaccaattgtttttttttttttgatgcaaaaacaactaccaattgttaattatattaataatgtacaaattcctgcctttcaagtgttgaaaactacaactcatgattctatatttaacaccagtttttatctccatgttcaccaaaccaggagcccgacagctagggatgcgcacggggcggggaattaacgggaagtgctctccccgtccccatccccgcttattccccatcggggacgggacggggaatcccctaatggggcggagacggggcggggaatcccccattgtaaaaataaaatttattttaaaaagttaaatgtataaaattattaaattacataaaagataaaatattacatattatttactattcaa

SEQ ID NO: 37099 - DNA, 4522 bp, Cannabis sativa
  modified_base (3905)..(3910): a, c, t, g, unknown or other
atattttactttataataagaaaacatttcaagaccaatataatatcaagtggtcttgagcatctcataatgttagagatagcaatattcaatcgaatatataatcaagtttacaacttatagtattgttattaggtttaggtattttaaggagcataattaattaataattaaaaattaaattataattaataattatagtacatatgtcgtattataattaattaataattttttatattatttattaaattaaattatatgagacttgattcaaaaaaaattatatgagacttgatattaaaatgtattgataactatacactacaataattatagtgctttacacctttttggagaattgcttgaacttgatccaaattcacaaatcttatttgaatgaacaaataaaagagaagaaaaaaaaagtgttctttacaaattcacataacagaatgccagcttggattaggggtcataacattaaaaattctctactttgaattataatccttgcacatatgatcttcatgagccatgagtagttaaagtgtagtcctgagtgtccacttaaagaagcttgaggcagtgattgaatttgacttatggctgggattttgtagcatgttagatggattctccgctgttaagactttctctagtttcaccttaccatttgctatgacatctcttataaagtgtagtctgatatcagtatgtttagttctctcatggaacacctagtttttacttaagtgcaatacactttggctatcactaaacactataatagaactctagtttacaccaagttctctagttaatccttttagccaaagtgcttccttgatggcttctatacaagccatgtatttggcatccgtggtggccaaggccattgttggctgaagcttcgcgttccaacttattgtggaatcactcattttgaattcaaaaccaatttgagacattcttgtatctaaatcacatgcataacctgagtctacataccctaacacttcaaatttcttagtattagagcaataaactaatccaagatttgaagtttcctttagatacctcatcattatttgatagcctcccagtcttcctggttatctcacatacctgttgatcacactcattccatgacataaatctagtgtagtgcgaatcataatgttcatgattctatccaccacactgctatatgggatatttttcatgtatttcatatcctttgcaatctttacgctttgagtgatcgagagtttgaaatgttgggcaaatattggagttgatacgtatttgggattgtcaaaaacaaacatctttagcacctcagtgatgtaaccactctgtgtaaccagtaacatcttatgttttctatcactaactatctaaatttcaagaattttcttagctggaccaagattcttcattttaaattccttgttcaacattgactttactttgtccacctcttaccttttcttgcttgcaactaatacgtcatcaacataaaataggaagtagacaatagactttacatctgcaaccttgacaaagaaaaaacaatcataggcactccttttgaattcagatttgatgacaaagtcatcaaacctcttgtatcattgccttggtgattactttaggccatataaagccttcttgagtagagaaacatagtcttacttccctttctccttaagaccctctgatttcttcattagaatttccttattcaagtcaccatgtagaaagaaaatcttgacatctaactgctccacgtttaggtattccattgtatttattgctaacaacactcgaatggtggtatgcttcactacaagagaggatatcgatgtaatatcaattccctccctttgtgtgtattcctttaccacacatgtagcgttaaaccttgatctttctacccctggtatgtttcccttgtgcttgaagacccacttgcaccctataattcttttctcaccaaaatctaggtctcattttttttttcagtgacacaacctcttcattcatcatggcattatcccattcttgcttgtcatcactcttcatagcttcaacatatgtccttggttcatcatagttgaaatttgtgatgtttagtgcataatgtaccaagttaacaagttgattatttcgaagatcttcagtgtcatctattaccccctaattctttagtgatctcatcacttgaactttccccatcttctacctcagtaattgagtctctatttggcaaaggtagaaaatagtgtcatgaagattctaaaagggtcaatggttgaaataaaaagtgcaatgatcaatgaagtttatgtactgcagggaacactgaaagaacaagtagttgtagcatctaagactatcatgaattgtggcacatgagacttaggcatgtaagtatgaaaggcttggaaatcttagataaacaaggtctgcttgggaagaacacagtgcatgatctaaacttttgtgagtagcgtgcccttgggaaagcaacaagggtgaaatttagtactagaattcacaatgccaaaggcactttggactacatacgctctgatccttggggtccatccaggactataactctaggtggagctatgatggccatacattttttttttataaaaatactatctttatttacaagtgttaaacgtggaaaatcataatgtgacctttttatttttgtacttgaaaatattcgtaaatggctagtttttcgtacaaaagataaaataaataattaataaaataattgtgacactaatttaataacgtaaataaataaaacagagcgtcctagaccacctgtagttttaaggctttcagcgagttcacacacacaagcatctaaagttctactcgccaccgggcaactagacttaagttaccttggtttgcgcatgataagtttgataagggtgagttactaaactcagtaaggaaatgtgtctcacgtagtcacataaataaaaataaacacaacgagaatgtacatgcacatttgcagactattaaaaatatataaacttaatcttatcactagtaactagtatctacactaaaccacataaaagggttccgtccgagttcgactttggcaaataaacttgaactattgaactacatggcagagggatgggttcagtataatcgtacccactactaaatggctccctatctaccatttagacccaacattcaagtattcagtcattatctttctagtcaaaccatgacacataagttataatctatctaatttaaataatgtctaaccactatacattatttaaatagcatagcatattataatcataactttatttaaataatgtgtatcctacgtgttgtccactattcaaacaataaaactagtttaaataacgtgcatccattacaccgaccattattcaaaccacatatacatatctgttgtttagataatgtgaattcttagtaccgaccattattcaaacaacataacataataatgaacaaacaaaaatatagctgaagtcttatacctcgtcccacttcttttttgaacattatttcatactaaaaacttaaaagcttttacttaattttaatatctcgaatgtgaagaatttaacttgattgcgggagtgacccttgagccaattattgtcttatgaaattcctaatttttttagaatatattgtagtggtgtgtatgtatattacatataaatatatatatatgatatgttaatcgttaatttataaattcaaaattataaaatgatatactttagcttctaatgaaattcaattgagtattaaaacttgaacgtaaaatgatagtgtggtaatataatgaaagatatatatatatatannnnnntatatatgagagagagagagagaatgattatagtgtatttgattatatggatatcaaaactatggaagatataaaaggatgatggagatggtgactttggctatgatagacaataaggacgagagagatagaaagagcgtgaaagtggagagctattttggctttgtgtgaggaaacaactcagaacaaatagaataataatggaagatggctaccactttggagcttaacaagtagaaataaggatgtaagagtcttggcttcgttgagcgagtataaaaaatgatgagtggtacttcttatttgtaacctatggaagtaataaataattcagccaaattatataatagcaagtaacaattgatcaaattgaagttaagaggctgaggaaaaagtgttatgtatgtataactcactaacttggtctttggagtaagcttcttaacactgaaaatgctacctgatctcacgtaatgccctttctattgtttatgtatataactttgtttaagttttgttaagagaaaaaatgatctctcctcccgacgtgtaggctaggcttagactaggcttatgtcttttaatttttaactccatttatctcctaaagaa

SEQ ID NO: 37100 - DNA, 4766 bp, Cannabis sativa
ttttaatggcatgcaatactttgattggataaacaatgatagacagaagcgtacagagaacaagaaagagttggatctttggcccgtcagaccctaggtgagcaggaaataaagtaggaaactgatcatttacatgactcaaattagcaaactttgccagagtaaccactaaccaatcttgtttagcaaaaaaccactacccaatcctatggagcattaatgggctattaagttcctgatttacaggactgcaattacagaacaaacccaaaaacatttatcttaaaaatgcagtacaactgcaacataatgggttgtctcaagtcagccaacttactacctatataactttatagcataaaaaaaatatcccattttcttttattactaactatggtttgcaggaataagttatacgcaattcttccacaaaatttgtaaataccagctcacaattttatttttttggcaaggattccttctgcatttgcggaagaaacttaaactcatcagtgttggaaaggataacgaagaccaccaaagaagttgtaagtagggtaaagacaatttctcacatgaggtgcatcttataaatcaaacttaaccatcacaagtttctcggatgaagggaatattagacagcctgggctactggttcggacgcggtgggggtttctaccctgaaaatacagagtaactgaaataaacgagtgcttgaatgggaaatatacagtaacaaacaaaccacataaaagcaagacaatattttaaatatatgatgttaaccttagtctagtgttttagcatactaaaatggttatccaactattcgtagtcaaaactaggaacaataaaaatcttctatctccagtgtatgtcttctctctgtcgcgccatttaaaactgacaaagcaactatttacttatgttcactctttcacatatttatttaattccatactttcatacataaatgatgatttatcaaattgacaaagacaataaggagacgtgtaatttggagacaaaagatttctattcaactaggaagcattaatgggctattaacctttcatttgtttctccatgcctcctagggtcacacacacttttgctcatgaaaaaagaacatttaaaaataatcctttgaatctttgtctgcacatgtaaatttggatctcctatttctttgagaaaaaaaatgagtagtagatctaatgccagtacaagaaacaaagctacagtaacaattttataagttgtagaactgcaagtggtaatattcactacagcttctggataagagaatatgtttttgaacacttcaaaactaaagcggcgtttgattggaggtaataaaatagaatggaaaagaaacaagttttattccattcctttgtttggttgcactttaaagtattagaatatcattctaatgaattgatttttccatcattttgatggaatgactattccattttcaaatagaaagaaagactacttcaatgcatgatgagaaaaaaattaataataattttttatgtattttaaatttgattccattcctattcccattcccattcctatttttatttctatttctatgttttcattccttccaaccaaacaccaccttagagtaacttaaattaaagtctacagagatcacttgctagatatggttatgagcttggtacaactacaacataagcatactactgcaataaaagagggcattttctgagcatagggacttcgtttgggtaataagatcaaaataggtcaagataatgctaacactaggaaacatctctcgcatcttgtggcggcaccacatgtctataaactaccaaggcaattcacagcttctaccaagcaggataatgcatcactaaccagaatcttctaacaatgttactcgggccttgataggttagggggaggaagggtatctgataaaggatccagtgtgataattttgtgaatttgggagagcctagctttattaggagagatcaagcctctcaaaagcttggaaccttatattcatcaatgtttttccagaaatttgtctttgatagagaagaaatctatgtcagaaactagaaaaataatgacaaacacgacactcaaattcatgagaaggaacagacgaaaaagataatatataagggaacagacccaagaaaactaaaccctctaacaaggaaatgaaaaagccactgacaaggaaatttccaccctcctaagcccttgagagagtaaaaaaaatcgtctttcacatatttaataagaagaaatatatatcatgagtcaggatttattaaataacatgaaaaggaaaaataaacgaaatggaggacgaaagctccaagatactagagaagggctaaggattaaggatggccttgcatatccaacaactcatttagacctttcagtctttctaatccttcactcatcaaaaaacgaattcgttgcttgtcattgcaattcttgttattctccatctcctgcctaattgtcctccttaattcccctcgagcatgaggaggtgctcttcgagcagttcttaatgctttcctgtagagcttaaatattcgagctcgtaatatgaaatcctgcaaactcaacgaaaccaccatacctcccttcctaaccctaaattacaagtaaatggtagtataattatcctctttcacatatttaatgttcttcatttcaagaaagggctcaaatggaacccttcaaatcaactaagcaaatgaccaaaggaacattcatgatcatagcaagaaaataattatcacctataagcatgcactgtcatcacttcatataaacagcaggaaataaacctaaagacaactaaaaggtgcatacaattacgagaaagaataaataaatatggccacaattttagattagaaagaatgagattctaccgttgaattccttctccaacttccattttgaaaaagctcccaatcttgacaagagatccaacttcttgtgatagattatctaataccgtctacagagaatatatttaaagcattagtaatcatttgcaaaatatagtttcatatccaaaaatccataatgcatgaatgtgctctcctacatcgacttgtgcattatgtagcaacatgccgcaattcatatataacaaagcagtctggctactcaagatgcaatctaacaatgtcatgatataaaacacgtgcgcagcttcttggaagatgcaagagcattaaatttgatttaaaaacagttatgggaaaccaaacaaaccatctttataaagaaaccttgatcaaataatcaggaaacattcattccaaggaaaagctactgataaaattaagaaatgctaaagaacaccctagggtgtccaacaccctatacatgcaaattaatattgggtcccacatattcaactttcattaattttaagttgaaacacatgagatctgctactgaattgcagctagagcgaaatgccatctttacggtgttgagcaccctaggttgctttatagcaatgctcgataaaattgggttccctacaagattcaatcttcactttaaaaagttggtcacattgatccaatgataacttggcaatcataaatcacaaatctagttgtttttttttttttttttgtggagaatagagtgaaaataatgattctttactgaatttattagttcatttccgagtttgtcacaaaattctacatgagacactagtaatactactattatgataccttcacgtttagatcattcataataaacttctgctccataagcacaacgtcctcataatatttgcgcaatcgaccttctaccatcttttctattgccatctgagacttcccagaactttcagcctaaaatagaaacaaaatacgttataaagatataaatgtaggcaaagctaaaatgaataaatccagattatatttgtgtcaggatgccatggaattttaattatagccatatatgatttattgaaagcccaagtaaaatgttatttatatcaactttcccctatataagaaaagggtgaaaatagtgataagttcaacatgaaacaatcagcaaagggttaagagcaaggacaatgatgatagttccgaatacagaacagttggtatattataacatgaattagtttcaatttaaagatattcgagtttgaatcagaactttctaactattgctttatgcttccaatttggctagtttctataagcaatcgcctgtttccttactttatgaattgaaaatgttttattcatttgtttgttagactcagaaattgattaatcacaagatttataacataggaattggacctaagtgaggaacaccactcctgtggttgtgattgatactaaccaggtcgacaactggtattatagaattctcaattatgaccttagatattcaccacccaacatttcctacacttgaaaatttggtttccttatgaacattttcataatctgcaccaaaactgttatccgtttcaatccagctcttggccggcgtctttttaacccctctacttttcatcagcttccttatctttaaggcgtcactccaccgtccaactgctctatacacattagctagaagaacatagctcaagtggctatcaggttccattttcatcatttttttggctattctctcagcagtattggactcagtacaagaagtgcaagcacccaaaagaactgcccaaagagatgatg

SEQ ID NO: 37101 - DNA, 4968 bp, Cannabis sativa
  modified_base (770)..(776): a, c, t, g, unknown or other
tttaagcggtttacgaaaatatatatacattcctacctcacacttaatttttggtgtataaaactcacaaactaaccactattctgatattttattaaaaaaaaaaccactattctgttaacaaatcacagccgcatccgtttatcccagtaaacacggagccatatggccccatttaaaaccaatgtgccatcacactcatataatacaatctaacttttcctcaaaaaaaaaaaataaataaaaatataatacaatctaactttaaaatgacatttttctaattaaagtggcatttttgtaaagattgtgaactgttagtacttttgtaaaattatgatgcaaatgtgtattcgtttagttcgaactttggttgggctttacaggaacctgtttagtttagttcaccgcataccactcgcactcctttctttcggcacattcgtttccaccttccgccacggccacactacaccactcatagaaaccattgccgtcaccactactacttctgtaactagctcgagacttgaatagtaaagagggaggagaaactctatacccaggacctgcaatggaggcgccgtctttttcttcttccacttcatcgtcccacttgctagcttttcgatcttcgtcaacttattctcgtgtacttcttcgctctaatatccaaaagaatcatctcaatttcaaatctttcagaaacttctctgtccgggcctcttccaatggacattcaggtagtctttctctctctctctctctcnnnnnnnctctctctctctctcatatatgtaacttactaagctatattcaactctttattcgtattaattggtttttaatattcagttgtgactcttctcgactatggagctggcaatgttcggagtgttaggaatgctattcgctaccttgggttcgacatcaaagatgtaatttttttagtgttgtaactatcatctttcgtttgacattctatctattctgttttgattttggtcgaaattcctaagatagttttgaatgagatgacaggcttagctaaactccatttattacacttaactatataaaatttatctgttgtcttcttttataattcatttgaacaattttgaatagataaattggcgctgtattgttagtttctatactcgaaatttacgtttggtgtagccattgatattgtgttagtctttttttagtggtttgcttttattatgtttgtgatgcaggttaaatctccagaagacatactcaatgctgatcgcctgatatttcctggtgtgggagctttctctccggctatggatgtgctgaacaaaaatgggtaattgatttttcttttatgtgtgtggttttactagcacagttgcttgtttagctaaacaagagtgggaagttatagcatttcaaattcattgtaggatgggtgaagcacttcgtacttatattgagaatgaccggccattccttggcatttgccttggacttcagctactttttgagtccagtgaggagaatgggccaggttagtgttttgtatctcaactgttgtgaaaatttattttaagggattttgctatttgttatctctttcgataatgcaatgaaagtttgttcaacggtgttcaactgtacttctctttgtcactttctaaggtcttttattgtattatattggctgtctcacctgttttaatgattgtgacatgccactagtgaactcttatattaataatgttgctgcgatagtggcagaagatgcttatcataattattagtgactgtaaaagtgtaaatctagagaggaaaaagattgtcggaagatggtttagaaacaagaaatggattataggctccagaagccagaagcacaaagactgtaatgtgtattaatgccgtccaaattcaaaagcgatacctttttttttgtttcccttatatggcacatacatacagcctgtatttattcacacgttgtaaatttttcagtaaatggtcttggcttgattcccggtgtggttcagagatttgattcgtcaaatgatttcagagttccccacattggctggaatgctttgaagataaaaaatgattctgaaattttggatgatgttggagatcaccatgtttattttgttcactcttacagagccatgccggtgtgtttcttccctggtttctttgttcttatttattttaaaaatctgttttccttgttcttgttattgtcttatgcctaaatcttctgggttgcgtgactgtatctgttttgtagtcagatgaaaacaaagattggatttcatctacctgcaactatggtgatgatttcatagcatctgtcagaagggggagtgtgcatgcagttcaattccatccagaaaaaagtggaggcaagatattctttattacctcaattttcagtttatgtttgaaatagtagtccaaaatgtgaagctttcgtgaattcctctactaagaaggaagacaaaatgtcctggtttgcatccaattgtgtcaaaattgaaaattcagttgttatatcctttagacacttaaatgtgtgcgtgcacttggtttcttatttgggtgcaatacttgggtgagtgaattgaaaaatatttaaattgatctagaaattagattcatttcttaagtattggacatttaggtgccgtttagttagaggtaatgaaatgaatggaatggaaatgaaacaatttttttttcattcctttgcttgattgcattttaaagtatgtagggaatggagtttgctgatgtagaagtgtgataagttttgtactgattgttttgtaatgttcttactagaaaaaatttaataatgttttttatcaattttttatttatgcattttaaatttgattccattcctattcctatcccattcattctaaccaaacaccaccttagtctctctcacattctttctgaaatgtgtgttaaaaaatggcagaatgcgtagtctttgttgatgccattttccccttcccttcaactattgatatctttgaattaaatttttcagatgttggtctttctgtattaagaaggtttttgcaacctaagtcaactgtgacgaaggtagcctcctccgttcatcctcaaatgtgtgctttctatttatttaatttgaattatctaacaattgatgggtgttaatgcgaagacagaagcctattgaggggaaagcttcgaaacttgcaaaaagggtaatgttcgtcaaaccaaaccaagttggaagttatattctttgccaaaaaaaaaaaaaaaaacttttgaattttttataaggtttttggtaaaagttttcatgtattactttgttgatttgctggttaaaaggtatcgctaaattgtatcactgtttgctaggtaattgcttgtctagatgtaaggacaaatgacaaaggagatcttgttgtaaccaagggagaccaatatgatgtaagagagcatacaaaagagaatgaggtactacagtagttttaactattttactgtgctttgtttaggttttccaatgtttgattttctggtgcaactgtgtggagtcttataagtaaaatactcctttgaaataatatgccatgcataatgaaaaccacaagtagaaaacaaatgtgattgctgtggaatgttattttccttcttcttatttcttgtcacatgccctattatatcttcaaagtattattattgatctcattttaatggaacagattgcactaaccactgagttggtacatggctttttccagttatttagttgaatggttttatcagcattttgagatgcaagttattttattttggctctcatttactactaactttggtaggtgagaaacctgggaaaaccaattgagctggcaggacaatactacaaagatggtgctgatgaggttactttctaaattttggactgacttccttatgattgattatcttcatgacactgtggttaactatgcttgatgtataattgtatattgtaggttactttcctaaatataactggtttccgtgacttcccattgggagacttgccaatgttgcaggtagcattttaaatgtttcgacattaacctttttacttaaaaataatagcgcagggagcactcaatttcagtatttagatatacttgtatatatattctttgttgtttaggtaatcttgtacttgtaatacaggtattgagatgcacgtcagaaaatgtttttgtccctttaacagtgggaggaggaattagagattttactgacataaatggaaggtatatcttgaacgcgttcttttggttgtgtattttggtttaatttatttctcaacttctcagtatatgttttttttcttttaaaagtgattttacatgggagcttacttcttacagacactattctagcttggaggttgcttcagaatattttagatctggcgctgacaagatttccattggaagtgatgctgtttatgctgcagaagagtacataaaaactggagtatggaaatggtttccaatattgtattttattttacttttagtatgataaaaatctttattaaggaagtaacagagaactaaaactagagcactacattattgattccaatatttatcttacggttttgcatctctctgcatttggactttactgatgtatctgtcccttctgatgtctttgccttgtaggtaaaaactgggaaaagcagtttggaacagatatctaaagtttatggaaatcaagtaattcactctctatttatagatatccgctaatctatgcttctttttaatatggaacagtagcttgtattgaaaatgagggaaccatgtctaaagtttactgactacagtactgaacataacaaatactcaacattttattggccttaatttttggatcatctgcagttcaattttggtgtcagtttgc

SEQ ID NO: 37102 - DNA, 9084 bp, Cannabis sativa
tgttgtggcattagaaggaaccaaaaactgtgtaataattgaaaacaaataattgatttgcatagtatgtgtagttgtaaagcagcatagaatattggaatgtcattccaatgaaatgaaacagtttttattttattactttatttgattgcattttaaaatattggaatgtcattctaatgtaatgactttttcatcattttggtggaaccactgtttcattttgcaaaggaaggaaagaccattcaatgcaaaatgagaaaaaatttaataatttttttgtgcattttaaatttgattccatttcattcctattcttactctcattcctattcttatattttgattctttccaaccaaacttagagtagttgactgactagtgagtaagataattcctcagtttcttcttcttattaatatgattcttgaggcattatatataagattagccaatcattggtcatgcataatacatatattcataggttcattggtacttagacagttggcatgttggtttataatagcttgtggttggtgacttattattattttaacttgcactccagtgaagaacttcttctccaagaggatgggtcagatttggccagcatcactgctgatttcagcaacggtatggatcttggttctgtagaaccgttggttggtcatggaagatttaaccatccgtcaagtactagctcgagtatgcctttccagaggtgggtcttgttgtgtgcttctgtatatgtacggaatttgttagttatttttgctcttggatttctgtgaataatacttttgacaagattttggtttataatgtgatttgtttcagacaaaacaacgggcatgttcaatcatttgacgaaacacatgctggatattcacgtgtggcatctaaaccttctcattggatgcctcataataattcacaaacttcaccaagccgtttgggccagcaacatcagcggttcaatcacgggtctcacgggagacccatcaatacaagtagaggtaacgactggaatcattcgaaggtcctaccgccttcttccagttataatcctggagcagcagggggaacaacacatggcacatttaacaatggcgtctcgtggggtatttcctgattcttccttatcttttttcatctcacttaccttattctctcttagcactttaattaaaattgtaatcgtaacaccagggcgtagggtcaatcatcctgtctcgagcattccaccgacatctcgtggaagaaaagactacggaaggattgcctaagttgggagtagacttagtgtttgatgagagggatcggattgtgttttgcatgttaaacgagaatgtcgttgatagtatttcacccgagtagtgtggtccgaggctaagaaaaaaaatcgtcgtctcatctaagttgggagaccacaatcattcattaagcactcacgcacacataatacataggcataaatattatatggttaatgatttgctaatcgtcctagtagtcgggtgcgtgttgtgttgtgttgtgctcgtgcaatcaatcaatcgatcgatatatattctttttcactgtgatccttcaatgggcgtcgtcgagttctgtaattctgtttatgcttgaaacaagtataatttatttttatggttaatgtttgcctctctgtttagtttgcaattcaattcatttggtttggggttttcatttttaaatcatctataataacactattattattattattattaatgtgtgattcaatttggttctttgataaagttatttaattgtgttgttttgtaataataatatgattatgactaaaaataatggcatagaactgtataatattttaaccttttcttcaggtgaaatcaagtttgaagtagcagcagcagatcaaaattggcaaagccaaagctttaaggttttgccataagttaatgtaaagagtttatttattatttgtactatggattaaaagacaaacaacattacaacatatatatatatattgtttggttcatttttggcttggctaaggttgttcaaacttcaaggtatgacgtttgttccgttacaattaaatatgtatacgtatgtatgtacacaacacaacaagtgtctttttgtatacgtatagaaatttggatgataatatatatagattaatattattttattttagatcttatgttttgtaatgtaatttgattttttgttttgtaaaataataaattagattttatattttttaaaatagtactttttatctcaatataaaaaatgtacaaaaatataaatttaatttattatgggtaaattttgtaaaataaaaaatttaaaataatattactaatttggtttgtttgtggttcaagaaatgccaaatattatttatcaaaataaataaataaataaaattggctagaatgatcatcatcattcatcataaagagagagagagatagaggtattgaagattttggatacatgtaatgtaatatatggcaaagcacaaaccacataaatcagaaccccaatatctgtttcaaccaatcatatctcatcattctatatcttcttctaatttccctcttttttattttttatttttattttatttctgttcatacaaatggataaataaaataaaataaattaaatataatattatttacttggatttcaccgcctatgactatgcaaccttgttttgttgaacaacaacaacaactactactcttaaccatttattaaagccactagtttcggtcatggtttgcccagattagattagattccaatctgggatttaattattattgctaaagattcaatctttgaaactgggttgtgatgattagttgaatctattgtctctaccaatggctacagctgctgtaattggtctcaacactgctgctgcaagtggaaaaaggcttctgtgttcttcatcatcttcatactcagatatctcagataagctttcttttgttactaataacaatgataatcattcttcttacttacctaaaaccataattaatgctgcttcaaatttcccatcttcaaagagcccccaaaatcacaaccactcctctcagtctcaacccattagagctcttaaagagaatgttgatgttgtttcttcaagcttatcacttcctcctcaacctcaatggtttcatgattcaagtgatttagaggcacttcttttgttacaaaaatccatgcttgaaaaacaatggacactttcttttcaaaggaaaaacaacaaagaacagcttccaattacttgttctggtgtttctgctcgtcagaggaggattacatctaggaagaaagcttttaaaaccacaacaagttccattacctctgctgcttttaatcttcaaaatcattataggtttaagggttatgttaagggtgttgtgtctgaagatttgctctctcatgctgaggttgttagactatctcatatgattaagattgggctttccttggatgaccacaaaaccaggtattttgttgtttgaaattgttttgttgatttgtgtgttgtgtgtatggatggatgaccacaaaaaatatgatagtaaacaagttgttaacttattcgaagaacagggtcggtcctgaaatttagaaaaatgtgaaaattttaaaaattgtttcattaggcccttgtgataggcacaggcttagcatgtttatgcccagggctgagtttgccgaagagcatccacaactaatctttgagtaacacgaactaggggcattcctgtaaatctgaataaaagcttcgatcttaaaatcattagagaaagggaactctaatagtaaatacactcactcacagttgttaaatcctagtaacaagttccaatctgatgttatcatcaatgtcacgcaatttgctgtaataacttgttatcttttctctaaaagctttttgttttttgttttttgatgatgatgttttagattgaaagagagattaggatgtgaaccttctgatgaacaacttgcaacttcattgaagatttcaagggcggaattgcagtccaaaatgattgaatcttctttggcaagagagaagttggcaatgagcaatgttcgtcttgtcatgtctattgctcaaagatatgacaatatgggtgctgaaatggctgaccttgttcaggtatgttatctcttttgtttctatagctaaacttagttgaattgtaattgattagatcataatgttagtgcccaagtgattataaatcactaaccaattccatattttggtactctatggtgccaaagtctcactagcttatagattattagttgaactgtaatggattggaccataatgtgtagggaaacttggctagtctggttcgattcgcccaagtattcgagaacaaatcaaagagaaaatgaaacggtttttctttaatgctgcaagaatgtaatctgtacaagagttacctctaaaacctttataagtgtttattaattgacttaggatttgagctaaaagacctgagctgttaaccaaagattaacactaaataactaacataatgatatgagaactatcaaccagtaaggggactaccacattggtccattagagggtgttggctctgctctcgtaccatttgttacaaccactcgggtaggactcactcctaacgatttgcataagagaaaaaggtgtccaagctgatgtaaaccgccaaccaatctcatttttagtcgatatggattctaatctgtttctgctactcttttgtagggtggtttgattggtctacttcgcgggattgagaaatttgattcttccaaagggtttcgaatttcaacctatgtctactggtggatacgacaggtaaagcagtttagcataagtaaataatcttgataacttcggtttggaaaaatcatctgttcatttacattttcggttgacaaaatctaattgctaaaacattcctctaagagattacattgaatttgtattctaaagggatttgattggtctaactcatcacttcgattatatactttcttttctagtttttagtctagtttaaaccaatttttgttcgttttactcaaattgcttagtattgatttttatataattaattacttatttgattgtgtaaacttgcacttgcacacactaattttcacaacagatctcatataatagtatttgtacttcttatatgtatacataacagaattatagttaagaatggaaatgttttttctaattttggcagggtgtttcaagagctctagtcgaaaattcaagaactttaaggttgccaacacatttacacgaaagattaagttcaatcaagaacgcgaaactgaaacttgaagagaaaggaataacaccatcaattgatgtaagtttcttgagtttaatttgcttgttatgtaaagtgaaaatggccattcttatatgttgttgtatgttattcaacagaggatagcagaaagcctaaacatgtcaaaaaagaaagttaggaatgccactgaggtattcaactctagaaaattctttctatttttgtttgtctgtttgtttgtatgtctctacttactaatatgtctgtatttgtaggcaattagtaaggtattctcccttgatagggatgcattcccctctttgaacggtctacccggtgaaactcatcacagtgtaagtgtttatatgcgctccaaagttctcgtaccatcctagttttatccagggtcggccctgaacttcagtgggtcatgggaaaaaaaatatttaggccttagacacaggtctagtctgcttatggccagggccgagtctggtcttatcttctcatttctcataactattgaccttattttctccttcaatttttcagtatgttgcagacaaatgccccgataacatcccatggcacggagtagaggagtgggcgctcaaggtgagacgaacaaacacctcattgaaatttcgatatcttcatgtttcatgggaatggagattgagatatagttgtgtaaaacaattgcaggatgaagtgaacaagctgatgaacacgacacttggggaacgagagagagatatcatacgcctttactatggtttggataatgagtgtcttacttgggaggatattagcaaaaggtaaggatattaaagttattagaggttggtgaatggtgatattgttgcagggccgactctgaaacttagtgggtcataaaaaaaaaattataaggaggattttttggcgcttgagctaggtgggccttaaggacaggcctatacccagggccgggcctatgttgttgttgttgttgacatgtttgtgtgtgtttttcggtttgtttttcagaataggtttgtcgagagaaagagtaaggcaagtgggacttgttgcattggagaaactaaaacatgctgcaagaagaagaaagatggaggctatgcttgtcaaacaatagaaagaaattatacagagactgtatatatatatacagagggaatttgtattttccaatttgttttcatttcctaatttggtgaatttagtatagaaggggctcttaagagtaagcatacaatgattaaaagcttttgtaagttttaagttggagcattttcttcttattctttttcttcttcttggaaataatatatgtatgtattgaaattggtaaacaagaaaaatatgaaaaagtaaacaaagacaattatgtcactaaaatttaattaacaaaaaagttctaatagataatttttttgagttattacaataaataaactcataatgtttaatgattgatatttcattagttacaaacatacattttaatagacattgaatagtggagtgaatattattacaattagatacactaaatccaaaaacattgaatagtactatactctctttttctcctctctaagcaattttataacaacattaaattttgagattttatatatagtttaatttttattaaaataataattttagtgatttttttttttttaaattctcaagagtattcaattttttaccactacagcaaataatatttattatgttttttttattatttaatattttatctatatactagtaattttttttttttttttataattttgaaacctaagcgtttagaaactcaaaacacacgcctgactctcttatcctcacgaccaaccttaaagggatattcctagtaacataattttttgaattgatctggaatactaagaaactagttgttggactaatcttacaatgtcacttttttttttttttcgagttacacacctaaaattcaataccacgaatctcgacatacatacacttgataacagttaagagacttgtgttatttggcttagaacatcttcaacctatacaccaaattaaattaagtgtcacactatcactaaatttgatattaaaaattttttttactccaacgacaacattaaaatttacactaataaaatataatatattttaacattaaatcatatatatacacaaattaactataaaataacaaataaaaaaggaaaataaaatgcagttgctataatactgtagctaaaattgcaatatataatgatgaaataatgatctattagggctcgtttggtacgtcgtataagagtcgtattgtattaaataataaataacactatgtttggattaagcaatgtattgtattaattattacaactaaattttttaatacaatatatattgtattatttaattcataataaatgatccgtattaacttttattataatatttacaaagaatttggagtcaacaccaatctccgacctagacccgaaccaagaccccgaatttcggacccggtcccggacgcggacggagacccgtagttggtattgggatcgagtgtattaaaaatatattataattttatacaatcaattaatacaagtaaataccaaacattgtattgtattaaataatactaatataatgcaacacaatttaacacaatagttacattacaataacgtaccaaacgagcccttaaagtaatatttatactacaacctcaaatttgaggtattattggtgttactcttagaagagtactacttccttccactcttcactagatagtgtcttaaaatagaaatattgcataaatagtggatctatttgagtattcctattcaaccttggatcttgaaatcaaaccccaaaaatatcataataataattgaacaaaatatcaatacatactttacttccatgccacgtgtcacccttttaaaagatccccttttagatccacatgtacacttactcaaatcaaaatcaaaatcaaaaaaagaaaagaaaagactataaaatatcacactcacacactctccaccggtgccggagctaacctcaccggagaagttgcagaccggaaaaaatggcgaaatcttccacccttttctcccattgttacgctccaatcaccttcaccaccaaaacccatcatcatcaccatcttcaccatcgtcatctctctctaaagactcaacctttttcctcaactccactcaatctcaatcaaaaactcaatctcaatcacaacactcttcatcatcatcatcatcatcatcatcatcgtcttcattcttctcttaattccgaagttccacacccaaactctctaacccaatgggattccttaacagccaacttctccgccgctgcaaacattccctttctccttctccaacttccccaaatcatcctcaacgctcgtaatctcatcgccggtaacaagtccgctcttttagctgtcccctggctcggaatgctcactgggttactaggaaacctttcattgctctcttacttctccaaaaagagagagaaggaagtcattgttgttcaaaccctaggtgtaatctcacaattcattgtctttggtcagcttgcaatggccgatgctatgccttttccttacttcgttgctaccacagtgctcgttgtaacgggtttggctgttaatttctt

SEQ ID NO: 37103 - DNA, 5589 bp, Cannabis sativa
ttaaatgaaaaacatccacaattgatgccctaactacaaacttgaaacattgaacataatttgcaagtaggctactgccaaaaggttcccctgtttattatgctagcttatgtacatttatgtctagagaacacttaaataatgctctccttagaaagagccattgccaatgatccataaccaatcaagagcaactcctgcgaatattcctccaagaagaaacaccacaaggatatttcccaaagcattttgctcaggcccctgtgaaattcaatcaagaaactcaatttaaaatctaaaaataaaaattgtagcagtgcttatcttatataaagataaacttacacagccatcacatgtagttaataaaaggagtaccaaccttgtaaccctttggtgctgcggtaagaacacaaacagtgaggtaaccattggttaaccccaataaagagatgagcattatcatccatccctggtcaccatattttgcagtgaaataaaacgcaggaacgaacaagaaacgactaataatcgcaatcgaaagcccctttctcgattccaacttcaaacacttcacaagaggaatgtatctcgatatgaaatccaacaagttgtacatagccactagtacaagtggatacctggaccattaccaaattccaaccatgttaacttatgcataattatattttagaataattcataaataaaatgtaatgtcataagttttaccatgaacccaagttgtgtgttccagtattttcatacaagaaaccaggaaaaatagacaaagtcaacacataaattaggaacaagtccaagcagtaatcgatgttctgtaagattagttgcttattgctcaatcgttgtgagaatttggagttatcttggttgatctgtacaagttttataaattagaactattatcatatgatgagttttgaagaatttgttaaagaaaaattagaaagatggatgctcaaggaagtagaagcattagatagaacaataccccttggccgtctccagcagctgcaagatcagctgccacagttttcgatccttctgaggctgctttcttgcggaagtacctcacaattggaagcttaggaaacacaaatgcgtatagaagaatgcagaggaactcgaagaagctggcgattgctaaaaataacactgcaaattaagaagaagccatcatgaatcagtaaacacataatagggaggaattaatatttgatatgaagattttacttacgagttcccttgcgaaggccatgctcagttttttccatggctgcttttgtgactaacctcaagacagaggttagaacacctgatccagccaagccagcaaaaaatgactgcactaaaatcatcaaaatgagaactctaaacaacaaaaattaaggagaaatccttgctgctctttaactacagtgtgtgatgaatacaagtcgtcatttgagtcgaagaataacctgcatgaattcgggtagcatgaaagccaggtctcccaccattccaccttgaacatgggcatctgcaatcccaaaggcagcaacaagtacacatattcctacataaggccctactccacccctcccgcttgtggccaagtcaacctgtagtgtaaaagcagaactaagatcaaattcactggaatagaatccatggcaacatgcctaaagtagagagttgagtgcttacaactatgaggaggaaggtacttgcgaagaagagagtgtaaccaaacaaattccgctttctggtatcaattttggcctcgttgtatgctagtattgccattgttccaacagcaaagggttgataaacaagggtaagtacccgagaaggatggtaatcctgccaagtaaatggttgcaaaagtcgtttattaaactttttagaccccatcattatgtcagatttgtgctaatacttagtcacttttacattaaaacttattgctgtctagtgtctgaacaaaacagaacccaatatgttgaatttattatatgaaaatagctacaacaagtagttttttgccccatttttcagaggtcaaaactgtgagatttaagtgttaaaaagattgattttcaatctttttcaagtcaaatttagctatgaacataacacttactggaaataatgcataatagtagtctgcaatggtgagcatactattccaagaaacaagggaacccaatcccagaatccagcaaactagcactgctacattcttcccctgttcatccagaattgacagagtttatataaattaagagactgatttcattacctctaaagcagaattttgaattaaagtttaaacacgaacctcatgcctcacgttcccagtaaccccagattcatcaccaattgtcatgactgcacactctgcttccaggctattatagttacaagacactgcttcactttatataaaactccaaactattaatagaacaaaaagaaagaaaaaagaaaagtaataatttcattgactgtaaacagaagtgcggcactttatatgaacatcaaatagaacaataagaaagaaaaaagattaaatgatacatctgttaaatacacttaaaaaaataccatgtaataatcattccattgactataaacagaaataccgcactttaggcctaaaagttaaaatataacatttatataaaatatgaatcttatgtactcctttttaggatagggtgtgaaccactaaaaggaaaacagcaagagagaattggaaaattcaaagccaaagagaaagaataataaatctgattttaagtgtggtcgatgaaagaatgaccggtggctaaaagttgaacatgacccaacctttttgaaaagcaagtgtagactgtagcccacagcaaagaatctttttgaatcattgaatagtagtatatgtatgtatagagttctgcattctattattgtgaatatcccatttctttaagtaatctctcagcattaaatttgagctgacaaaactacatagctaaatagctgtataatcttaaagcggcaaatacaaaagacggaagaaacagctcaaaaatgacaaaccaacaaaaataaaattgtcaacgctttcgctgccttgtggaaaatgatatcatattaattgaaatttgagcttagatgaattaaatgaagaaccccatcatcaacaattaaataataaaaaatttctgtgattaagttcttttattgaaaatggaaaaaagacaatactttctccttaccctggcataggcattttcccctgtagtccactggtttattttgctgccaacgaaggatacaaagagagtgtgagattccaatttccaaccctatgctatacaggcttagtactattattagagatcagaatcatcagatccgtgaatttagaattctgttcctgtattagtagaagaagattcacaatatacttatattgcttttgatttttattcactctatacacaaaacgtgtttgttttacttatttttatatagattattttataaaactaatcattcgacccttttttttagtattatacttttcaggaggtagtggaaatgaaaccgtatttaaatataaattgggcaagagtgggaattaaatctagctattccgaatttggtaggcctatatatggtatttggcgtgtaatttttgaaggtgtgaacaattatttgtttattataccaccagatatgcctcagagttggtatttgattttaaattgtttgtgtatcacaacgtgcatggcccgcactcctatatataaagtattataaattatcatacctcttgctgcatgccttgcaccattatataataaattcattaaaacaaagggtttttttctatcccttaaaaaaacaaaagaagaaggtttttccttttaaaatatagtaaaatgcattattatacattaaaatctctattatttttttttcttattttgaaaccacattaaaatccctgttaagaatttacaaaaataacatctaattaaaaaaattattataacatctattattcaaaaaaaaaaagtcctaattttacttaattataaattaaaataacacttaaattaaaataaataaataactaaattatattccgtattaaaccaacctctatgtaagattaatttttatagataaaagcgttattatagattcaaaaaataaaaacaaaaatgagagtgagaaaccaagcattttacattgacaatttgttatatagtgataaaccaatttctgtgtaagattaatattaattattagttggttatttacatattattctaaataactataatgtaattatcataaaaaaaatgaattaaaatactctccggatgcaaataaaacaaacagaaatataccaaaacgatccttaaataaaataaaaaaattagtttgtttacataattgattattatacatcctactattataatccaattccgtttggatgtagtataacagagaaagtatatactggcagggaatctttcatttctaaaagcaaaacatgattgttgatgtttgtaagtgctcactttccaaccatgttgtagttttaacttacatggacttttctttggtgatatcgattaggaactacttatgcaaaatattcaatggatcgaaatgaatcaaaattttggtggacatattcaacttaagattaaagtgcacattagatttgatcgatatacatctaatattaacccccaaactttaatcaaacctactaaattagggtagatttctatcgctaaactacatatatataatgatccatgaaaatactaccagttgaattctggaaagtgtcagttttttttttttttttaattttttttttctttctagaaagaaaaaatgtgaaaaaaaagtatgataaggagaagaattggggagatcgaatcaaattcatattggtgaaagaaatgaataacaaaaggttagtgtagtactttcatgtatgattttgttaatagaataatatattttacaccaataattgtgtctatcacatttcgttttctgattttttttttctgaaatcatttcgtattctgattttgataactacaaaataataattacaaggatcataggatattatcacaacaaccttttagacactaattgatgtgatgtgtgaatggttatttgttgtttcaaggaaaaaaaaaagaatggagatttgtcatttaattcaaaatgaaaataataattatcttttttctaatgaaatattgatctagagtttgactttccaatttttttttttcttttgcattttgtttaatttttttaaagggttggctgatatagtcaaagggcgcaagtaaagatgtgatgcgattatctatattttactaaggctaattaggattttgaactttgacatgtataaaatcatgcctcttgaatttttaaggtcattaaatgtcccctgaactatagagattgttggatttaaggacttttttccaattttagtaaaaaagtctaacatgtatgaaaattcaggggcataatttaatacatgtc

SEQ ID NO: 37104 - DNA, 2124 bp, Cannabis sativa
tattgagagaatgtaagagtagtgttcatcaaacccttgcacactttgtctttctttgatgtgaacattaaatgaatgggaagagcacaagtgaacataagaatttatggccattacttcaaggtaagagtgcattttattatatatctttgatgccttaaataagatgattttgtattgttttagattgagcataattgttaacgttaatctttccttttgttttgatgctcattatttattaacacatatatgtttcatcgaaaattggaaaaaaaattcttaacattcatattttatgtaaatatctcttcacgatggggaatttagttggactctattcctaaggaatacgtgatgttttttggaatgactaatcttggttcccttgatgatgaattaacaagctcttaagatttcaaccataaaattaacataattgcataagtatcttttatgaatttgtccaaaattatgaaaagattgttacaaacttgagaataattcataatgattattaaatatttcaaatcagaagatttcattgccaataaaattcaataaacattttatcacttccaataaattcaaaaataaaattgattttaaaccttatattcaaatcaaataatccctacccactcatacattggtgggagggaatgcaagtatacaatagattactaaagcatcatattggtggttggggaatgcaagaaaggtattctcaagatatttgtaaaacatcaaatcaacgagttaaaaagttttgatcaacaatatctttagtaattagcatcaaattatttgaaaaggaaaaaaataaaaggtgtactttcaagagccatttattaagagtaacatggtcatggaccatgctctaaactctgcctaaccacaaaactctattttacttttgcttttaagtttcatctcaacaagagtaaagagcaatgtaagtctttctcttcttttattatttttttttagataagtttaggtaaattaggcctatagcaagttaaaaacaatggatttgtattgtactataaacaaattcaaaacttgacccttcttttctctttacccattgaaaagttttcaagtgacaagtatgctgagttttcaaaagagattataatgaaagtgaagatgtttagggatgttggattgctgaactacacaaaaaattagatagaaatgaaaatagtgttcagaacaacttttgtgattgtacagccattttcaatataggacaagacatgaatgagtggggaagggccataaggcataatgcccaaggaggtgtcaggatagtgtcaacaacagtccaagacagtgttgtttgtttgttataaaactcactacctaaactgaggttacatttagtattctctttggacatttttatttgattgatgggtaagtctttttaataaataaataaagaaagaaagaaagaaaatcaaaattggtgggtgaatagaatttatggcatgggtgaaattttttttgttatgttaatgtctcctaaacttataatgaatctatatatattttatataaaggagattttaaaagttatatcttacattttttttattgtatttttataatttttgagagctttaagctgtcactaaagagaaaaattatatcatttttttactaatttattaaaaaattacatattatttaaaaatactttaggtattgttcatgaagtttataaataaaaatcttattttctaactttaatgtaacttaatattagttttaatttattttaacagtgattgattaatgtcttactctactaataaaaaatttatagttcaactaatatatcatttatatatttaagtttatttacttatattatattatatatatggtgttcagataatttatttctaaaaaaatattatttttatttcagatgaataatatagtgtaaaaaagctactttatttttttttttatttataaaagtaatcttcaaacttttttaaaaagatttaataaactaaaaagaaattagtaattttaatttatagttcaaaaaatatatttattgtatatttagatttatttacttatatttatttttaagattaattttta

SEQ ID NO: 37105 - DNA, 2393 bp, Cannabis sativa
atgttgtctcttgtaaaaaaaaaaaataaaaaaaatcaatcaaaaaaaaaaaaagtaaatcaaaagaaaaaaaaaagagaaagaaaaatcaacaaatttgcattaacaagtggaccacatctttcattgcaggcctttctcttggatactcatgagtacacaagcaagcaatcctaaaatactcctttacatcacactcaaccaatccttctctcgaaatatttacatctaccatttccatttctctgttttgggccaccattttcctggcccattccacaaagcccatttccacaccatcaaacgccattggtaaattcggcctcttacccattgcactttccaacatcaatgtcccaaaactgtacacgtcagctttcaccgtcgccaatgtgaaccccgccttgtactccggcggcatgtaccccatcgtcccggccacttgagttgacacgtgcgaatgcgacgagtctatcgttcttgcaagcccaaaatcagctatacgggcctcgaattctgagtccaataaaacattgctggcttttatatctctatggataatgggcttttctagcccatgtaaatagtccagcccattagccactcccttaacgattttcttcctcgtggcccacgataacggtaacgttagagtctgttccgttgaagaagacgagtcgtgaagccaaatgtccaaattacccctctcgatgaactcgtagatcagaatcctatccggaccggaaatacagtaaccgagaattttcaccaaattccggtgacggagctgtcctagagtctccatctcagctcgaaactcacgaaaaccttggaaagcatccggatcaagcttcttgatcgcgacggtaagaccgttgttgagcttagccttgtaaacgagtccgaagctgccgtcgccgacgatcaaatcagtcgagaaattcttagttgcgacgacgatctcggccatggagacctggagagaaggatcgaaggaagcgctctcgtcaacgccagcggcaatcgaagtcaaccgagaactggcggtgatgctgcgatggcgattccgatcgggtgagtgttttgccttcctggactgacagattatgattatggcggctaatattagggttatcatcaagaaactgcccatggcggcgaggacagcttggaaagtggaatctatggccatgaagatagatagatgagagagttggaatatatttttgtgagattgaaattaggggaaagagagggagaagtgaaattgatgaggaaggtgataaggtggagatgaagatgaagatgaggaatagtggtggtgatggtgatggaatgagaagtttgactgagaaatgagaaccagcagagccgccattaacggtaattgggtgagtttcgtggaagatggtttcctcttatattattatttattacaatattttactcagaaacatatattataattattttctaaaaaatacttcaacagtatagaaattaaaataaataaaaaaataaaaaataaataatatttgaaggtcaaagtcgtctggacaagaatggcttactcagtacgagtcaacttcatttcattattattattattattattattattgttattatttttcttctcaggactcaatcataagaacggaacggccaccttacgaccattttccaaaaaatttatgggtttttgtgattttaaaaatataatagaataatttttaatttattataaaatataaattcgtcactaattataaaataaaaataatttctaaattataattagttataaattatttaagtccatattaatataacatatctctaaaataattgtatattaataaaacatatatttaaacaagaaaaacaccttttcaaaaaaaataaaataaaataaaataaataaaacaagaaaaacaccatatctttagtaaaattgtgtacacttttatgataaggtatcattaactaactctttaagaaagaaaaaacatagcaattaagaataagttatttgcaattgcaaagaaaagatagactaaaaatctatacaccattttttttttttttttaaaagaaaatctatacgccaatatgatatatatttttaaaaattttaaaatagaatattttttttttaataaaaatcataagatctattaattaataaattcattcaaaataatagaacacacttcagaggaacaatccttcaactgaagcacacgacctgtagaaaaacatatcgttttacaaaacacaaattgtgaaggcataattaaataccgttttaaatcgcttggacacacaccaagctatctgtttccaacacgactctatcccacgaatgggttgcaatccaactcaatgcttct

SEQ ID NO: 37106 - DNA, 4535 bp, Cannabis sativa
ttttggggggaaggtaaggtgccaaaaacaaaacaaaaccaaaaccgtgagggcttaggcccaaagcgaataatatcatactaatgtaggagtcaaggtaaggtagcggcccgacaagttgaaagaacgaggcacaacccattccttgatcatttgttctgttggtgttgtgttggttcttgtttggagtttgagactccacatgccccttaggagtataccattatgttagtcataaagacatcttcattcaaatcttcatggagaaatgcattgttaacggctatagttggtgtagaaaccaaccttgaatggctactagagcaagtataagcttgagagaaacaagcttagtaacagaggcaaaagtgtcattataataaacaccttgttggttgtctcctctagcaacaagctttgctttgaacctttcaacagaaccatcaatattgtacttaattttgtatatccagttgcaaccaatagcatgttggttatgaggtaaagtaacaacaatacatgtgtcattatcttcaagagcttagatctcagtattaatgacattgttccaaatagatatgcctttggcttgattataaaattctggctcaaagtaactgaaaatagctaacacaaatgcacgaaatttgggagacaacctgctgtaatcaatgattttagaaagagaatgagaagtagagcaattagatacctgagatgtaacactgtcagtagatacacgttagcatttggtctctacttttaatttgaagtttgagacccttgatttcaaatccccaaacctccatggttgctaccattcataaattgggtgtttatgggtttaatggggagatttagatcatacaatctagttggcaacattcaaaagaaactctcagtcaaaggccaggctatatattgcccctagctttctggtgggaaaatacaggcttttggttttaagttaccagattactctaaattcatctcccaaatttcagtaacaaaatatatatgcacacccaaaatgttgtttcatttaatcaacattatatatatatatatatattatatgaaataacataacattcttctaattgatgaattgttttcacaagtaagaagcttacccaaaactatatttctttaatgaaagacaatgcaggaccacgtatattaatagtagagttttttttttttttttttaccaatatgggcattattttgttttgtccttttttatttttaaatgctaataataaccatttccctcactaccacacaatagtctatccaacagaaaatgaagaaataaatacgcaacttaccaccatacatttccaacaaaaacaaaaggaaggaagatatggtgagtggacaagtttcccatgagttggaagtggcagcaccggccgccaaagtttgggaaatctacggcactcttcagctgccgaaactggtcgaggaaaacctcacaactattctggagaagattgaagtagttgaaggcgaaggcggtgttggcactgttttaaacctacattttgtccctggtaaataatcatgataattactattaggaaagttaagaggattaccatcactttattaagtttattaggtactgttgatgagaattattggattcaatcttaaatttaattagtaataagtagagtagtctatatttttatatataattcgatattttactatttgttctatgtctacaatattgtccttcaatgttttactaaataataattttaagatagaacttcattattttcaacaggtggatcaagtatatataattagtagccaatataaaactttaatagtgtgtaccttctataaatgggtgtttcagtagattttttatttgtcttgacatattcgagaactttttagtctatttctttttataaacgcttatgttgtagctttttaagatcatttgtaaatttttagaaaatttctagtaatttacaatgcctaaaataacatttacatattttatttgaacacgcgactatacacatgataagcaagtactgtataaactttattttcaacactgtaaattactcagaatttttaaaaatttacaagtggtcttgaaattaatagctacaacatatgcaaacataaaaaagaaaatatattataaagttatcctgaatgccgaaacagataggaaaagttctacaagcagaacgatcttgggtctagtacagaaatttccataactaattattcattcaaattcattattgtagctattaaggcaaattaatttataaccaagtgaaaactgaaaatgatggatatattcttattgtatgatgatgatcaggtgtgttcaagttcaagagttacaaggagaagtatactaaggtagatgatgagaagctagtgaaggaagctgaggttgttgagggaggatacttggactttggtttcacactttacagaactcgatttgagatcattgagaaaaaagatgatgaaagtgcagctgcagcttcctccattatcaaatccactattgaatatgaggtgaaggatgatgagtattctgctcaaaatctctctctcgtctctattgatcccttagctgccatagcccttcttgctcaaaaccaactcactaataataacaccaattaatagtaatgcttaaattaaaatattaaatgctatatatttatatattattcctctcttttatatgatatctcttgttattttaaaaaattaatcagtgtggtcttttttttccttctgaaatggcataattcttattccaatactactgcacttttatttattaaatgatataatattttgtagtggtgtctttataaataaaaggttaggattttttcaattttacatttaaagtagttttttttttttaattaaaatttacattaactaacaaaacaacttaatcgaaaccaaaattcacataacaatttacataaaaactatcgaataagaaggtcaaggagcggcttagtgtacatgaatattatatcaattaataaataaaaagacatgcctagtaactaatttattatattttgactagttttaagttatcctattttgcctataacaaaaaaatagaaaaaaactttatcctattttgaaattaaaaattgatgcgcgcatagattcttttctgaattagtctacaagaacaaaaagctaaaacacattaattaattaaaatatttattggacaaccaagctaacggcaggagaatctcgaggcttgcctattccaaaatgcctaatctgtcttcttatatgaatttgattctacttataatgctcattctcaacaatcatctattctatgccaacaaaaacaccatttacaatttaatcaaacgaaaagaacaaatatggtgagtggtgaactttcctctgagctagaaatcaaggcaccagccagccaagtttgggagctctatgggactcttcgtatagcaaagctcgtcgaagaacaactcaaaactgttatcgaaaaaatcgatatagttgaaggcaatggcggtgttggaacaattgtccacctcaattttgtccctggtatgtattcatcatcacatctttaatcatttcattttttatcaaaccaatgttttaccataaaatattgctcaggcgcgacgaggttcaagagttacaaggagaagttcaccaaggtagacaacgagctgcgagtgaaggaagctgatgtgatggaaggaggataccttgagttgggcttcacactttatcgagttcgattcgagatcatcgagaaagatgaaggttgttccattattaagtccaccattgaatatgaactcaaggatgactatgctgaaaatgtttcccttgtgtctcttgatgcccttgcagcaattgctcttattgcacaaaatcatcttactaagacttaaaaaaaaaaaacattagacaatgtttcccttgtctccaacttctccttttcgtgttatttgaggaacaataatgttatatgttttttatggactccacacattagatatataactttgctatacatataatgttatatgtttataacgctatattgatatttttatatgcagtagtttgatgttattatgctaagtgtttgtcattactaaacattactacaggctgactaaacttgaatctcaacatagtaataattgtgtaaattgaactgaaggaatatggaattgataattatatgtaatatacaatcatatgagagaatacaagttgtacatatataattattatcccattcaattaattttatattaatttattttgttgaaaataactaatataacaatatctgtattttgatgtttgttttttttggtaaatcattgttgtattttgggtgtacaattaaaatcccacattgttatattatgtatataaggatgatcactatctcaactagcaggcccggctctgggcataggcgggctaggcctgtgcttagggcccacctagcccag

SEQ ID NO: 37107 - DNA, 4467 bp, Cannabis sativa
cacacacacacacacacacacgtagcacaacactcacacacacccaccgctcgcatgcgagccccctatttgcaccaacacactctcacacacccatgcacacgacgcttatccacacatgtacaacctctcattcttatgctcgtacttttgtcgttggatcaccacaagaccaatcatcgaatcgcacaggtgcatcctgagaattacgagtatcgatggtggcgttgtgaaatacataccgattaggtaatctcattgaatgcacttttgttaattgctctaagattagttaactaacctcaaaaattagcagcgctaattttaagggttagcatatggtgacaaagatccaatttagaagcctagttttaatattgttataagagattgtaccaaaaagtcatctttgttattgttaaattctattttgaccatctgttttaaaaatgataaaaaaaaaatcctctcataattacaatggtaaaaaatagtccccataacatatttttggtgatttttttcttttgagaaagactactaatgttgttaatttttaacaattaatttttcgaatcaactaaaatctaatctaagctcaattaaaaaaagaaattatttgaacaaagtttgacaaaaattgtatccaagagaccattttttacaatttttataaacaaatagtttttcttatcatttcttaaaacagagaaattaaaatgtagctaaaatagagtgaatcttttaagtactattcttaatacaaaaaaggtcccttataaaatgcaagatccattttttttcaatttatttaattttgtagttttttttattattgttatttttttttaaaatacaaatagttttataaatatgtttaaggtttcttttctatcgatgagggatatgaaaataaatatcagtttagataaaataaagagataagtggtgtacatgaatataaaaaaattaaactaaaaaaattttgaataataaaataggtagaaggtacatcagtacatctatttttaggtggtgcaaccacccaaagtttatttaaaaagtactttatctttagaagtatagacatgatactctttttaataatatttatatgatattttttaatctaaaattatacatatatggtatactgggtttcaaatttgaccattaaaaaatgaatttgaaattaaaaaaaacaaaaaaaagacagtttgatcttagttaaagatgtttacagtgtgcacttggtttggtgtatccaatctcatgcacctctatctaattctgtatctaaaaatatttagttcaaatttttgtacgatcgtatacgttatagttatttaagacatctaataatattttgagaaatttaaaaaaaattaacaagtcaaaaatagggctcaaagagtttgttgtacgcatgacttttttattttatatgcatgtgaaatgtgaaatagacggtttgaacaattatttttatattataaattattttaaatttttcaaaatttacagaatgttataaataactataacatacaagaatataaaaaaaaaaaactaaaatattcttatagatgtcgaaataattaagagttacatcaatgcacccattttaatgaggtgtattgtaaaagcactcaatttagcacaaattttagggacatcattggagaagtatctatatatctatataaaagagaataaaatagaggtgatgtgtcatgctaagagagtattattccgcattatcatttttttatatttttttttatttataaatttttagtggtttgacatattagaatttttctaacaaaaaattctacatggtttagaaacatttgtaagtgttgtattataggttatatttaggcgactatttcattctccttagtttgtctattttttatgggtgattaagtaacttagtcttgccttataagttcaaatatctatattttttattaaaatgcaacatattgatggataaaattttaaaaaataaagtaaaaatctatcaaaatctcaaattagtattacattactttaattttatgagtgattaaacaacttagtcttactcaatatatttaatatatacaataaagtattttacaattatttttttctcactaattttattaatatgattattctaaaaaaaatctaatatgatctaaaagtaattatgttatagactaaatctatatcgattctatatatttatgagaagaaaaatataaattaaatgatgagtgattttataattatttttgtatcatttatctattttattggagttttgatgagttttcattttcttttatagttttgtatatgttaaataatatatcttcttagtaacttttttatggtaaaagttctacaaagtttactaagacttgtacttgttaaatgtaagtgaactatttcttcattcactttaatttgtcaaaaaattaagattgtattggtgattgaatatcttaatagttgttataatatggaccattagatcgtgtttgattagatggagtgaaaataatgtaaaaattggtgtaaaatttgtatcccaaaaaacttgtcctattatgtaaattaatattcaactcatttaaagttataattatgatagtttttatttttattatgttacgttcaatatttgtgaatttatataaatgtgtgtgattatcacaaatatttttttttatataaatgcaatacacattttaaataaattattttaaattagaattatttatagtgatttaaattattcacaatgtagttatttgagatcttaataaaaaaaaattaaatggcttagactataaatcggtatcataaatattactttattcaacagttaaatttaatatgaactaagaaaatacataaagactaaactacacgtttttaaagtttttttaggaatttctttactaaggtgtaatatgctcatcgaatatttataaccaacaaataaaaataaaatttaaatatttttcttattatatatgaataactacaatatatttttaatacaggtaatcagattaaattaatttttaattagattttaaaaaaaatttccaaaaacttacccaatccaactagaatactactactcacattcaatctaattcaattgtaactcaatgtccatttttttttcttaattagaatggatttgattagtttagtgtgattggattggttcggtgtaattagatcataaatcaaatcacaattcgttattgaaagttaaaaagtgaaagttttaaaaataataaggtaaaaatatttgatacaattagacttaatttatcgataaattttatttatagaaccataatatctaaattataatttaactataaataaagagaatgaacaattattatttttaaaatataacaccaaaatttatatttactttattatataattgcgtaaaacgcagttatattactaatttttttttttaataaacatcaaaacataactacttatttaataatttacgagagatgctcttagtcaacaaaaattacttgacatagagcaaacaaaaaagtaaaaagattctcacaaaataattataataataataataattaaacattcaaaatgtattaattataactggtttccatcattacaattaagtgcattgctactttgcacgttgggtgaatagtaaagccagtattattattataagataatattttgggaatgattaataatattgtataatacttattaaattaaaatatataaaacttaatatttaattataattataaaaataatataacatctcatagtaaaatagtgaccataggcatctcttctagcggttaattaatttaaaaaaaaaaaaaaaaaaaaagaataaatatttttattagatattatggtgtctaatattactataagataatgtagtttaatgatattttatattttattaaagtaacaataatgatatgtgtacacataaattacatacaaatatgttacacacttatgtggctagtcatttttaataagtgagatccatcttatcgatcttaatatcaatgattagttgttacttgtcacataagtttgtgtcaagtttacgattaaattgttgacgctaaaaaatggtcaacttcgtattgtctgataaacgatagaagtaaatagaaaataaagaaaagtaaaaggaacactacaatttatagtagtttattctctatgtcgtgatgattatgaagctacgtctaggagtgttcataaaatatttgactcaatctaattcgcacgatcatatccaattcaatttgcaaagtgcggattggatgttaattgacatgtaaaagtaattgatttaatccaatcaacacatatttacaaaaaaaaaaaattaaaattatatacacaattaaaatgtaaagaaaataa

SEQ ID NO: 37108 - DNA, 2480 bp, Cannabis sativa
attaggtggtcgaagtgaaggtgggtttacattgtgttgattgcatcaagaagatattgaaggccattaagaaaattcaaggttagtactctataagagcaattagattctaattcatttttcttgaattggggttttcaacttcttgttcttgtttatttcagacattgagacatatgacgttgataaacagcttaacaaagtcattgttacgggcaatgttactacagaagaagtgattaaagctcttcaaaagattggcaagtctgctacagcttgggaggcagagccagagacccagtgaagctaaacgactcttatgagtaactaatataaactagcattaggattttgcacaatcttggattacacatgaaatttttaatgtaatgaaaccttatattccatcatcattaaaatattatccatttttcttactctgtaaatttgtttttctatttattccacaataaaaggtcgcaattacaagaacggtcgtaaaattaaaaactaggactacgacgagtaccaactactaaagtcattactctgtacaagaaagatttacattacgaaaagaaaaaaagaaaaactgcagataagttaggaaatcgcgaccgaactcactgagtcgaacattgactcgaatctacctcggctgctgaatcgtccttggactcatttttggcttcacaaacttcggcgctttctcgatgtacctcggagcttccaccggagcacggcccttccgccatttccctgcccccaaactgatcaagtccgtcgtagtatctgcatctccctctactttctcatctgcaacaataaaaaagaaaaccgtgttagatcggaacgattcaactcaattgtagtgattggaattgtttattacagtttttttttttaccttcgtaatcgaatagggcatcgaattcagagaggtcgggatcgtaaatatcaaggaaggaagaatcagtttgtggatcacagaagcgctcctggagccagtagtcttggaaccaaggattggactgaacgaggacccaccactcgtcggagaagtcttccaccgtccgataagctaagggaacgaacatcggagcattgggattcaaagtagaagaagacgatcttccagaaattacttccattgccattcaatcaaaactctgttacatatatacatacaaaaaataaaaaacattgttaaaatctcgtctttacaaatgggattatgagatctgagcgaacgaatgtgagaaagaacgaacctcgaggttgaagatggagatattccagctgatgatgttaaagtagataaggttgagaaatatcaatgggtatatatatacagtgtcctaacaaaaatagcccttctttattattaaattacaagaacgccactaataattatttaggaaaacgacaatttacgaatgaaaagcaaggagagtcagcaaaaggtggctggttgatttggattggggtgaagatgagcttaattttgtggcccattcagaaaagcggattgaagtcacctggttttgcccctaggattgggtaggaaggtttgttgagttgaggataaaattgtcatttggctagtgcacttttttcccttctttgcttgagaaatgatagtgactagtgagtgccacgtttggcggtgcgtgggaaagatgggaaacaaaaaggttgagatggggcccacgcggcaatcaacatcaatccttaagaaggagacacgtcattggtcttatccgatacacctccacttacattccccaatgaatatatgaattttcttggaaagaatcgggccacggccaatgtactcaactcttactcttactctagtgtgagattcctataaaattataaatatttgggttaagttgatgtttaaggattttgtatttttaaatgttaaaacttggcataattatttttttaacactatttcttttgttaattggctagtctttcttttacaagttgtgcttagttaaattgccaccctcaaaaaaaaaaatattatactgccattggcccatgccctttaattatctcatgccacatggcaaggcaaggtaggtcacctatcattatctcttatcaaatgactaggtgaagtagaactatagaagagattttgtttttttccaaaacaaatagaataagatatttatacatgccaatatttaatcttttcaaataataataataataaataaagaagccaatatttaattgtcttcacctatagagtgagtcacttatttgagtaaaaactatcctatttattatttttattttgaaggaatatctcatttataatagtagaatgaggttgatatttatgttattttaagcttttaaattagtcagaataattaagctgtaatctgtcaaattacttgtgtcatcaatcaaaacaactacaccaaaactcaaataattagggaaatttacaaaaatac

SEQ ID NO: 37109 - DNA, 2702 bp, Cannabis sativa
agaggtaaaagagaaagagagttacaggaacggaggtaggttgagttcgactctcggccgagacaatagcagtagcagcggcgttaatagtttcaacgctattgttaatacttctcatatttcgattccgattccgattctgatccaagaagaagaagaattaaggcctcctttacagcgttattggttccggcttaagaagccgagaaggagtgagattaacggtgagaatcggagaacataatcgggtatggaatttggtcggaaagtatgaatgaatctgaggtagccttcttttttagctatagttctttctcttcatactatatatcttttagcatattttttttagattagaaaagtgtgtgaaacccaaactaaaactctttctctctctctttctctttctttttctctctattaagtcttaaccaacctttctctctcctccagtctttatgctacggtttctacttttcttttcttcacaacaaaatattgccgcgtcatcttcaaaggatagatgggacccactaattataacttcattgttagccttcttaattttattaatattgctttccaatttcaattattaattttttttaaaaaaaaaataataaataataaataaattacacagctgaagacttttttttaaatatgttggacacctaataataacaaaatgtaatggctgtaaatttggttaagttgacataattacccctaatgttagtggagatttacatttaatgccactaatatgaaatgatatgaaaaaaataaataccattttgactatgtgtttttacaaaagttattaattaaaaaagtaaatgatacaataattttatattttttaaaattgtataaatagaattctgaactcaattttttacaatttctaacacgaatatatatagaatatgtaattagttttatcataacatctctagatcgaattattattaagttttattttgaaattttttttttgagcaatgtccaatttataaaaatgagtagagaaattaaaggctggtggcttttaatgccaaaacctatgaaccggcaatggtgtatgattctcgtgatcatgttctttacatacaataaataaaattgatataatgttcttataaatatactttttttatatcccaagcgtgaccctcgtgatcgtatttgtttggttgggtcctacaaggttagaatagtaattatacaccaaacaattatgaccgtcgacacaatatatatcataaattttgtgggtttttttaatcccattccatccccaccttttgtaatcactaattatttatttattttcagcccatacaatccaaataccatatttaatttctaattacagctaagagagtggagatttatttatgttgtatattagaatttatatttgaataaataaaagaataaaatatatacaaataattttggttgttaatgataattcatgttgggacaaatttatttttaaatatatataaatgtacaaaaataaaagaagaagaagatgaccatgatggatgtatgttcattaaaaggaaaagaaactgagtttaatgactaattagtgaattaataagtaatactaataggtagtaataggtaaaggtgcattggaggaaaattttaatttcttttttaaatgtgatgatagatatacttaaaaggcactatgtcccattttaaaaaaaaaaaaaaaaaaggcactgtccaacatcactatcatattataattattatttaaaattgttaaaaaattttaaaatttatattataagtattattagacaatatagaccactattgctataaataattaacatctaacgttagagcatttccattgttagtgatctgtggttaaagtattgctcatcgatctgtaaaaagtgtgttaatagagtgctaaaagtttatctaaatttaatgaagtaaaatttgtattacaatataaatatactatttttatgatatttttgaatgaataaatttatagtttatcttaattactattcaatttatagttctttcattgaattataaattttttacattaattttttttattgttttatgtaataaaaaatgataaaattaatgataaattattatatttttatattttaataaaatattaatttaacattaaattttgtatcaagttttgcaattatatattagagtacaatgttaaaaattaatgcaaatatattataaagtttttttttgtgttaaatatagcacaagttttacattagggggtctgaccatctttaagtgtaaattttgtgatacatttgattcagaaaatgagtcaatataatatttagccaaaattttacaatatactaagatttaaataaattttattttaacagaaagttgtaaaaaaatcaataaaaatattatatttttattaaaagtatataaaaactttattaaatatatagatagtgttagaagatgaaataacctaaaatataatttatatataatctagaacacaatattaatatatataagagttagggatacataattaattgattcatatcaataattttaatttgatagtgcaatactatcaattaagtctttcttcctagttgtctaaatcaaaagtagttttaatttctatttgcttataaaaatatacaattgtgatgaga

SEQ ID NO: 37110 - DNA, 1377 bp, Cannabis sativa
tgtcgtttgattaccttctttttctggcttgtacttgtaccaaacggcagcccaaaggtagaggaagaaattaaggcaactaagtatagccaagaaccaataaaagaagtgtaacttgctggagttaagatcataaccacataaccattgttgtttactaggtgtaactctttttgtcacagcatttataacattaacaaatatggtactcaagaagtaaccaaacgacaacgtgagccacgtaaacgacgtggaaagagatttcatactagctggggcttctttatagaaaaattcaagtaacccaactaaagtaaacatgtcagctattccaaatatgccatactgaaacgacaaccaaaatatgcttattgggttgaatgggtccttatgggcttggtttcgtctcttcatctcaacaagcccagctacggccatggacagtgcagatagcacaagcccaactcctaccctttggagctgtgttatgcctgtaggaatgcctgtgatttttcgagcaaaaggaacgaagatgagctcgtagatgggtaggagaatggacatgaagagtaatgggattacgggtactgatggggctggaatttcttttgagccgatgtggcggtccatgaataaggctccttgttctactgagaatgtttgtagttgagctaagcaagtgttcattaggatggtgctggctaaaatgggtagcattcttgttaggattttgacttcttccacttgtgttatggtgcaaactctccatggttgtggatctgacatgtttaatagtatggctgctttgtctagacacctggggtttgaatttcatttatgttaaaacatatatatttatgcccatataaagaataatcatggatttattagtcagcccaatattttggtggggaattttttttttttttttgaagcattaatacaatatataaattttataaaaataaaaataaaaaatatataaattttatagtgacaaataaaaaatatgtaagaacataaataaaaaaaattatttatgaggtcaaaatataaaataaaatacttaaaaatttatatacaaaatttatatgaagaaaaagttaagaaaggcaaatgatcccacctgcgctctcttctctctgctactggatatcgagatccatgtatatttcggaaatatatctctaattttttatgaaaaaaatatattgcttaaaaatttgaaaatattggagaaatataaacgtaaaatttctatatttaattcttagcatgcaagtttgaaccctaactttagtaacattaacatatttaaaatttcgataaaatttgaaacatgtttttaataactataatatacaatattactaataa

SEQ ID NO: 37111 - DNA, 3822 bp, Cannabis sativa
acctcttgtcaactatgtccttcaatcccaccacagctaacaggcatatgcatgatgtgtgaaactttctaattctaagaaattcaactaatggtggcaaccgcgctttttctaagacaatgactaaaataagatccagtcaaagtttaagaggttttactatataaaactttcatttataccaaataatacatgcatttcttatagcaaatgcaatagaagagagtgaaatactttgaggtgtgactttggaaccaagaccatcattatagttcccagctttccaaaattgacgacaaattggcgcttgagaccttgatagggttgaagtatcattcgccgaagattgcccttgattggtaatgttatgatcagccttcagagactttacactcccattttcttcgttaccttgtatagaagatttagttttcaacattcgatgcttgactagttcaactttactacagttcttcagttgtaacgccctcccaaccaaatcagcttctaacttaacagccttcaccaccacctcttcaggttcatcgtcgctagataagtccacaatgtctactaaagtcatcctgagggctaaagaagataaacattcacacaactgagtaaatatgaacaagaaatggggggaaaacaactaaagaaaagaaagcgtcattgtctactaaagtaatcctgagggctaaagaagataaacattcacacaattgagtaaatatgaacaagaaacgggaaaaaaaactaaagaaaagaaagtgtcaacatgacaaggacatcaaaaccacccaaccttgctaaaagagatgatgccaaataataagaaattgttagctcaatatatgatagaattctaatgctagcgaagctttttgtagttttagaatggggatgacctaaaaacataattattgatattatttatatgcattatgtttcagtttgcagatgatactttgtactttaatgacccctctcttgggtatctatcccattttgtctagcctcacaaaaactttcagtttgatattggggttaaagttgaatatgggaaagggtgttttagtagtgaatgtaaaggttatgcttaacactagaagatccttcaggttgcgagcagggtctttcattatcatgtatttgggatagaaggaacaagatgctccaagcataccaaacaacataagtgtgattaagcaaaaagagtgtccttcaagtacgtccaacacacctcagatggaggagcgttttaaagcactggagcgaatggtgagacttgccagaaacattgaatgaccttgttaaagattgtcaacagtcaatggaagcattgaaattgagcctcaccatctgaatggttgggaatgcacttgcaactaaacctataggcatgacatttacaagatcaaagatgttggacgctaaagagttggaaacaaatttatttgatataaagtactacttcatattcatcaaggccaattctgaagatggtaaggttgtgatggatgttatgtgcagcgttcaacctttcaaatttataatggtctcaagtttctccacgtaagacatcccatgcaaagagaaatatcacccaaccttcaaaactcacacattgagattttcaccatcgaatgaagatagttcaattttagtgattgaatacctagtgaaaggcgagttagcttcacaacccaaaaacatcccacttgaggacaagactctcgccttacagtaacaccgaaaaaccttccctggcgaaaaaaaaatggtcaaatttacttaccaaggtcacaattctatgctccaatccaagtaatttctttatctcgttgttcatcgagcccatttctcaaataatgtagagatcacctcccccacaaattcaattgcccctgtcatcactctgataccaattgatatgttcacatatatcaaacaataacaataggtttaatgggaagaaaactaaattgtgtttaatagagttaaaaaaacaatgatacccaaagattcaagagagacgtggctttttccttgaaccaaaactcaatgcacaataagattaaatatagcctactcttactctttattctcataaaccttccatccaaaacaagaatcccaaagaaacctaattcaaagccattacaattttctaaaaccatcctattttccaaaattcttccaacttagattacttatgtcatatgtaggagtacctaatcgaaagtctattaactttttcctttggagaagataaacacaaatgagatacttcataaaaaatgatcgtacatagatttatctccatattgcattctttgtaggtcttagcaaaacacaagatcaacattttatccattactctttcttaacaaagatctggtcttggtttctaatgatgtcaatgttcaatgagtatgaccttcccattggcaagattttttcttagattatagacaaaattagtaaggattaaaaaaatctagattgttgccacaaaggcaacttgttgaacaataaggcttgagaggaatatgcacaattaagaaaaaggttgaaatttagttctttaaaaccaaatatttcggtattttccttatctgaccttgtggaatatttggttgtaatattagatgatccacagtcatccttctttctagtaggtgatattacaatcttctgtaaaccttttggtttcttctacttaatacaatttttgtttcgtatcaaaataaatatatttatgttttatttgtgttttagcctttgaccattatttactttattttgttgtatcaagtgcagggaaaaaataatgacaattaaaaaataatcttttttattctatcagcttcgaagtgaaaaagagtataatgacttcaaaagagtaagcccaaatgaggcttatgggtcttctgggttgaggggaatgggtaagagaagaaaaaatatgggttagcttgaagaatattatcttttctattcatgattagggttgaagttgtagaaggggcaactcaatcagtcagtgctgacaatggcagagagctttgagaagggaaaagaggttgaacagagaattgtataacagtgaaatcaatatgacatacatattcaactaagcaattttgactttattcagactagcttgaatataaatcgaacatttttttgtctaacaaagagaaatcacataataaaagactgccctttactataaaaacactaattattcaacctaaaacgttttacagaaaagcattcacagaaagaactttagttaaagacgatggcttcttgtgtagagatcttaccgtagatagactctcaaaaggcaaagatttcaggaaaggcaaacttgaaaagtttcgaacaagaggattcgaaacctcgagctcccgcctgaatcgaaaaaagaagagaaaaagacaatcaatcaatacaaatataaaacacattaacacaatataatgaaattaaaatagtaattcaaaaatttagaaagtaaacataaatatataccaatggctttacggcggcagtacaggaaagatttgacggatttggatggaggaaccggcggtgagaccggaggaggaaggttctaaaatccaacacctcaaacaaaaagttaaaaagttagggtttatgtactttgataaacttaggagtgtgttgcactttttttaggagtatttcacttaaataaataaaataaataaataaaaaaaataatagaagtagattttttgtttttaaaaaataaaaatatattttatgattatttttatttttaaaaaataa

SEQ ID NO: 37112 - DNA, 2024 bp, Cannabis sativa
aaaaaagaaatggaaaagcacatgactcacttgggaccaatcaatcaaaccatcctttgtttttggaatgcaatccacgagagaatcaacttctccagagctttgcatctgttgatagaggaaagattaatctaacaaatgcataaaacttaatagagtaattaagaaaatgcaggaaacgatatcaagaataaatgacaatgttaggtatcataaataagtacataattcagccatggagcataccaaagtagtcacacaaaactgttcacctgcaccttcacaatctgaagcagtaataataggacttgagatccaaacaaatccattttcttggaaaaatttgtgtgtagcataggccaaagcattcctcactcttgcaacctgaaagcgatggaacagataagattactaaagtcgtatatagtttttagaaaaaaaatgcagataaaagcttgcatgttgatcgttcgatgcaccatataaataccaagcaaaaacagtaaatattactccaagtgttagtacagaaaattgtatggacacagagctaagaagcgaaaccttaccgcaccaaaagtgtttgttcttggacgaagatgagctttggttctcaaaaattctttgcttacccttttcttttgaatgggaaaagagggatcacttttaccaacctataagacaggttcatatctcaatgttcagtctttacagaatcaaacttcttaagttagacacataatactctgtgttcatcttcataaaatatacaagaattcattgaaatgcaacaacaaaaggtaacatcttagagttgttgaactatgcattcgagttaagtgagatgaaaatgtgtataaaactaaaataataaacaaagccagaaagagaacaattggtagaaatactaaccacaacaatcttattaaccttcaactccaccttttgtttagatccctgacttttcaccacaatcccttgcacccatattgaggcaccagttgtaactgacccagattctacctattcatagtatgctccaaaagcttgaataatcattgaacaaaaaatcaaaacaactctgaaaaaaaaaaaaagaaaaaaaagacaatcctttgtggttcaatggattaacacatacctgatcataaccatcagcatcagaacccataacacattgcatatttgagagacaagaaccatcattaacctaaaacccaatacaaaagcttcaatctttagtttacattaattaaaagaaaaaaggaaagattttcaataaattatcacacaaatttggattgtttacatcaatgaaagtgacagagctctgaacacgaacagtccgaacccaccccttcactaccagagtttgtcccaatcgctccaacccctcatcgggtccgcctttaatatccgcaatcctcagcttcttcctgaaatctccaacgctctcggacctccagttctcagcgatttccggcttagttttctcgccgccggagactagagagcagaagcaagtccgagctggggaagatggggaaatgcgccgaaaaagtggctggaaacagagaggtcgagccctgggaagagaagagtagaatgagagaattcggagagctgaatagggtttgaacccaacagcaacacaagccgccatcgccgccaaagctcacagccaccggattgggatgacacagtactctctctctctctgctccagttattttctttcctatttttttaaaagatccattttttatgaaaaataataataactattgtaaaatagttttttttttatatatattttaaggaaattctacctagaaagaaactactaatacaactatttgatctttcaaaaaaaaaaaaaaaatacaactatttgaataattccccaattctatattaaaaaataattttttattttttgaataaacttagcaactttattaactagcaattgttaataacaatagaacgcacttcgttgcaataattctccaattgaagcacac

SEQ ID NO: 37113 - DNA, 2091 bp, Cannabis sativa
attacacattgtataaaatcttggaggaaccatggcctcaccaccccctaaactacctccgcccctgaccataagtgtgggacagatcaagttttgttttcatcccgaccaattgcattttatttttgttttaagatgatttgattgtgctagttttatataatgtgataaggtaagatgattttgatcaaactaattatagtagagtgattgaacttgttttcttcttctttaattttttttcataaagagaaagagttacataaattgaaccaacaaaacaaacacttgaaaagaaaaactcaagaattcaacactaagcaagagaaaaaacgtctcaccccaatgtaaaagctctagatacctttttttttactatgtagtgattaggttttcttttttcactttggttcttaattttcttgtatttatgtgattaattttttaattataattattttgcaaaataataactcataattccaattaaagaacatgagtttttagtggttctctaaaaaaattcttaatagtaaaataacacaaaaatagtatgtgaatggtttgaaaagttactctctagttgaaatttagtgtgatttaatgtttcacatatttatttttgaagtgttattattgggtatcagtggtgctataagttgcactcacaattagttagcgatattttcttaattttttttttttcaaaatcattttattattattattatttatttatttttgagatataatatcattggaaatgtataaaaaaaaaattatatcttatttatttatttttgaaaaaaaatagtgatattaatattaatatcaatattaatggcaataaaattatattatcttcatttctataatcttttagggtatcctcattggataaataaagtctataagaagtaagaagtagcataatctctattttaataaaatcataaaatatggagatgagatttaaaaaaaaaaaaaaaatagagatgtcaatagtaatggcaaaaatatatataatatcttcatttgttttagaagatcttaatcaaatacatttaaaaaaataataataataaggtatataagatggaacatgttccttgtttcaattttttttttttttttatgcagaatcactcatgaatttatgatacagacattcgcaattagtgtaggaacctccttgaacttgaatagctcatcgtctaaccgaaaggcatgttttatcaaaccatgaactgctaaagtcagcaagcaacataagactaaactgcctctaataaaaatttagacaataaaattataacttcctcaaacaggacaccccaagagctagagcttcaactaaacagtacacaccaactcaatgacatatcaagaatgtttccaaaatatctaaaaataaaataagataaaaatgaattaatcccccagcgatgatattaaaacctaaaaaagaaattctcaatagttagaatataataactcccaatcgaataatatttaaataaacttatcggtaaaaactctgtagcagttggccctcctcaaaactgacctacaaattaacaatacataaaactttattaccacacaatttattgaaaaaatagttaatgtgaacaaaaatagtaaaccaatccataatgttaagacttgaaacacttatttctcggatttgaaaatcgtttgtagaaggtatgagtactaaaggaaacacttctcgtactcattgaccatatcataaatctaccttaaacaattagctagggacaaaccataaaaatagtacaaaaactataaaaggcatgaaaaccatcaaaaaaaaaaaaatggtacaaacaagcaaagtcatcaaacttaaaatttattttaaaaggtcttccttgtttcaaatttaaaatcataagacatagagatttttttagatgtcaatggtaatgacaacaagaaatataaatatcttcattttgtttagcatattttaatgtagaatttacgtggtatatggtttttttaaacattttatgataaatatggcatatttaactatggacccctttatatggcttttttcaactt

SEQ ID NO: 37114 - DNA, 4744 bp, Cannabis sativa
  modified_base (36)..(42): a, c, t, g, unknown or other
aaaaaaaaaaaaaaaattttattaaaaaaaaaaaannnnnnnaaaaaaaaagctactgtctagaaaaagaaaaaaaaaattagcatgtaggcggagagagaagcaataaatatacattggtatacctataaaaaagaaatgcctaaattgtgagtattaaaataggtaagggtaaattcttaaataatttaataataatagttgttggtgcaaatatttcatttatttttgggtagtgtgcatatatattatctaatataaaagttcatttatagctcgagaatgtttgtctctctgaaatatatatatatagactctccacatacacatgaatcattcaatatgttttatagtaagaaaacagtaagtaatactaaaagcatattgtgtggagagatgggtagggttagaaattgcaaatatatatgggatctctatgtatatatctctttggtttgtatataatatattgccaaaagtcaattaatgccatgtgcaggcaagggacaaattaattttgcacccaaagtctctccaccgccgttccttatgtatatatcgatcatatcatatttacatttatattatttattatttgaatatattatcactagattcttcatgcaatgatcattacattctatacatgcaatattttgtatggcttcccatacgtagggctaattcagacaaaagtaaagattaacctaattgaattttatataggtacaaaatcatcactctctaattaagcattctgcaaattgtagtataatatatatcaaaagtttgcgtttcagtctcaaattaattagtatatgaagtatatatattggactctcgtaatattaagttatattttaggaatattaattaataatgcaacatataacatattaagacactacactaaaaacacaatttggactaatatatcaatcagttaattaacgttgttgactggcaattgactagaattaggtattataggtggtaattattgtactaaattgtgttattagcgtcagttctataattccaacgcaaagtgacgtgttgtagtttaatgttagattttttttttaattaaaaattacaatgttaatttcatatttttttaaacaatgtgataattagatatttggttaaagttagataatgttttaatttttcttttttgtaattaaggtattttattctttttatattttattttatacatatgatttccaaatcgtatggccctttctttgagagataactatcgttacattttgtattgagttcccaagtggacattttaggtccacacggtttaatttattttgttctctactgaactactccattaattaactttttatatataaatatatatacgttatgtatgtaatatgagtgaatatatatactaagtagatatgatcacatgatatatttatataaaacatttatattttagaataaactatgatttgaatttaattatttaatctcacattacaatttttaacatatagtatactgcttgtggatcaaaatagaaaccgtgaacatttgaacttttttacagattagaactgtctacttgaaattccttcaaaaaaaaaaaaaaaaaagaaatgtgtacttgaattggtgttttggaggtatagccttaactcgagtaagaattgccgtggtttatttattggctcatagtactatctcccagctggatattcataatatgaccaacaaaattaatttgcaaaatgaaataaaattcaaaatttcaaatttaaaactatttaacaaatacaaacaaattggggcaccaaagataacgtaaatgtatacattataggatatatgtatataaataaataggaatatacatatatataacccaacaattggccaacaatcaaattaatttttcttcaacctatatactatatagatatatatataataacagtaattatttatttttgtccttctatcttgctctgcaaaagaaaaacatagagttttacccattttctatccaggtcctcgtgacttttgtccttggtatatattaaaatatatatatgccccataattgacagagatttttttcatatgcatattttatttttagcatatacttttataatgaattttcattccagtatcatttcttatttatttttattattattattatttttaaagaaattggtcttattaaaacttccaaagtaaatccactaggaaaaatcttaggaataagaatagtgtcaaaaaatattgatataaaatatgtacccgtttaaatcaggtcagaaatacaatgtagtgactatctaaaaataaagcaagcttaattagctaatgcatgagtcacactagtaattctaagacaaatatatatatatatatttatatatgaacaaaagaaatgatatcaaactattacaacaattaataatatctctaatgaagcacccaagataagagtgatcaattatacattggatctgcaactggttttggttgccttagctatagctgttcttgcaagcatgggattaattttgccttcatttgaggggtatatataattgtgcacaattatcatttcttaatttaagtgtctctgaaatagtaaaataaaagaatttatagtttacaaattatatttagctcctaataacagctaacagatatttagttgtaataaactaatgaaaattgattatatggtcgtcattgattgacatatatggcccacaaaatcttgatttaaagtgtctagaaaattttgaatttacctcttatcaaatcatcatgagtttgagtaataatatatatgtatcgtcacaaagccaaaaggtaaatcactaaaagaaagcatatccactctcattaattgacatgaataaatacacaccacaattagacttcgtcatgatttgcataatttgatatatattaactaactctcttaccatttttaggtaaagatgattttaccattgaatttacgttgactaaaaagataaaaagaaaataaaaataaggtgtatatatatttagcaatttcataatattcaatttaaaattaattttaaaatattatgagtattaatttcttttcttttttttttcttcttttgggaattttatgttaagtgatgatggataggggaaaatagctagttagagaaaagggtaaatgagtaattttcgtaatattattttagaagagtagtaatattgttgatcataattcagttttgtcttcttcttttttagggtcttaaatttgctgctcatttgattcataattccctagaagaaaaagtcatcatctgatcgaatatttgtgtacactatctaatggtctagatcgatatattgggtggttagaaatctataccaccaccactctactgatcacttaccatacattttttttcaaaaaaaaaaattaatgtaatttttattttagggaatgtacaatacaatttaacaaaagtgcttttatgagttttgtttttttagaggaaaaaaatagtagtaacagtaacggcgcaaaaatatctgactacacatatataacatatataacagaatttcgtaccttaatagttgagaccagatatagacatgtggacgaccaaagacgactaggatagcaatcacttcttataataaaaaaaaaaaaaaaaaaaccgaggttttttggcttttaaaatataaaaatatattattttctataaaactaattgataaaatatatttattatttacgatgatgagtgaagctacgtgtacaagttattattcacttgtgattgtaggggctagaaacatggattaggacgttatgaaaaataatcatgtaaagaatttgtcacttatatatttgtgtccaaaaacaggtacttttcgaattggtgatcttgcaaatctctcaaaatatacttaattgtatatatatatctatctgtttcgtctatcaatgtggtagtggcctgcccaagttgcctcttccctctctccaagttatatatattttcatgtaataaataatcaacaataacaacaattatgttatacatttataatacaaacattctagggtatgacctttgatcgagatatttatacgataggtttgttttcttctacctagctagttctagtgactaggtaattaagaattatatatattattgttatttttagccattcatttattattaaatatgtgattgtgcttgagaattgtggtatgaaaaacaataaattaattaaaaaaatatattatattacttgtccaaatattacacaacatgatccccttcttcattcttgactcgttatcatccacgatttgcttttcggaagcaagaatataaaattattagaattaattagtttgttttttctttttttttttaagagtatttggttcaatccttggttatcccaattcttaataccctcaccactagtccaattagaataattttattagtaaattttcaatacaaaaaagaaaatagttcaattcaagcaaagtttaaaagttcaaagataatttttttaatgggttggtaaaccttttgataaaatcaaatatgtataacacatgacttaaaagtcctatactattagatctagtgttataccttgccatgaacaaagatcagagaaaaaaaaagagagaaaggaaagagaaagagtaagctgaaagagtagcttcattgaa

SEQ ID NO: 37115 - DNA, 2268 bp, Cannabis sativa
agacctctattactccaaagaacctgaaaacatagaaaacaagcataatttcgtcctaacacagtgaaaaacgcacataaaatcgatccaaaatataggctcaaaatagcctaacagttatagtccctacattagtactagtgggttcgtccctacttagaggctaagaaaagggtagtatagccatttgtttaaatggaatattttatttcattaggcttaatatactataaggacttaattaactcaagctaaaatagcactttctctccaatctctctttctctctctcgactcacccagaggaccaaaggtttttttttttttttgagttttcttcattaattcagccattaatccttgctaccattggacttaagttggaagggaaggatcaaggtattgaaattttagtggaaaagtatagtttatatttgagttgttgataattgagttctgcagagtttgcttaaacttaaaattgtttatggaatgattttttgttaagttttaagttgaattgggatagttttagcagtcgtggtttgagttaagcaagattgagtttaagaactcaaaacttgctcaacaatggtgttttgtgaattttagtgtattgtgattgttgaattgtggtttatgctaagaactcgtattcaaaatattctgggaggtttggcaggttttggaaaggtttggaaaagatttgagaagtgaaacctcaaagtttgtcgtttccagaagggtccaaaaaatgatgaatcatctagggatccaatgatccggttggggaggtttttgggaacctcaaatttcatgttttatctatatttagaatatttccatgctatttattgatatgtaaacttttagttttgactttaagtcttagaatggaattaaataagatatttatcgatttactactattgtgacaaagggcccaggatcgtcaagtgtttcccacttacgttggccagtataccttaatttagatttgaggtaagaaaagtaattgtaccacttagcatggcatattgtgatacaataattaccgtttataataaagagttattactctaaattaaaattgttgttaggtttcttacttatcgattgtctcattaggcagcgatagtgacattgattgtctcattagactacgtattaaggttgtctcattaggcaatgagagataatggttactttataaagtaacagtaatggtttgtcttattagacaaatacttgaagttaataaatatttatattgtgtatatggcctcctgcttttgaattaagaatgtgattacttacttttgattatatgagtattattggttatatatgtatgtcattttgtgatattgtgttgttgcttttcttgttgagtctttgtgactcacgggagctttatggtgaaagtaagggaaaaagaaagttaggggagccatgagtcagatgtcttccccaacaaatgtacatatcagcccatctgactagtagtgcctagttgtcagtatatttgtgttatgatgctcttgacttatatatttatttttatatgataatatttaccgagatattcgaaaactaaatatgtaggagctaaagaaacaataacttgcagaaataaagagacgaatatttttgacatagttcgggtcttaataaaccttagtcaatgagtcagtctattagcctcgaagggcagtattgatgtgttacagtatttttgtaggaaaccctaactctttacccttagtttctttttgaagaagaagataagggtaatctcagcagagttttttctaggtgttttggcttaccctttttccatgagaataaatgggtctttatagcctaagtggcaggtatgggcagacccatgacccgcctaagatttctgcttaaaaaatctcactgttgggtaaattacatgcaatgttagagttgactgaatgatctcataggtaccattatgcccgtgcatgcaacagatagataatggggaccattttgtaccacttggacacgtgtcactcaaaggtccaacctttaaaagcagggaacacgtgtctctcaaagcttgttcctttacaagtagcaatgtgtcaagtctgtctggtaaaaaggtggtggtcgtggtacgcttaataccatgcttggatgggtcgaacttaaattaataaactcttatgctataaatttagcataggtgaaattgtgttttgcatttatttttaatactctaaatgtgaaattttt

SEQ ID NO: 37116 - DNA, 3212 bp, Cannabis sativa
aaaaaaagaaacatagaagggaatatattttaaacccttaggattatgaaactaaatgaccacccttaacataattttctcccaaagactttccacattgttggtttcttcttaagaaaatcttgttatctctttccagccataagccccaaaataaagtggatacaacagtgaccaattcaacttatctttccctactttctctaacatagaacattaacattttttgacaatcaatatggattctccaaaacagtccaaaacttgattaattatcttaccacagtttcaaggaaaagtcacagtggatatgaatatgaacaaatattctcatttccttttcttcatatgtagtacacaccatttaggagaaataattagaaaaggccttctcctttgaaaaaaaaaattgtgtgcattcagtctatgtcacaccattaactacaaaaataaaaaatttaacttttggtagctgtaatttccaaagaatatcaacctaacttggggcgaaagggctttccatatgcatattttctcaagctatgaatggtttataaaaaatattttcagacaataatataatgtaggtaaagtctttgttcaccctttaaaataaataaatgaaaggggtaaaatatagaaaggttgaactctaaatcatctttataattctataagttggccattatgatctttccttgtttttcaatattttagtggtgattgtgtttcttgtgctttatatgtgcaaatctagcatctctgtaaggtcaaattttttatttttccgtgaggaaggtcaaaattaatttgtttctaatcaatgttacatttgtttgcatattcattaatttctcttaatattgcagaatattccaaataacatcaaacataatggtagtttggcacaattttctaaagatatagggtcttatgctgacataatttctgggaagaagttacgcacgtgcacctccgctgaagattcaaataatcggtttgaaattcctaatgttgaatctagatacagtaatgttgttaacagagggtatgttcattatgctgcgtatggtgaaaagccaattgaagtagctcgaaagcgggagcttcacctggaaattagtgctccgcactttaggagtaatgtatacaacgaatccaacagagatatttcaaattctatcaacaatgataatgttatccaaaagacagatatgagttcttcatatttgagggaaaatctcagcttccaaaaaagaaaattcggggagtttgtgagagatgaagtgaataaagttatccaaaacactagccaccgagaaaaactcatctcaagttgtattaagcatttccatatggctaaagcaatttcttcaactcctaacagtactccaggtggtataaagtttacagaagctataaaagaaggggataaaaaatcttttcaaggtaaattttctacaacattgaatgaaaatatcaaccaagacaaattcttttcaagctctattaacaagggtaagaattttcatatggcagaggcaatttgttcagattccaagaaaattcctactaagcagctcaaaaactttatggaagttgtgattgaaggggaaagcaaatcttatcaaagtgaaatgccacatgtttctacaacaaggtacacaagcaataaccaagaaaaaatgttttctatgagaaaagaaaaacatctcgagatggcagaagcagcttcaataatgcccaagaaatttcttgttaacccatgtgaagaagcttttgaatctacgaccaaggagggtaattcttcaaaccatggcatgtttgatcaagttatttagtgttttaatttttctatgaccttaacagatgctgtgaatttttaattttcttgtgcagagagcaaacaatttatcccaggtgctgctaatgagtgtaaaagtgttccaatgatagccatgcactcacgtatgttggaaactgatagtgagaccattgaagaaacaccccaatccttcagagttgagagccatgtttcccaggagcatatggataaacaaggcactggtagtggtttcttctccactcacttacttgtagacgaagattcatgcattctaaatcaattcatgtcttctatgacaaatagtatgaatatccaaataccaggaagtaatggtcaaaattccatctctactactatgaataagggtataaatgttcggacagtatcaacattggattcttcaggtccaatgattcaaggcactttatctgctagaggtgatggtgatcagccttctacacatcaacaattgttttccccacctaaaactggttcaaactggaaccaatctttcatctcaccgagttcaaatgtaaactttccttgtgggttgcataaatccaaaactctctgcaacaatggtaagttcatgcaggcagaacaaactttgaattggcgacaaccaaagcaggtacaatcaccactcgcagcacaatcttcaatgcaaatgcatccaaggccacctctagttgatttagtaagtcaaattacgcccccacagtgtcaaggtcaaagcacttctgcctgtaatgggccaataatgaaccaaatacctatccatgcttcttcaatgcagatgcaaacaatacatcaagtggatttagcaggtccaactgtaccgtcagagcagcgaggtcatgaaactgatgttgttaatgagcaggcaacacaactgaatctccctcgtatctttgcttctcgaaggcagatgcaacgacattcataccaagtagcaaatcgagcttcaccctcgcagaagtgaggtaagggaagaaatcttgaataaggtcgttatgatgttgcaaagagctggccaattgtgaacttagcaatgaataaaagatgtaaaacttaaataaacatcctttatgatctcttcagtacatttttttcagctatatttcaactttattttcttttgagtacacatgattacatttagaactttatatttaacattgaattattatgaaatgtattcgcaattgtttctagtgttgttatgtttctgtttgatatattctactttaatagttattgttttaggctaatatatatgacccaaattagagagatgatatactattcattaggcaagtttaacacccaactattttctactctattctttaaaatacatcaccaa

SEQ ID NO: 37117 - DNA, 4486 bp, Cannabis sativa
tcaaaatataatatagagtaactagtcttattactctccctataagtgtccagttgaagtagatattgttcacgtttcagagagcttttacttttgcttatacagaagaagataattaaaaaaattggcttattttttctatgtaaatatcaataatataaagattttttcatgaaaagttttttttatttcctgtgtttggataatcagtaagaaggcccttataaaggtaaattaagatttatgaaaatgattctaatttagaaagtaactatacaaaagggtttttgggagaaagactctagcctctcctaaaacaatcatttaaattagaaaataactttttagtttacccaaacacttctgaaggtactacttttcaattctaaaaaagcttattagaacaaggtcatttacttatttaaaattaaccttttgacacaccacttttcaaagttcacccaatcagtctcaaaagagctttggaagcaaccttgaatctattccaacattaccagttcatattcaaatcatgtcatggaaagcacaacagtaaattatgaccaaatgaccctcacctgaaatacatttctctgaccaacaatggtaccatttacgaacttggtattatcacgagtaatatttgcctgcaaaaaggccatccgatcaatgccagtgccactgagggttgttggaggtccatctacagtgactcctccactgggcaaaaccctttgcccatttggacagatatgactactttcatcacgagtagtaatctcttccattacaagtccatacgtgaatttgctctgacgggtaaaattctgctaggcacatactcaaataagtaaaacagcttcaaaaccaaaagataaaactgcttacttacaatatgcaagtctgagaaaagaagaaaccagcaatattacctctgtgatattagccttggcaccagctcgatcaacccagataggaggaacttcgtccactccaggcccaccagtaaagactggacttaattttcgactgttaaagcagctcacacgtagagttcggttgcgcggattataaacaccgtctaaatatggatgaacatattcaagcttgaaagcaagatcatcctggggacacattatcatatacagttgttaatgacacaatcttatagcagacaatagtgggacactcgtcaaatcatacagtacaaacgacagaaggtatgaactaagatcacctggggattgacaaagttgctggtggttacagaaccaagaattgacctattaagccctttgatgttacgatgttcgaatgtaacagttccaccaggctgcagtgaagcctaaaacacccaacatggaaaaacataattttcagtactgaagcctagaacaataaaaggttcgtaaaaattttcagacacttactaaagtggggtagcctccacgcccagggacaatactccattctgtacttacttcagctgtcttctgttcaagttctttaagcttaatttccacgattatgcctccatcaactttctcatcagggcgtgggttcacttcaatattagaaaacaaagctagcgaatttatgttcctcaaagcttgctttcctgcttctatgttaaaaacatagcttggtcgaagctacaagtttcatatcagacaaccaccaagaattaaaccaaaccaaccatcaatataaccaataaaaatgcagccatttaagattaaccgtgtctaatgaaataatcaaccttctcaagctcaaatataaacacaaatataactgttagaatagatgaaacatttctacaatgtgatatataaatacctgtctaggcaattctctcttcaccacagggatttgagtgttcccttcaacgacattgccaagcttgtcctggaattgtatgaccaactgtgttatgtccccttccacaacctcacaaacaacctctttggtatttaaattcccaaaattgacgacctgggcacacgcatacccttcatcatggtaccatttctgaactcggtcacggatcctctgcagaagcctcgcactgaccttaccctggtctctcagcatctgaagcacctcgttgtatactggcatcggcagtaaacatggcctagccctatcaattctccgcttgtaatccttctcctggttcttaaagtactctagcttctccttctcagtcatatccgggtccatttcaatgggtttcgtctgcggcaacaaacccacattgatacaccggaacttgtccgcagactgccacgtactctcggtgaacgatatcgtcactccgatgctcccatcaggattggtctttccttccatatcaaccttctcgaacattccacaagtcgccaaggtctcgagctccttctgaagctgagcctttgtataaaccccgtcgggcctcaacgaaaccatctcgaaaaacgaatcctcaggacctacgatgacccctctccggcgatccaagaagaaaatatcggaaactctatatttcttaaacccacttagcttattaagctgcacaacaatgttggcaggcaacccgtgagaatcccactcctggttctgcgattcgtcggccatagcagccggggcaaagaaccttctccaaaacgagcctccatctccacctccacctccacttccaaacccatttccgccacccccaccgccgccgccagcaccattgccactgaataaatgagagccgaggttaaagacgatgacgatggcagaagaagtggcgataaccttggggagattcttgagaataggagaaagggcttcaagtttcaagggttcagggttttgggaagaggcagaggaggaggaggaataagagagctgacattttcgagaagaggagcgttggggggcggaggaggtagctgaaatatttggcaattcaggtcgagaggtgaaggaagaagggagcctgatcggagtacggaggtgagccggtgccgaagcgaagaccggcattgtaggtttggaggggataagggaaagaggggttgttgggttgcgaaccacagtagtactcaaaaaagggctcaaacgcctctttaataataattactactaagggcttttctttacaatatattcaacggcgagatccacaatgttaatttctctaatttttattgattttgtttcttttattttaatgggtaaatagcggtaagtacctaaagttttgtgtatgtaagcggcataaatttaatgatttttttagtggcataagtactcaatatttataaaactgtaatttttctctattttcgtcagtacagtatttttcgtacagaccaaataatttaaaatttgggtcttatatgtgtccagtttaagacaataacagagatgaaacggtaagaaaattacagttttataaacattggttacttacattgggtacttatgctactaaaaaaaattattggatttatgccgcttacaaacctaaaactttgggtacttatgccactatttaccctattttaatcatcaattaactcgtaagaacatggtaaaaattacaggatcacttgctgaagtgaatatataaagtaatattaatgttattattattcttttttttttggagttttttttatttttatatttttaaatatttttttttgtatttttacagaattctgtatagaaattcttattaaaaaactaatataggaagtaatttttttttttatttttttataaaaaattaaagttaaaaatttagtgccatagtaataaagtatgatcataattatagcattaaaaaatgtattatattaggccatcaaattataatatatttgcattatttaatattttgccataatatactatctttgatacaaaatttaatgtttaattaatatttttattaaaaatataaaataataattttattatataaaacactaaaaattaaatgtaaatatttataatttaatgcaatagatttatcaataaaaaagatatttacagtataaattatatttttaatttcatacttatataggatatgttttgttttacggattaaatattacatattacatttttgttgtagacgttactataaattttattaagtattaatttagcttagtaaaagattacacgtcaatatatttgtattccgactttatttttatttctaaaaaaacattaaataattttaaaataaataacaacagatgttgaaatatcatgaaaaagaaccatagaaatatgtatttatttatttagttttttttcaattaaattatttaataaattttttattgaaaatgaacaactagtcaattgacacatattagttaatttagtcatatttaataaggtttaacgaaactaagattaaaagctgcaaaccattcagagatcactaatactagtgagtctgagatcaagatatggaaaattgcatggaagcttc

SEQ ID NO: 37118 - DNA, 3380 bp, Cannabis sativa
tttcaatataaaatttaaatacactaatttcatatcactccattaaagatgctatacaaatccccataccttttgttatttttgaacatagaaagaaccaaactatctctctctttctatcttacatttttcacaaccatatcatcataatgacaattattttaagggattaattatgagcaaaagcttcttcatggaaaggaaagttaattataacaaaagggaacatttattgggtgggacatgaccacatcaagtgatctctaatgatgtgtttgggagatgagaataataatattaaacaaataaaataaaataaaaattccatttttattttattttatttctttgttggaagccaggtgaaagagaagagaacctttttcaagaataggttttttttttcttcttaaaatattctttcatataaataaatccaacatagattaatagcttctaatattattaaagttggaatttttataactagctataataagtgacactcaattcatatatcacaacttcaatattagtggtaatcatcttaaacttgaacaaacaaattcatcaaatatgcaatcatgaaacctagaaataatagtgtgtatatataatgataggaaattgatatttttctagtataatatacatacaatgtattttgactaaaattttgaagtacttctaattcaatttgatttgaaatactttaattttcaatgattaaatattattcaatcaacacaactattataaatttttagtaattaaataaatattagttgaaatttataaaataaaacaaaaacacttcatcattaatttagctattctaaaataatcaaaatatatacttagataacaacataaattttttagtaattagataacaaaaaaaatactaaaagttatatatcacaatatacactactataacattcatcgtgaacaaatcaagataattttttatttaatcgaagaacatattttatcaaattatgaattataaaagaaagaaaatctcgtataaaactatcattaaaaatttagacaataaaattataactacctatacactacaaaatactaaaatccatatttaataattattataaaaaattaataagcatcccatttttttttttgtggtgttatcgaacactagttcaaacaacaatactaaatagataatcatcataattagccatataattaattcattaactattataatatataatttaactagtaattaattatttatgtgagtatttattttatgtttttctaggttagaatttctctcacatagtcatactcgaaagtcattgactaacccacaaaaacacacgatcttttcaaatcacacaccaaaactcaataggcgcgtgcaaaacacacaacccaatcaccactaatcccaccccttcacacaaatcccatcaacatatcaaccggcgcgtgtgatacacgcgttgaacaagcaaatgaagtcaaacagttcttgtcttttacctctttttttagagagagaaagagataaagagagagagtttttatagagtgttgtcagagattaggggcaagagaacgtgcagaatttgaagggtagatctggatccactcaaaaaccctttctctctcttaaaatctttctttctctcactgccactcttaaaaagtctttgtttttataaatattcaaaggagagagaaagagtagtagtagtagtactagtactatagcttagtttagcttttaacttagctgagtttcttcttggatttctttcattataagctcaaaatcccaaaaaaaaaatactcagagaaatcagagagagccagatttttcttgatggggttcttcatctaatttcaggctataattataggaaaaaatagaaggtggtggttagttttagatttgggttttttgtagtaaacttattaactttgattgattacaattatagtgtttgaagttttgagctttatatagaaataaatataaagactcgatctttcatatgggtaagttagtgttgtacttttatgatcacttctgagtttcaaattttaatttggcaaaataaaaaagaaaatagaaagagaggctaactcaactcaactcaactcaaaaagcccaactcaaccactttgtaaaacaactcttattataaatctatatagtctccttttaatcaaccacacgagaatacactactactacttttttttttctttttataaaaaccctttctttatctttctctctctctttctcacactcacacacttcaaaaaaagctttctttttcttttctctttacctttctttttcttgggttttgtttgcaggaataagagaaagaagagagagaatgaaatagagatagagagagagagagaaacactactatactactactacttctagtactactcttactactaattactactcatttcacaagttgggttggtaaattttcctagaaaaatttcaacttgaacaacaagaagaagaacaagaagaagaaagtttggttttttaatttttggtgggttagtgttggttgtgaaagaaaaaaagagagtaaagatcacatttttataacaaacccaactctttttcttcttcttttttttagctatggattcttatgaagctacaagagtagttttcacaaggattcaaaacattgacccagaaaacgcttcaaaaatcatgggtttacttctaatccaagatcatggtgagaaagagatgattagattagcatttggtcctgaaactttacttcactctgttattctcaaagctagaaaagatttagccataaattcttcttcatcttcatcttcaccaccattaacaccgtcaacaacagttaacggctccgttaacttatctctaacaatcccaaactcaaacccaacttcatgggttgatgagttaacaattagcccccaaaaaaactcatcttcaacttccttaaactcatcatctttacccttttatgcaaataataatgataataatatcataatagatgattttcatcttcaaaacccagatttgttttaccaagattacttgtcttcttcaagtccaactgatcatcaccaagccgtttggtcaaactcctctgttaatcatagaaggagttgctctgtaagtgatgtgtgcctcaatacagaggatcccaactctggttttggatggaaaccttgtctttactatgctagagggtattgtaaaaatggaacaagttgcagattcttgcatggagttggagttggagttggagacaataacaacaacggctcagcttgtggctcagatggctcatcacctaagcttgataacatga

SEQ ID NO: 37119 - DNA, 1269 bp, Cannabis sativa
ggtggccgccgagggcttggaacgaagggaactgccggttacaggtcttgcactcgaaaactcggttaggtgatgaagattgagatggagatggcgataatgatagggttgaagatgaattattagagtactgatcgaactgatgaagatgaagattgtgattatgattatgattatgatgatgatgatgactgccgttgtttgttgtgataactgatcctgctccacgagacaggaacataagacagttggccatggttaggttttcaagctctctgtctgttatggatctcttcatgatttaggaaaaaaaagaaaaatgacaaacaaaattgggtaattggaacaaaaaaaaaagggtgtgtttggatgttttcaataagtgaattttttttttttttttttgaaacaaaaagaaataatattggaagatttattgaaacgtttggtgtatttatataggggccaagaaagaagtaatattagagtttgttttttagtcaaataatgactttgtcatggttgactttttagatatttttgacctttccttcaaataaaaaaaattattacaataaatagctgggtttaatggttttattgttattataaaaatgtctaattatattatataattattttattaacgcataggattaggaatcacgtaagcatgacactgaataagtgggtgaggagaataagctataaaatttgagttatctagaagattcatacgattcatatgagtattttaaaatttggactactagtttgatagtatataaacttgcttttttgttgatatgtttttctttggtaaatgaagctacgtacacttgatgatcatgaggtgcacacaggaaaagtatgtaccatagccatatatataaataggacttagacttataatatacgactattcctctatatatatataagttacagaatacgtggcacatatacattttatagaataaaattccttacaaaggaattttattacttgaaatagtagtaaagagatatttattcaactattgatcgaactttccatgtgaaagtagtaaatgtatatgtaacttttcaataattatatgtcatgcggtacgtattactaatcaaatacatgtgaactctatgtctctatatttataacagtaaaacccatatatataatcaaacaatatgggtcacgcgtgtttctatactttaggacaaatgaaaatcatgtaattcatgcattaaattatatattaattttattac

SEQ ID NO: 37120 - DNA, 4532 bp, Cannabis sativa
taaaagacacaactttaatctatcaagctatacaccacttaaattaataaaaccacagtaaggattttaagatttctaaaacaacattattataaaatgtagtaaaaataatttcttttcaaaatcaagaatttggttctttcggagaggatactccattactgctctgtaaccttttgtcccttgacagcaaccgtaaagcggggataagacccagggcgcattcctttgcttttaagcaacgtttcaattctgtgtcgttctctcttagcaatttcttccaggtccacataatttgctggagaatctgttggcaaaggtgaggaagcaacctgcgtagaaataaacatcattgcaaatttccaaatcatttcatgaaaatgaatgacactacaaataagtaaatatcaaatgataaagaatgaaaaatagacacacaacctcgtctgcatcagcatgtgcagtttgcagtccttcaactccaaataaactagctaagagagcaggaagtagaagatacaacccgttaccattgggtatcgaattggaccagcgaatttcagatgcattggattggtactggtggtggtactgaacagatcctgcatatattgaaagtaaagcttaaatattacaaaacaacctgtaagtacgttgattacacccaaccaccccctccaacagaaaaaataaagaaaagaaatttatagctgtgattatagaacacagaagaatcagagtgacataatcatcataaaagcactcaatgaaattggaaatttttccatagtaattataaagagaagattggggtaaaagaggagagaagtacgtacggagatggagaaggcgtggatttgaaattgaaatgtagggggaggaggaaacatgatgaggagtagggtttagggttttagatggagggaatcttcggagaagacgagacgttttcaccagtcgctctacgatgcccataccgattctgcgccttactgatttacaactctgaattctggtctccaactctcttttctatttctcttcgttgaactggcgcgcaacacaccgttagctgttatgtcaatgattttatttgtattaattattgttattattttctttccgttagattaaagtgattgatgcccttaccaaaagataataataataattataattgatgcagaaaattatcaattaacatcatttgggttaaaatttattaatctgcatttttcttactgattttttattttaatcttcgttcctgaacatttaaaaattaattgtaaaatttacatttaatatgttgaatggggttgtcttcgggctataatgtatcgcatgagttaccatattatgactcgtgtcttctcggtgcagtacaaaattatacatggtagccagatgacgagtcttatttgtccttctggtggtattcgctaaggtgattttctattcataagcggatttagaagtgttgagggagagttaaaaagtccactttaagatttaaaaatatattaatgtacaattgttatttttaaatatacacaataattaaatagaataattggtgattaaaatactttaaatttacaccaaattttgaattttttttgtcttttttaggtgtatttatattttatttattaaaaaaacaaataaaatataaggttgaaattaggattaaatttatgactactagaataaggagatattgtcttttttaatttcaacatttacaaattgatgccatgtactgacatgtgtaaagagagtaattaaaaggagaaatactagaaatatatttcctactctattttgccgtctcttagataatgcttacataatccttagaaaaatggcattattgaaatatttatgttatagaaaaaaaaaaaaaaaaaaatacacgtcaaataacagagacagttcaaaatagagtagaaagtgagtttagactaattgaagttgaaaatcataatagaagtaactttgataaaaattatatttttttgtcatatattttgttgatttacacacgaaaaaaaaattaaaatattttataaaactacaataaaagaaagattttacggtttatttatttacatatatataatgtgtaaaaaaatatataaattttcaaaatggaaaaaagattttttttatagctttttattaatttctggtagtttctaattttcaacaacaaaacaattgacattttccaataaaatttaaaaagaaaacataaatatcatatttttacaaactatgaagtccatcaaatatgatgggaatcatcaattgggccatcaaatggggccttctttaatctttactaatacattagtgggccgccaaagtttcttaagaaggcctattattgatgtctaatctccagaggttgtatagttgaggggaaagcattaattttagtaaaaagaaacactctctcagcatagtaaggcattgggacaatagaaaaagtgaaaatggatataacttttgaaacttttgtagccaaatcagggcactgaaataatatatgtattgagagtgttaacattaacattatcatcgtttcaagtgagaaaagaaatacccttgtttgttgcatttgggttggctggttgagttaagcaaagaagcaaagccagtgacttggtgcttaagtgaagtgaaaataaaaatggttttgtctcacaaaagatggggtgagtcatttgtggataatactgattttaaattatataaaaacatggattagtaagtcaattcaaagcaactagtttaagtcaattttcaaaccctccaaagtccaaactaaacgaatttaaccaccgaaatactaaatatataatatgtactgaaaagtagtagagtacaaattcaatctccttgtcttttcttctgtttacgtttcttcttgtgccaaataaacacgatgaaaatgaataaagaaagaattgtactcttttttattattttatttcccttctttagaaatatgtactctgttttttttaacattatttctttcatctttatgcctaaaaagtatcaatataaacctcaaaagatgaatggcaatttcgaaataagtgtttgtaataaagctacacaagtcacagattcaagctttcttctattcacatgccttgagtagaagaaggacagatcagcaaatatggttttgattttcaggaattactcactcatctctacatagaaaccactttcaactttctatactactactagtagaagtagccattattagaaacgaaaaatgggtatgacgaagttgtgatctaatttaatttatgaggttcatcgttgagattcagcctcgggaaatgaatatataacttacacacttgagagttttgtccaaagacaaaaaagaggtttactgaggaaagaaagagtgagtcagaaactttagatgataaaataaaaggaaaatgatatacataaccatctttttgggtgggttgcacatgaaatatttttaagtagagattgctcatgaatgtgaatgtgaatgtgaaatgtgataccttaccaatcaattaaataaaaactccgcatgctatgctttgcatcaagattcaacaattgtaaccaaagctacaaacttaaacactctttgtctcataaataaaatgaatcataaataatacataaacaaattaatattatttataacaagttatattagcaaatcccaccgttactataattacaggtacatatgataaacttttctttttttcttaaaaaataaataaataagaagaagaatatatagtccttcaaaaatcgaacctttttttcccttaagctttgaatataaaaaattaaaatagtaatttatattatatgttttaatgggagattaacaatataagataagtagctaattaattaagggttaacttaatacaccttcttagtgaaaagactccggagattaaaaagatttccaccgtttccgacactactaacaccgccaccgcgaccaccacctccgccgccgacttggccactgcttctatttcttccgttgataccgccaccttcactgccggtgacagcaccatcactagtgccaacactcatcaaagcactattctcattacttctacaactcaaatgatttctatacccaatacacatcggaacattaatattcaacactttagctttcgtagcaccaccagcaccggcatcggaggaagctgctacacctttactccggcgaatttcggatacttcttttttcgctcccttttccccattccgtaccaaaggctcaacggttctaccaataccaccgccaggagttccggctccggctccaccaccacgcctaacttgccaaactgggctgctccggcccaaatgaactccggcacgacttggactgctcggccattttctggactttgactcgccggcggagttgctccgggaacagggtgcgctatttaccttgcgggcaccgggagctccaaacattgtct

SEQ ID NO: 37121 - DNA, 5169 bp, Cannabis sativa
ctctccctgtgtcttcccacagtcgattcaaaatcaacgatgatgttattcacacgagtatcgcttcgcatttgaatcccggtaatcttcgttttgttcttgatgtactcattgtacccaatgaacaagtcaaatggggtcttgggttcttgagcacctcgtcgaccaaactccggtgagaaactaatcgtgtattggatccgcggcgtacctttggaaagcgaaggcaagtggggtatgctgagatcttggattggattgctatcaaaagctgaaaagattctttgcagtgatgccaaatcctgttttgcttgtacggctacctctcttagcttaaggtcactatatccaccgtaaaaatcgtagatggattgtatttcgtgaatttggttgatcaattgggttaccttagccaattcccctgctaagcccagatctctagatcccgtacccactaatttattccggtttattgcgatgggatcaaaaccatggccgacaccgacaacatgttcatatccagttgtttcaaatgcaagaactttaggcgcattgagtgtctggctcggaaacttgcgcgcaaactcaaccatgtcttctcttttgggcaactcactgtctttaacccccaaaatcatctgcttgaatgaaacctttgactgagaattttcaacggcggattctaatctcacttgaaaatcagcaccaagtgtgccgaacttgaatactccattggccttcagctccaaccccaacttcacactttcattttcagtttctgtgtggaatgagtaaactccaatatattcccctcctgtggtgatcgaggaaacatatgcatctccataatggaaaaagaattcgcgcacatcactgatcggaacagcgatatcagatgccaatcgagcgttggtctgaaccctctttccttccacttttctggcaaccacaacgatggccaagcttttctctgttatattcagattccttaaaaaattcatcttctcatctgctgatcccagaagattgatgttgatgtttgctgactggttgatgtcgatggtgttcatgagtgaagtgtgacccttgcaaatggtgtaggtaacctcactttggacgccgtcggtgatgctttctccggtgactgcggtggagtaaccacttccagtcgtgctcgaatagccttggaaaagtatgactggcctcatctctctctctcggcttaactagactttgttaggacaaagaaccaaaacaaaagacttatggtttttttttagtaagatttgcctttgacttttaatcaaaaccttaatattttatagggaaatttacataactctaaatattatacacatcaaatttaaaataattataaaaatatctcaaccaaattaattaataaaaaaataccctatcacaatcaaacttatttatacttaaataggggtatgcataaattaattctaagggactaatttaattataattaattgtcaaatattagatattaaattgtgatcggattggattagatgttatttttaagaggagcgctaccatcaacttcctgttacaatctcttagtcaaccttcacgtccgaaaacatatgttgaaatatttttttttttaattttagtttacagtactgaaaatacgtttaaagttttttgaacacgtgtggtaaactctttggaactttttaaatttacagggatgatattataactataacgaatatcgctatgaaaaaaatatttcgacatgtgatttcggacgtgaaaattgatcaagtggttgtaattagcattactctatttttaaacatccaattggattggatcatagatgaagtgtctaaaaattcaacacatttaacatccaatcaaattaattagtattttaatttagtttgaatgaataattaaattttatattgttatggtaaaatgtataagtatatataaaaattaacattaaaattataaaacagtgaagactggactccatgaccaaagcttgtcgcgaggccgagcggagggtcctccgtctcctccacggccacgaaactcgcaaaaacctccctcaaatccatgcccacttcctccgccacggtctccaaaaatccaaccaagtcctcgctcacttcgtctccgtttgcggttctctcaacaaaatgagttacgccactcgcctcttccaacagactccgaaccccaacaagaacctcttcaattccatgatcaagggttactctttacgcggaccctttggaaatgccctgcattcgttcaatcttatgaagagtcaagccatttttccagacgagtacactttcgcaccgttgctcaaggcaagctcgagtctttgtgagtttagaatcggtcagtgtgttcattcccaagttctgagatctgggtttgagtcatttagttccatacagattgggattgttgagctttgttcaacttgtttgaggatggacgatgccaagaaggtgctcgaccaaatgcctcacagagatgtaattgtttggaatttactaatccgtggcttttgcaaaggtggtaatgtggatatgggtttatccctttttcgaaaaatgagtgagaggagcattgtttcttggaattcaatgatttcctgcctagctcaaagtgggagagatagtgaagctttgagaatctttgttgaaatgctagaacaaggttttgatcctgatgatgctactgtagtgagtgtgttgccggtttgtgctcgtttgggggctgttgatgttgggcaatggatacattcttatatagattctaaaggactgttacaagaagttgtttctgttgggaatgcactcatcgatttctactgtaaatgtggaagtttggaattagcctcagctattttcaggcgaatgcatcaccgagatgttattacatggaatgtaatggttttaggcctggcttttaatgggaaaggacaacatggtgttgagttgtttgaggaaatgttgaacaaaggggtaaagcctaatcatgccagttttgtatcggttttggcatgttgtgctcatgctggtttggtggaaaaaggaagagatttgtttgcttcaatgtcgttgtctcataatgttaaaccgaaacttgaacattatggatgtatggttgatattctttgtagaaatggaggtactaaagaggctcatgacatgatcaaaagcatgtcaatgaagccaaatgctgctttatggggctcgttgcttagttcttgtcgtacttatggtgatttggaacttgcggaaacagcactttgtgagcttatcaatgttgaaccgtggaattctggtaattatgtgttgttgtcaaacatttatgcagaagaaggtaggtgggaaaaggtggagcaggtcagagtgttgatgagagaaaattgtgttaaaaaagagccaggacacagtgcagttggattcagctgataaaatatgtttgttgaagcctagaattgtcttatttgtggctgatctcaaatatttggcccccttcttgatgaccaatggtgtaatgctcaagacaagaatgatgtctctttggactcttttgtcccgggagatggtatcgaaaagtggactaaaccagctgaaaatacaattaagatcaacactgatgctgcattatcttgggaatttggtggaggctcgtgtggcttgcagggacgggttgattcagccgaatatggccgaggcaattgaactgaaagaggtgctaagctacagccaagttggaaggtggtcgttgaaatgaattcgctattgctggttcaggctattcaacactggaggtctgttgctcatgaccaaatgtttcttagtattttatcaaattgtttgctaatggggttgctcagtctagcaggaacatcctattttatttctgatgttccctttgtagttcaagatgctatgttatttgatttgaattaatgaataaaaaataactcaaaaggtatatccaaatggagaagaagcataagaatatatgattgagattgctctagaccttgtttgtaaagtgaaaagcagtagcatttctcctgattctgtatatgtatacaaatgtcatacattaagaaaataaatagtagttgtatttcttcatttgattgagaaaataaatatcagaattacaaaaagaagcaaaagcttccactaattagtagtatcaatgcataaaccacacttgaaatcttcggcctctctccatggcttatttcaccttgtggaaatcctccaaaattaccttgtggaaacccttggaaattgaataaccctacattacaccaacaatttcttgtaacaataatccatatataagaaaattttacaatacacattttgacactttgagaattataacacatcaaaattttatgaagatcatcttcagaagatgtacattgtaataacaaaaataggtttcaaatttttagtattttgtcagtatcgtaaattcagaatttttcaatatttaatgaaataattcttctaaatagaaaaaaaaaaaaattcatactgataaaaacaaaaatgacactcgaatatagtcgtttcgtataataataaattagttcacctttgcggtgttcagtgcagccgacgtttaaagcaccccttatgtctcctatagttgccttattatagaataagaagtttgagaaaatattgtcaacacaattgaggactaactctgtctcagccaaacaaggtccattacagaacaactcaactgcttgaggaggcacattaagcttgccaccttcatttaatctatatgtcttatcacaaccagcatagatctgatttcataatttaaatataagtgtaacaaataagctctttagacaaaatttaacaacatataatacatatcataagatcgatacaccctttgtgtttttgatatctgaatagttgtaatttcaatttttttataataatgatataaattataggaaaattttacaatgcaccctctcaaaatggatatattgatgcactcctatctgttttagcatccgaaataattttttggtcaaaattttaagaaattcaataaagtttaacacgccgaaaattacgttcaaacagcgtgttgcacgcgtgattattttattttata

SEQ ID NO: 37122 - DNA, 3699 bp, Cannabis sativa
aacaacctaaacctaaaacaagaagaaaaaaacaatcacccatcaaaccaagtagcatggaaagaatagtaacttttagaattatatcagaaacaaatttctattgaataaattatggtacagcaaaaattgtggatgtcttttgccactaaatcaaatgtttttctatcatgtaaaaatttgcagcatgccaatcattatcaataagaacgtcaataattttcccactatctggctggaagcagatgaaatattgtgtgctccaacagtgtagacttctcctgtactttcatcttttactttaatgcttgtagagcctattatatcaaaatagtaataataagaaaaagagattaagaaaagccataaacaatctgaaataagagagatatgaactcatggaacaatttaagactcacaattatattcagtccacccaatagcttgattctcaagatcatacaaaaccagtttatttgaaagtaccatatctgcatttgtgaataacaataagttaaactgactgaattatcatcacacatcaaccaggctatccataggttgagctcaagaaaacgtatttcattttttaatatgctatataatgtttcggctttcgtataaggctcctgtttgtttgcaatacgtttgagacgatatttacctcctaaaagagtcatttcctttccatccttggattgcagcccactgttctgccaaccaatgcaccaaacatcctcctataaataattagatatgtcatgtgaaaaatgtaaattagcccctttaggaagatttagatgtatacgaaaatggtctattcgagaaataaagaaataacatgtaaagtagccatgtatgacttcttgatcaaacccagaccttaatcaagtaaagttatactaaaatgctatagatttctaacattaactttacttacacgaatctggaatagataatcatgaggataaacaatcagagtaagagacttgtcaaagttgaaggttacagttggaaatccatcatcgacactgcaagaacagagcaaaacatcaaatagtgtggattttaaaagccttcttagctcaaaaatgatatacatcacaacactgagaaaaccattataataacacaagcctttaacttcataattggcagcaaacaaactgaatgataaaggtgaattaagagtataatataatttcccaatgacagatactgcaagagaatagttgttaaagccttacttcgaagtaaactggaaacaagaaaactgatcttcaacagtatgtaatttcaaatcaggttgccgagacatgatctagcatttatttagaaaagagaaaaagaaaaaaaaaacaaacaaataacgcgtaagtaagcatataaaaagtaataataagattaagacaaggagtttaaaaacatcaaagtaccgtaccttattcatcactccctcataaaccagctctggaagataagccaatgttgtaccactatcaattatagttccttttccatctccagcatcaaatatatctgtgggaagttggagaacatcatcacccacctcaattgccttcataacaacattgtaatgcgccctaagatagttaatggaagtataattatgacaacatcaaaaagcatataccgagcttgattatacaaaacaaaaactccttacacaaacataagaagcataaaactttacttgtcaaaatttcatgtctcaacatttcacaaaactcataaataacataatctattccaatccaatcatatgcagtcaccagcatcctttcttgcatgatattggtggatgccaggttcttcaagtcaaacaagtattgatgcaaggaatataaaaaagagcacaaacaatacagcaaaaagtcttcgaagatattacttactgatttggtaccaatggagttgtctttacttttggctgcaccacttccccaatggcaaagattccaccaccatttgcagtatctaagcagtgtgcaaatgattttttcacctttccagatgaagcaagctgtgagagcattgatgaattcgcctgtccaaaaccaagtattccgtcaagagcttcagacgatgtgcctagctctccggattgtttagctccacacctactccaccaaaggtttttatataacatattaaacaaaagcacagtaatgagcaaagctatagaggaaaactcacccaaatattacactgccatttgttgttgctgtttgacggtttccagtcactttattaaagtgtaatgtatccttcacaaagtagccagcagttgagcttccatctccgtaaacaacattgtattggcatagcaaatttggcttgcaaccaggaagttggccatcatatgtagcagtgcaaaaatcttgatcacaattaaccagtttagaagttgaggagccctttggatcatacaatgtgagatctatctgttgtataagattcaaataataaacttagtttttatgaaccatcaaaaacgatggccaaacaaggtaagcctcgggtttttacaaaaaaaactttgtaagatccgaaactacaaccaactttttgagacaaattatcaagtatggtctaagagaatcaatataaatataaggagacttacaccaagattgcttttcttcggacacttttcacagccgatgcaattcacccatagaatgtcacttccagtatcaacttgcacaaaataatcgtttgaaggagacccgatcccaattctagcaaagtatagcctaaatcaaccaaccaagttagcaccagccaaaagccaactaaaacgaaatcccattatcaagttagcttgtttatttgtttcccatgttatacgctgctatgcattagactctaaacaagggtaatacaccgtagcagccaatacagaattgagttttcactagtcaagggtaagaagaaaaacataagattcacaattctgtatgcgcttcaactttccctatctatgttcaagaagataaatgggaaaatgcaatttgtttaagctattctttccgataaatgaaatttaaaactctaataaaatcgaacagaagtggatcggatgctatcatatatgaataactattaaacaaaaagggtgggtgggggtggagctcaatcaaataccaattaatttaaacttaaaggcataaattaaaaaatttccattaattaatacctttaacaaccaatctaaaaagccgaaaatcccaagcaggaggaagaaaggtaaaatacaatcgttagctagtgaatggatccaatctgttgactcaaacaagtacattatgttttcactttctatttctcaacagaaatatcattcctataacgaactccaacttgcaacttcaaaaaaatccaaaacactatataaaaattaaaaaaaaatccaaaacacaaaaaaagaaagtttctcctgtaatctacatgaaatggacaccataatcctaaaatacatacacaactgaaaccatttggatcttatataaccaagtcaaccaagcacatacgaacaaatatctaacatcattatgcaaattataatgagagctacagccaaatagacatgattctaacccaattgcatttatcataaaaactattactaaaaattataaccaagactaaactttttaattaaaaatagaaagtagg

SEQ ID NO: 37123 - DNA, 3926 bp, Cannabis sativa
gaatttatcatagcctcttttcattaggatgaattatgtttaattttttgagaaactagcttgttataatgagatcatttttaatgggtcaggaactctctcaggatgcataccgatgatccaattaaagcagaataacctataaaatctctataactagtacgtagtttccaaaattatcaaaattaccaaagaaatagaaaataaatctattccacgtaattattttttttagttttatatatataaagattggtgtacttcttctaatctcataagtagctagtattattagtgattagtgggtaattaaaatatgcattccatacttcttaaagtttataaaatctttttgataaacatcaaacatcattcaatatctacttcaatatctttttcacaaacatattcctcatattttgatttaataattattataaaaaatcactaattatttgtaaaatattatatagttgtattagataagaatgatgttactgttattaaatatcgatattaaattacaataataacattataacatctaaatctctttcactacaatactcatattaaaatagtttcgattcatattgtgagaaaattgatatgcaaatttcgagtacccaaaattggtaagtgtatcaaaagtaagagatcaagaggggagggaccagagcttgggaatgacaatggtgaatgtgactttgaaaaaccatgcaaattctcataaacccaaatcacatttttagccctacactacactttctatcacctattataaaatgttcttgctttggtgggacacagttcactcttcttcttcttcttctttttcttattttaatgtattttgttttcttgttccactaagcacaaacacttaaattattgttatctttttgatagaagaatcatttgtgcacaatttatatgcaacaaaacattagggattaggcaagtactttaaaattaaatatagcaagcttaaaaaaacttataatataccattgtattcatataaatttaaaatatcaagttttacttggtgaataatagtgtttaatctcaaactcaagtgttttaaaaatttgaaattaccccaaaaataaacttaaatataaaacccaataatcacaagcactctattaaaattatgccaattatacatttgattttacatttttaacctcgagaacctaaaccatagcaaacacacccttattaatatactatatcaatttattttgagaatagttaaatactagtggtgttcaatacaacttgtaatatcacctgtcattattaatataatttaacatcgacaataaagctttcactgtaaaagtagagaggtttctttcatttaaaatattttattatttataggcatatttaaacattcacaagtcacaatattagcgttacgactaacataataaagaaatactcctaaaaaactaaataataaaacttatattaaaataaataacccaaatttcagtatatcattctcacacattttaatttaataaatactataaaaattactaactcataaaacaccactagtattggagatgaatgattatttaatatgggatgagtggcaaacattacacaagtgtaaagctctttctaccactttctctccaattcatttcatttgttcccatattggacacactcaacccaactgcctctccactcactgtttcataacatttactaataatttatgtcacaaaaacccatttgagttatatatataaatttggaaaaaaggtaaaaacactagtggaatttgaaaaatgtaatctttacaaaggttgaacttgattatgctatatatcacaaacccaatgatatttatctacacagccactgtaaattgcttccaattttcaatatatgaataaaagaatgaccaatgaccaatatgctcatcctcattatatatgatgtcaatctatatttatatatgtaaatgtgatgacatacccctaaaaggtttaggggtaactctcatgtattgggagataaattcactctttcaatgggtaatgatgaattgggatgaatatatcattatctattttcttctccattcaagttttgggatactgtcattgagtcactagaattgctttcgatgcatcaagatgattaaggcgacaggttccaagaagatactcggggagctcctccgttgtgttagcctgagaaaggacgattcatcgacattattacatcaacatttcatattgtcatggtgaaaaaaaaaaggttgaagattgttctacctgtacaagaaatgccatctcaataactagattgtttaggtacccaagaacaagactaactacacccctggcaaccgtcgatgacccaatatcgatcccgagctggatgtagccatatggtttaggattagtaacatggataacaaaaccacaataattttcacaactcaattttatctctattattggcggcgaaatttccttatagttcatactcccaagggccgactttggaatttagtgggctataggaaaaatatatttttgggttttattgtgaaaaagaaaatataatatttttcaaaatccgtaaaaaaaaatatgtaattttacaagaaggattttttttgggacctctgggccctaggcacgggcctaacctgtctatagctaggaccgggcctaatactcccttatgtaaggaaacttgagcaaattcaaagtcttcgtccaatttagctgttatctgtcgaattcttctggccaaatgtacacattgccaaacaaataaaattatttggaccaataaaaacatgtcacatgcacacttgtcagaccaagctagcagagatcaatcaaattggacaaatatttgcttatgtttcctcacataggagagtttgccaaaaaaaaaaaaaagaattaactatacgaaaataaaaacataaggagattcagccgccaattactatagtatttatagacttaaatcacatgtgtttcctttagtcaattaaggacaacacaatgctcaaaactaatacttaaatccacatatcaatttaatgcttgttgatgattgtacaatgtacatcttgaacaaagcaatggaaaagtatgtgagctattatgaaatttcataatgatggaaaaagggttatctttttcagtacatacctccaagtagtttttcccatgaaaatagttcatttcaagagcttgaccaatgagacatgctttctttcccacactttgcttaacaatccacgaaccctgaaaaacgggaaaaaaaaaaaatcaagtttcttatcatgcgcgtagcatgacaagcagtttcaaacttgttaccacgcaactagcatgatgagacatagtttgcataccgagatttcacaaataagaaactaataaaatcacatttgacagtttgtttttgaaaaggacacttagcagttaagatgtgatatgattacattgcaatgcagcggtttcaaagaagacaaatctaaaagcaacttctcagctcttaaaatatgatcaattcctgactgaactttctataaagaactctatttattttatgtttcttgttgaagaacataaaaataagttccttccaatttttgtggtaacatatgttttatgcttttctacatttgaccaatgcatataatggagtgtgaatatgttctgcctgatcagttgctaataaacaaatattaatttccttctaaaacaagaatggttcacccgaaactactaaaaacgatgtatccgatagaataatcctaaggtagaaatattctatcagatatttcccaaataaacactagtaatgaattcctcaagtgatctatattctgaaaaacagtgagaaagttacaatatcaagctttcgagagg

SEQ ID NO: 37124 - DNA, 4435 bp, Cannabis sativa
tttgaaaaaaaaggaatagtttttttaggttttaaatttttggtttaggaaattttttttttgattttctaagtatagaaaatcaaatttccctttcaaattcactatttatgagatcaacaaaattggtaacctccttatcacaagtaaacccaaaaataatatcatcagtataaatttgagcaacaaaaataataggttgcgaatgcttgataaataaagtattatcagcagtacctctcacaaactcattaaaaatgaggaaagaagttaacctgtcataccatgctctaggagcttgtttgaggccatataaggccttcttgagtttatacatatgatcaagatacttgggatcttcaaaaccttgggttgtttcacatacacctcttcttgaagaaaatcatgaagaaaggcccttttcacatccatttggtgtagtttgaacttcaaaaaacatgccacaacaaatagtaatcagatagattcaagtcgagcaattggtgcaaaattttcctcaaaatccactccctcaacttgattatatccctgagcaacaagtccggccttgttcctgttaacagtgccaaattcattgaatttgttcttaaaaatccacttggtcccaatgatgtttaaaccatctggtttaggtactaagattcatactttgttcctcttgaactaccccatctcatattgcatagcattattctagaactcatctagaaaagccttagtgacattgtgagaatctactagagagacatatcaagcagatggaatgatatttagaactttacaatgtgtcaccatggtggtatttggatccccaaccacgattgtaggtggacgagctgtttgaatccaggttggaggacctttcttatataactgtactttagaagaattactaggatccttagtggttatttgattatcaaaagtgatttcagtagctggtacgtctgttgaagtactagtaatgttctcagatgcactggcacgtctctagatgagagagttcttagggttttcgttatgtccttagagcattagacataagaggcatcattgatatatgtggaccaagtggttattaatcaccatggacggagtttgaaatttccagatcattaaattttacatttattgactccattattgtggaatttccttttttatacacacgataagcacgactattaatggagtatctgagaaaaattccttcgtcgctctgaacatcaaattttcctagatgatctcgatcattcaatatgtagcgaacacaatcaaaaatgtgcaaatgactcaaattaggagtcttctctttccatggctgattagcagtttaagtaatcaattatatcaattactcaaatattatacatatatggatatctaaattactcaaattaattatatcataaatactattgtatttttctttactttattgatttaatttctatttctagtcataaattctcattcaagttgtcattctctttccttcttatctattttcaattattcataataattttatataattattaataatttgccccctaattaatttgtttactattgaccctcccattttcaaattactccccccgtcaggcgtaggatgtgtgtactcaattaaaagtaaaataaatatgcgtactcaattttttttactagtatactgatcttttgtcaaatacatatttactaaaaagggattttaaaatctaacgaataaaaatttatacatcatcatcatattcattatgattcctactaggtttggaaagttattaaagaaaaagttttgaaagcatataacacacatatcatatatattgataatatgatgaaggccatgtaaatagatcaaggggaatatggtatgggtacgagttgaagagaagttctcttatgaacagtgattccataatcttcactcatatccaatattgcagatccatcatcatcaccaccaaccaactcccaatcaaaccaatataaaagatgagcaataacatattcaacaataacagtcccaaatgacactgcagggcatcctcttctcccaatgccaaagggaacaaattgaaagtcttggcccattttgaaatcaattgtgttgttctcaaatctctcgggcacaaattcctctgccttgtcccactcatttgggtccctttgaattgcaaatacattgatgagcacccttgtctttccatgtatatcataccctccaagcttaacacaacttgataaagtctttcgagggagtaaaaaagggagtggaggatgcagccttagattttctttgatgacacattttaagtaatccatttggttgatatcgttcatatctatctctgacttatttcccaccactcttctaatttcttcttgaactttcttcatcactcttggatttttcacaagctctgccattaaccattccattgttgctgaagtagtatcacttgcacccacgagcatatcctgccatttacaaatgtaagtttctacttattaaattaaaatgcgtaccttagaacacctcaaaaagtattggatagtcaaaagaaaaatatatgttacatccttcttagactctatatgtttcaacattcaaaaaaaagctttttttcgtaaacattattttgaatcacatgtagattttataaaaatatatataatttaatatcgaaaataaaatttaaataattacttactacacataaaaaaaaaactaattactgtccaataaaacatttaaactttatttttaacattataaaatatttaaaaaaaaatctgaaaatttagtaccttaaaaactataaaaatatatgattatgataaaagatattagactaaaaaattctttcaaaaaccaaattaaatagagatatacatagactttccacaaacatatactagcaatattcctataaaacaaaagagttaaaacatgttgtatgactaatcatgagcaatttccttgtaaaagtagatataatcaaaatttatgtagtgggaaattaagtaaaagcctctaaaaagggttagagagtgagagaccatgagaattcctttgatgttctcacgagtaaggtcaaagtcaagcaacccatccctttgaagtccaaggagaatacccgcaaagtctttccttccgaattcactattataatttagtacttttttatgttcttcaaccacttgttctaaaaaagtgtctaatgctctaaacctccgagtcaatcgacctgtaaaccccgtaacaacatcaatccaactcaaatatttgctagggaaaaaatccccaaagctaaaagcctcaaaatcttccatgacctttctagtcagctctccaaatttgctcctaccattttcttcctcaaaactctgcccaagaatacatctagacactatgttgttagaagtggcaaccaacatctcactcagatttatacaacaaccttttctaataatcctattgaccaaaacatcagtctcttctttcctcaccaagtggaattgttgaacccttttgtgactcaagagttcgagaacacaaattttcctggcttgtctccaatactcaccgtaaggggcaaagcccacatcttgaccgccgtaacagaagatgtcggcggctgaggttttgggcctgtcggagaaaacgacgtcgtgcttcttaacgatctctttcaccatttctgaagatgagaccacaagggttgggacttggcccatttgcaagagcattaatgggccatatttggctgagagtgttcggagtgaacggtgcgggtgggttccgagaaggtgaaggttcccgatcagtggtaacctcggcggtgacggtggtaagttgaatttggtacgtgatctaaagcgtgtgaacaaaatgattaaagagacgaagaaaatagagatggggaagagcatgggatattgcattgtcttcgtcttcttggtgcgacacaacaatgtctagcttttcttgttccttggggctcgacagagcttgatctgcaatggggctatggttttttgtttgagatttctgggaaagagcagggaggcggaagggaaaggttgaagagatgggaattagggttaggattaataaagttaggatttattcttgagaaataaaataataataaaaaaaaagaaattaaggtttatttaggtttttttctaatttttatttttttaaaattgttttttaatttttaaagaaatttctttttatttttaaaataataattttttttttatattttttaaatatttatttacgttgaccaataaaattgtgcctcgtgtacattgtgtacacatagacgttccaccatggctgttaacagccaaaaatggatggaaagggctaagtgctaacataacttgggtttag

SEQ ID NO: 37125 - DNA, 3812 bp, Cannabis sativa
atacaggtggacgaaagggctgtgttgaagcactttgagtggccggagcaaaaggcggatgcactaagagaggctgcctttgggtattgcgatcttaagaagcttgtatccgatgcgtcgtcgtttcgtgacaattctcgccagccatgtagttcggcccttaagaagatgcaggctctattcgaaaagtactgaactagtatattatgttataaatattaaccgttgttttgttttatatttattaatgatgataatgttttttcaaaacagattagagcatggtgtttacaatctatcaagaatgagagaatctgggacaaagaaatacaaaagttttcgaatccccacggattggatgcttgactctggatatgttacccaggtaaattattgttgcattttgttttttctaaagattgcatttgttaataataagtttttttcgagaaattttcaccgttgataataattagttaaacttgcatttgctaatagttggaaagggtaaattatggttgcatttgttaataatcttgttttgccttagcaatcccacatcggttcttaaggtagttatataatttatattttatcctcaggtcacttatcaaccctatgataaattttgtgatgtggtttacatctctaggattaaaattagaaataatttttaaggaaaaaaaaaaaaaaaataggaaaattaacttatatactattttttttaactttttttttgtcaaattggaattttaaagttgttgcagcgctagttgcaatagagaattctaagcgattttttgttgcaatttaagttgcagcgctaggattaaaattaaaaattttaagcaaaaaaaaataggagaattatcttatatactattttttttattttttttttcaaactggatttctaaaatagttgtagcgctagttgcaataggggattctaaacaatcttttgttgcaatttaagttgagcgctagttgtaataggagtttctatatagaatttcgtaaaaatacaaaaaaaaactattttaaagtgtaaaaataaaaaaactcaatatatatatattaaaaataaattagttaataatttttttaaacttatttttcctattttgtcaataattattctattttatatattatctcacctcagctattacatttttatgttaataattcatatattttttttatgataaaattatttatattggttattttaaagcagaaaaattatttatattgttggtatagagaaaaagtagaaaattttggttaatatttcttgtcacacacctaacacattatgtcatgtttgtttgaaaggaatgaaaatagaaaagaaaaattctgttttcatgctatttgttttggtggtattgacagaaatagaagaagaaaaataccataaccatacaaattaaatacacaattattttttcattcttacttgtattaattttttttttcatattttttttttgttcccttgtttttccttcttctagttctctgatttagacatccccacaatcacatttattcgttcgaagatatttggagggaacggcctactactttatcatttttaattattcctgttaggagggatttatactcatgtgtcctaaagtaggacaaattgttcttaatacttataaatttttagtgaatcacaagtgtagattttaatggacaaaaagtgaccttggtttgaggtgatccccacattgtcacataaacctgtgccttaatatttgtataatgacaaaacaaatgcgttagggattttcattttgccttattttctccacgcacgcccgcttgtatgggtacatgtggatctctctgtttactatatgtatgtttgttcttctctctctttctctttatatattttgtcatttggatttatgagtaaagttagattcggtttctcttttgttgactttttatgagttcccatgtgtcttaaaccgcacattatttttaaatttagttggttgaagaaacaccagaaagctcctcaatccaactaaacttctttaaagaagaatttaacaataaagaaaaaggtggtgagagagaaagaaagaatgataaatatatacaatgctataatattttttcttgactactgggaccccatatgggatattacgctatttaatattattttcgaaatgatgaactttattttatgatattgaagactctaatagagtacaaagctggtcttggttaacttttacttaagaaccaaaatcaaggtggagaattgaatgtgtttttactactatagcaacaaatgaagttagggagtgagctgtatgattatacagatcagtattaatggtgtacatttttgtcacatatatagatcaagctggcatcagtaaacttggcaatgaagtacatgaagagagtatcggctgagcttgaattggttggtgaaattggtggtggcccggaagaggaagagcagcttatagtccaaggagttagatttgcctttcgtgttcaccaggtaacaaaaacaaattattcattttacaaaaggacccggtttgataggatctagatcaactttatttaatatatatatttaaatattcaaaaaaatatattaaagtgatttattgttgaaagtgactaacaaaaaagtatgatatgcaaaaaattagagttttaaaaagaaatgggtaaattataaaattttgacctacttaagtagaggtgattgattgatattttattgttgttggggggattggtggtccagtttgcgggagggtttgatgtggagacaatgagggctttccaggagctgagagataaggccagatgttgccaaaaccaacaacaacctaaacttgtatgcaggtctactgctactcatatgccttcctaaaccaaagccacctctgtagcaaactcagcttcagaaattgatctgattgatgatggtgatgattattataattattaattattcttattttttgttgtaaagaaagaaaatattagaagaatattgtgttttgtgaatataaatggcagcagccatgtttggctttcgttcatatttgttaatcagccaacccaactctataacctaacatatgagactgcgcttaatactaattctgaccctatttgtatatattgtagtattatcttatttggtggtcaacacgccgtcatcattattatatcatgttttagcacttgtattgtgtatctaaatcatctttaaagatactagggctaaagttagttcaaaaaacgacattttatttggaaagttagaaattacatctacgaaaactacgcgctcatttgtttgttttgaaattgaagtgaaactacgtttattcgtcaccaacattacaggtaagactaagagtcgtccctattgagcaatctatagaattaagcaatgaggttcacaataaacctgtgacaatcagcgcctcagtagcaatagtaattcaatccacaattattatttatttgtattgttcaattaaggtctgtaacaaatgtgttgggggggtggaaaattacacaatatgttgaattttttgttcccttcattacaaaaatgctgtgaagtgatattttttacttttttttactgtgtatttttatgtgttttatacaatagttaactgtcttttctctacataacttttgtcggtttaacatatcaaacttaaaaatctcttttatataaaaagagttgatttgatgtgggaagtcactttttgtgacactttatttattttattaaatgtatt

SEQ ID NO: 37126 - DNA, 3938 bp, Cannabis sativa
aagaagaagaagaagagaataagaataagttgaagaaagaagaacaaaatttaaattttgtaattttccttttttaattatcgcattccctccatcggagattgttgaggaagaatcgcataatcatcatattcgagctttgtatatgttgtgtgctgaacaagacttggtggctaatattggaagactcaacgatctcgctctctaaattttggtttctgtttcgtttggcgtattttctctgcaacttttcttagcggtgctttggcttcaagaaatgtaatttgctgtttttgtttgtggtgatctgtttgagaggtgtggattagaattcttcgcttgttttttttttttattattattgtaatatatatttttttttcttcaaatttcttgtttggcttagatctgctttgtggtttttgctttggttttaatgaagtagatgatttgtaggcttttttttggctttgaatcggaattcgaagcatggtttttcactgaagagatagaaaattttgttttagagagatgaagaggtccagagacgacgtttacatgggctctcaactcaaacggcctatggtctcttctcgtggtgaaccgtaagttcaatctcctctaactctttgttccactattttttttttctggctatctactattcttagtttttctgcttggtaccataagttattttttccgatgatgaaattgagtttattgttataaaagttctttgagttcgaggtcattgattttattttttgaactaaaattttccatttaataaatcttaaatttattttattttaagaaaaattgccgagtagtttgacctggttagaaaagatcggaatttttgatgtcgggaaacgctccgactgtaattccgtctggatttttcgttattattccgtgctcggaatagaaaacgaattagagctttgttattgacttatctgttatgggtagttgatattatgttgcagttaacgtgaaagttgtaatctttggttttccctgatattccctatgattagtggaatcctgctactagttaatcaatcaattgtttaacatttttatcatttattttatttttgggaaaaatgaagctcggggcaaccccagatgataggaggaggtggcgcccagaaacttacaacaaatgacgcactagcatatctcaaggccgtgaaggacatatttcaggacaaaagggataagtatgaagactttcttgaagtgatgaaggattttaaggctcaaaggtttgataatcaggccattaaatttgcgtcatttttctattaatgttctcaaatggtggtctttgcagtccttttatttttaaacttcttgttgattaaaatctttgacgacattggttgtagaattgacactgcgggtgtgatagagagggtcaaggatttattcaaaggacatcgagacctgattttgggtttcaataccttcttgccaaaaggatatgagattaccctaccacttgaggatgaccagcctctgcaaaagaagcctgttgaatttgaagaagctatcaactttgtgaacaagattaaggtggatctatctcttgttaaatgatttgttttaagattatttatcatttagtattattattagagactattatggtctcattgattaaagaggggggctcaagtggtcaggtttgctcccacaaggtctgaggtttgagtccctcttgggtacctacatagcaattgctatagtttcttaatccccaaatgctatcccaaaatattgttgggttaggctggcatcctagtttcaaaaagaaaaaactttattgtctaatccaataaatttcctccctgcagactcggtttcaaggcgatgatcatgtttataaatcatttttagacattttgaacatgtacagaaaggaaaacaagtctattacagaagtctacgaagaggtgtgtttaacactcctttggtctggtgcgtggagttatgatggtctgtaaatgtatttcatgattgtaatgtcttaattttttcaggttgcaacattgtttcaagagcacccagacctgcttgtggagtttacacatttcctacccgacacatcaggagctgcctcaactcattatcccctgtctgttaggacctctctgcttcgtgataggagctctgccatgcccacaatgcgtcagatacaccttgataaggtttatatctgctcaacttgcttattttgtttttcttatttgttattatgttttttttaaaaaaagttttttgatcgagtgtagtacatttggtgttcttacaatgttgacagaaagagaggaacatgggagatcgggaccttagtgttgaccgtcctgatcaagaccatgatagatccctaatgaaagtagacaaagatcagcgcaggcggggggaaaaggaaaaggaaaggagagaggatagagaaagaagagagcgtgaaagggatgacagggattttgagcatgatggcaatagggacttcaatgtgcagcgttatcctcataaaaggaaatctggacgtaagatcgaagactcagctgctgaacaaattcatcaaggtggagatggtgatgaacattttggattgcgtcccatttcatctccttatgatgataaaagttctgcaaaaagtgagtatacagtgttccatacattagaacctaattaatttaagtttataggtcagttctttaatttattgcatggtgtggtgtggcaggtatatatggccaagaatttgctttctgtgagaaagtgaaggagaaattacgaaatgctgatgattaccaagagtttttgaagtgccttcatatctatagcaaggaaattataactcggtcggaattgcaatctttggtatgtcatggagtaagcgtgttttttcagaattactttttctccttggattaaaatttagttatttttggggcagtaaatattctgattttttattgtccaggtgggtgatctacttggaaaatatccagatcttatggatgggttcaatgaatttttgtcacgttgtgagaagaatggtaattgtctaatctcaaattttatgtgaactggatactgtatgtggaacttgtatctaattgagtcctgtgctgcagatgggttccttgctggtgtcatgagtaaaagtacgtaaagtgatttgttccctttccatctaatgcaagatgttttcttagtttattttaaaagttcttgtgataggagatgaagaactttctctttctgcctccaaaaatatataaatatatatatatatatatatattacaagatcctgaaatcatatttagaatatttttaagtgtgattttatgaaatttgtttatggttttatgaattttttctttactatgaattcattacagaatccttgtggaatgaaggacatttacccaaatcggtgaagttagaggaaaaggatagagatcgagagcgtgataaagatgatggcataaaagatcgagaacgtgaaagccgggaaagcagagaaagggaaaggagtgataaggcttcatcctatgcaaataaagatgttggaagccagaagatgtctttgttctccagcaaggataagtatattgggaaacctattaatgaacttgacctttctaactgcgagcgttgcacccccagctatcgtcttctgccaaaaaatgtatgctgtacatttctgatgatgtattcatttctttgtttaagcattcattacggatgttttattttttacctattttgttgtatgcagtatccgataccttctgttagccaaagatcagagctgggtgctgaagtattaaatgaccattgggtttcagtcacttcaggaagtgaggattactcttttaagcacatgcgcaaaaaccaatatgaagaaagttt

SEQ ID NO: 37127 - DNA, 6257 bp, Cannabis sativa
tttgaaacttctgtaggtacctggttaaataaattgccacgtggcaatccctgattggtccaagtcattaaatttttattattttaaaaaaatcgattcaaatataccaataagaaaatgacacatgaatataatgcttaacatttaacggttaggtacctaaagagtttcagaaatattacttaggtattattactgccaaaaattaaacttatgtatttatttgcaactgaaaattaaacttaggtatttataccgcaaattactaatattaaaaaattatgttgcttaattataattgaaatataaaatataataatttttttaatttttctataaataatatgaagaattatattgtttcaaaaaaaaaaaaaagataaagaataatacaatataaaaaaaatatttttctattctgtaattagatcaaagatacaacacttgtcaaattagacactttgtggcattttgtataatttctaatgttatgattggaattaggaaaaaaaaaaatagtgttgaaatagtagttttttagtgttgatttaacaccaaatttaagttttaccatttaaaatggcctaacaagtcactttaagaaactaataatttgatgaataagttggcggtcatattttgctcatagtaaactgcatacatttgtaagttatttatttatgcataacttcgtacgttaagataacaacaattacaagataaaaaaataagttcaacagtggaaaaggttaaggtcaagaagactaaactcttgattttgattatattagagaactagttgtattgcagtaaaagccctagtcctatcatcgtccttgttatacttgtatgctaatgtaatgtaatagcaaagctatgctatgctatgactaacatctaactgaggacataagctgcagtttagtgatcattttttaaccctttaaggaacttgagcacttgaagcatggtaggcctgttagcaggattctctgataagcaaatgaaagcaatcttaagcacttgaagcatcatctgcttagagtctgcgttgagaatggtcgggtcaagaacatcagcagcttgtcccttctccattttctgaaaaacccacccaaccaaatttccaccttcaatctctttgaagtcaggtccagttggctccttacctgtcactagttcaagcaagatcacaccgaaactataaacatcaccacttgttgtggacctcccactctgtccatactcaggtggaatgtaaccaaatgttccagcaacttcggttgtaatgtgagtctcacaagcacttatcaacctggccaacccgaaatcagcaacctttggttcaaagtcttcattgagtaagatgttgctagctttgatgtccctgtgaatgatgtgaggaatgaatccatgatgaagaaaagctagcccacgtgcagcgccaattgcaattttgaaacgtttatcccaggttaggacttctagagctccagtcctgtttctcagccagaggtctaagcttccattcaccatgtactcgtaaacaaggagcttctcctcaccaatagagcagtacccgagcaaagggaccagattatggtgctttacttttcccagagtttccatttcagcaatgaattctcgttggccttgtgttttggcttcacttagcttcttgactgcagctaatttcccatcaggcagagtagctttgtacactgttccgaaacctccatctccaattatgtttgtcttgcagaagttgttggttgcttgaagaatatctactaaggtcaatttcaagaggtgctgctcaaacacggccaggttgatgctcagaggctcctttgatctgctgctactaaggaaatacaaattttgatctagaaaactgttgagcttgctttcctcagcttcttcagcaacagtttgcctcttgtttcttgtaacatgtctagcaagagcaattgctagaaaaaggacaatgacaatacttcccactacaacagcagctagtcgtccccaggaacttaacaatgcagacttttcaaagctattacttttgcaatcaaatcccataattgttccacacaggtttttgttcccagcaactgaagaatttgacagcttaaggcaaattccacttgtgggaacaggcccttccaagctattttcagccaagctcaggaagaacagattgaccagcccacatattttctctggaatctgtccggagagcctgttccttgaaacatcaagatactggagttgcatcagatttcccaactccattggaatgcctccctgaaacatatttgaatgaaaatccaaatatgtcaaatatgacaaattgcctaaagacactggcaattccccatcaaaagcgttgttgctgaagttcatagtttcaatcctccacgccatggaatttgagaaaagttgatcaacctttccagaaagcttgttttgttgaacataaagccccacaaggtttagcaagctcgagagagatgagggtagctccccatttagctcattataactcaaatccaaatgacttagccctttcaaatttccaaaacttgttggtactgaacctgaaagcttattattggtcaaattaagctttaccaaactgctcaaatgtcccaatctttcagaggggatggtaccagatagcctattatttcccatatacaatccttgcagcctacgcaaatcaccaaattctggaggaattgagccagtgagaaaattcccagataaatccaatgttgtaagatttgtcagacgagagagtgatctaggaatttcccctgaaagcatgttattgctcaacaaaagatctactacaaccacacagttccccaactcctcaggtattgtgcctgacaacatattgtaggacagatcaaaaactccacggtgttgaacaaaactcagatcagggatatcaacctggcggaaatacaaggcctttgacggaattgagcctgagagattgttatgagaaagaaccaggcattgtaattgacccaattctgccagattctgaggtatagactcatgaagaaagttgtttccaaggtccaatgtggtaagtgctgtgcacatgcccagctcagttgggatagttccttcaagagaattagagttcaagttaagaacagaaagattggtaagatttccaacccctttaggtatggtgccaaaaaacctgttattactgagaacaagcctctccagtgcagctgcattgccaatctcctctgggagatagccccccaactgattatttgcagccgagaattccattaaattatttgaattccagatagtgatgggaatcgtacccgtgaaattgttcgaatcaaggtcaagcaccatcaatggaagttttgacaagtattcaggtatatgaccaacaatctggttatccactaagatcaactgagtaagattagcgcacttaagaaaagtgtaatcaatattaccagtgagaaaattcatggcaagatcaatctccatgagcgacagcgcattacagagctccttcggtattggaccagtcaaaaggttattgctcaaatgaaggtctctaagcagagaacaattccctatttcaggtgggatttcgccagaaaacaggttactcccaagcaaaagtgactccagttggttccatcttccgagccaagaaggcagtggcccagaaagttgattcatttcagcagaaaatgtcagcacaggaagctcagaaagttcctcaggcaacgaatcggatagtgcattgaaggaaagcatcagagtcctcaaattcttacagtttcccagctcaggaggaatagacccgcttagctcggaagaagccaaaatcagaatactcaagttctgcaacttcccgaaggattttgggatcgaacacttcaaggggttgtaggaaagatcaagtctacttagagattgcaaattagataactcctggggaagtggacctgttataaaacaagattgagcaaagaagttttggaggcgggaaaggtcaccaatttcccgaggcaactcgccagagaaatggttatagccaatgtagaggtcactgagattcttcatgtttctaatctcaggtgggattgtgccagaaaacgagttgttagatatgtccaacgaagatagagcatggagatttgtaaagagaggtaatggaagtgaacctgacagaagattactgctaaggtccaaaaacaagagtttgctcatatttccaatgtggggaggaatcttgccggtgagagcattaccagcaaggtcgagtgttatgagctgaggcaaactccccagctccggaggaattttcccactgaacgagttgtgtcccaacacgagtgtttgcaactgagtcaactcacttaactgactcggaatctccccgatgaactggttatcaccgagcaacagcttcttcaagcgtttcaaaccggatatcagcggtgggatttcgccatggaaaagattagaggtaaggtcaaggaaggtaagactgcggagagagaaaacggagggagacagtgggcctttgagggacagagctgggagagcgagtgaatcgacccggccatgttggcaagaaacaccaacccagttacagtatggggttgatgagttccatgaagaaagaagatgaaggttttcgagagaatccttgaacgaaagaagggcttctctctctgagtaagctttgtttcggtctacaataatggcattggagcaaagaaagaggaggtgagacacaatgagaacgagaaaggaaagcttaaaccccatgatcatggagttactaagaagaaacatatggaacaagtgagtaagatagaaaaagatttaaggctcaagaagagtaaaggaagaaaaaatgggtgtcgaaaagcttactgagttccataaccattacagagtagagaaggaacactaaaatgggagagaggaggacgaaggagggagataaaacgccatagctgttgagagagagagaagagcacgcagctcacgtgacttattctttctcacaacggtatttcagttttaatttgcagagaagcccctctaaatatcagaatattctcttttattagcatttaggccaaaactttcttcaaatatctgatttaaactagttcctcttcttatttgtcttttacacctaatctgctcctagaaagtaaaaagtgttgcctacttcagaaaatcgggcttttgtttcactttctttgttattatatttgtttttgttccctacatattttgagagacctaggttatctgtagtgtctctccaccaatccatgtctgtctttatttttatttttatatttttgctaatcttatgtttatatagcttatcatattttttcttcgtgtattttgcactatggatggatgttacacttgtaacatgaaaagaaagattcttcaagccaaaaaagagcaagattcgtatagctctttgtagctgcatgatgatttttcatattagcatgtatgtacgtacacttattctaagttgtttaatcaaagccaccgcattagaaatagttatatatatgtattgagtactttgaagaggtgggttttgaggcattcttttgtttcattatttataccatgtgttttatttatgctaaagctcgaggctactttaatagacttctagaaggtatactgtatacatatatagacatttatttatactagctagtatgtattattatgatcatcacctctccaaggctacaatatgatgacctacctaaacatctcaaccactatcttaccaagaaaacaaaaatcaatttaatgtagctagctagcagtgcaataataaaagtgaaaaaaaaatgaagaaatgaacacaattttattttgtttggtgaaaattaattgttttattcatattataaaatattaagtgactgcatatatattattataaatacaaacaaataactctcactcaaatcatgttttttttttttttttttttctgaaactcgtgcgcttttagttaaatttgtttttcctatgttcatttttgctattatttttttattgcaattttgtcatattattattaattaaaagtacaaatttatacattcggtgttgtttggtcttcgtaactattggatgagcattttcatccttccgcaaagtgtaataaaggaggttgagaggctttgcagaggttttctttgggg

SEQ ID NO: 37128 - DNA, 3639 bp, Cannabis sativa
aattaattagtttgtcaatattatataagggggtcaaaatgaactgaaaagaaattgcaaaattattgaaataagacatgattataaatagttattatatattgcagatgtgaatgaatcctaatactttacttgattgtacggtcaacgatcaaccttggcgaacagaccttctaattctctgcatgtgttccctcaaacggattgggtgatgggaaaaaccaaattccacgtggaaaaataccattgggctgtgagatagagatagattccggtccagtgggtcccttggccatctaaccttagttatgtgcgcttggtctgtcaaagttaaaagctccgacaactcagcgaagaaagtggggcctgtcaaggtgtaattatacggatgtgaatgacgtggccaaagggtgaccaaaatttcccggtcccggtcgttgggcaagtcctggccacttgtttgagtggttcacacacacctcgcgtcgcatcaccgcgccatcagtaacgtgaatttacaataaactagcaaagaccaaagctgtttgggaatgggaaaggagtgcaaatctaaaattgcccactcttatccattgaagccattttctggcttattatcagtgttcagctgtagccgaagcaagctaaaaggctttctgtttgagtaattttctttgtgaaataataaagctaattatgatttttgtcatctgaattttgatatgtattaaatcatgctctttgaacttttaagatcgttaaaaatgtttcctgaactattgaaattatttgatttaaagatttttgtctaatttcattcaattttactatttcttgattgtttatgtactaaaccatacttctcaaattttgatatatagtaaatcatgtcaattttaaaatgtactaaatcatacccattttatgttagacttttttactaaaatttgataaaaaaatctttaaatccaatcatctcaatagttcagtaaacattttgaacgaccttaaaagtttaaaaaatataatttagtacacgtcaaagtttaggagcaaaattcctaattagctagccaaataataaattggatagtgaacctttcttttttgagtttgtagtctccaattaaaagcttgaaacttaactcattttattacttatcatttgtattgaagatcaagtaaaattaaagcaatttgagataataagaagggtgatatagaatatattagtatagaaaaacttttaacaattgcttaaacatggttagaggctagagctaagtccaacgtcgtacaagttggaatattttcattgtttgtggataactaaagttaggagtcgataataagtgtactaataaaacatgatcagctcactcacaatatttgtcggagagctgtggactgtcgagttgggacaaaactgtccacgacaaaaaatgcatgcaaattacaaagtgtagaaaattacgatcaataaaagaaaaaaggtctattattattatgtaattaggtaataaaatctaaagaaaacaagaaggaaaggtactagtcaaatgagtggctaagattctttatatatatcacataaacagatcctattctcatcacaactccatcactttcttcctcatccaaaaaccaaacattatatggctgcatctgttaatagcatcaacaacagactcactttagccatggaaagaactggtcaatggtacggtgcactacttattactcttcaatttattttctttaataattaacataaagaattgatctgttttaatttattaaattcatgatgatgatgatgatcttgtgctcttaattaaagggttttctcccaagaaattccaactgatgttctcgtcgtggttggcgaagcaaatttctctttacacaaggtaacatattatttattacttctttctttaatatacattttcttaatttaattaattaattaattatttgtgttacagtttatgctagtagctaaaagcaatcacataagaaaactgatagtggagtcaaacgaacccgatttgaccacaatcgatctttcggacatacccggaggacccgagattttcgagaaggcagctaaattctgttacggcgtaaacttcgagatcacagtccacaacgtcgcatcactacgttgcgccgccgagtatctggaaatgaccgagaaatactgcacaaacaaccttgccagccgtactgaagatttcctttcccaagtcgccttgactagtctctccggtgccattgttgtactcaaatcttgcgaagacttactacccatggccgaaggccttaaaatcgttcaaagatgtatcgatgttgccactcttaaggtcctaataataattcattttggctctctatagctaatttgtgcttaattagtttaagcaatcctttaattttgttcttaattactattcaggcttgtaacgaagcaaactttccgagtcgatcgccgacaaattggtggacggaggagctttcgattttggagattgaattcttcggaagaataattacagccatgaggaatcgtggcgccaaagttctaactatagcgagcgctttgattacttacacggaaagagcgcttcgagatctggtccgagatcattccgggaacgggacgaaatctatagctccgaacgaacccgaagtccgagtccgacaacgggagattctagaagcggttgtggctctcttaccagcagagaaagctgcttttccgataaactttctctgttgtcttctcagatctgctatcttcctgaaagcatccaacggctgtaagagcgagttggagaagcggatctctgtgatcttggaacacgttacggtcgatgatttgctggttttgtcattcacttacgacggtgaacggctgttcgatttagacagtgtgaggaagatcatctcggggtttgtggagaaggaaaaaagcgtggcggttttcaacggtggggattatagggagacgtgttcgacggcgatgcacagggttgccaagaccgttgatgcttaccttagtgagatagccgcttatggtgagctcactatttcgaaatttaatggcattgctaatcttatccccaaaggatcgcgaaaggttgatgatgatctctatcgagccatcgacatcttcttgaaggtatattttttttttttttggtttaaggttttctcaacctaattaactctaattttcgcatgcatatataaattttgtgaattgtcttatatagttatattataaagtgatatatggttaaccatatagaaatgctagagtgcacccgtgttcgtcttaaatattttttgaggcgtgttctaatttaaataattggaccctaataaaaaaaagtgcaatggtaaataatattttcaaatattatcatgtactaatatatattttacaaaattaagcactaaaaatctcaaactaatatattaaaattgttattcacttttgacttaaatttaaactgaactccttgatatatgtatatcaaataatttttccagcaactcttaatattaatgatactttactttaatttttttttaaaaaaaaaacctagaaaataaaaatatgtataataacac

SEQ ID NO: 37129 - DNA, 5331 bp, Cannabis sativa
  modified_base (2988)..(2988): a, c, t, g, unknown or other
aacaataggtataaggcaaatgtacctcccaaccgaaattcgagtaatagatccccacaaaacaaaaaaagttaataataatttttgcttctcagattttgacatgtattaaattatatcttataagctttttaaactattaaaaaaatttcctaaactattaagattattaattttaaaattttttgtctaattttatatcgaaagccctaattagctacaaccctaattagctacaaaaaaaaaagaaaaaaaaaagaaagaaagaaaactcacaattattagattactcatttattatttttttttgaaagaaaaagtttatagataaataaaagttagacctcatggtcgttataaaaatgtgttctataggataattgacgtattaatcatgccagttacatcattgataaatgcccacttagccacattatgtgctgcaaagttacaaactctaggaatgaaagaaaaattacaactcaaaaatatactagagagcttaatacactggtgcacatagttatcaatactccaattggaacatgttccattcaacacctgataacggcctcagaatcactctcaattaacacaaaatgatatttcaaaagcacgaccttctccatggctaactgacaacccacagcttctccaataaggggatcagagaagtttaacttgttagaagccacccacaaaataaaactcgtgtgctccctagccaaagccactccgcacatagaattgcatccaactttcacaccacaattgatttttatccagtcttccgaaggaggggaccaacctaggggcttagtagcatttgacgaagaaaataaacaagattcataatctatgtaacagaacgagatagaatcaatacattgtttaatgttacatagagagttgttgtgtaccttatcgttacgggtcttccaaatcgtatttacgacaatcgaagcatacataaataacttgtctgcatccaccccctagactttagggtccatagaaatttaacctaatcccaaatacgcgcaccagaatcaacaaccggcataatcccccaaggagaggaacgccagagatggaatgcaaaattacagtagagaaaaaaggtgctccatcgtctcctcaccctccctacaaaaagggcaagaggtgtcatccataagaattcttttggcaagaagagcacagacaagaagagcatttaaaagaatgctcaaccagaggaccttgtgttgctccaacactttagagttccaaagcttattccacagcgcaggggaaaccgagcacaaaggcgcacgagctaaagcttgaatcaggtaggcagacttagttgaaaacactctattcgactctttagtccagacccacctatccctaccaagaccgttgggctttccttacgaatgggtccttggcaaaaaatggaatgaagcttaggaatgtcccactctccattgtcaatgagaaggttcacgaccttttcaagtcccccaggctggggcctaatcagtttggccaaaaaatcctcaccatgaataacccaaggatctaaccaaattttgtctctttcccatcagatatcaacttgcaagcacccttcataatgatttattttgatttcaccacgttcttccaaaacaaagagtccgagtttttaaaagagcaaatcaaaaaggaagaacctctcaggtacttagcacttaagaccttacaacacaacaactgattctcatttaagagggaccaaccccatctaaccaatgaggtctggttcatttccaaagactttctgaagcccagcccacccttggatttggacagacataggtgatcccaagccttcaaatagagccctcagttacccttttcacaacccaccaaaagtctctggccataccatcaattttaaaagcaagttttttagaaagtttcgtggtctgcatggtataaactggcaaggagagcctaactgatttgattaagttagctcggcgagccttggacagtgttttcaacttccacgcgtgtagtttcgccacaaaattgtctaaaatgaagttgaagtcagtatccttatgttgagatctaaatagagggagtcccaaataattaatgttcctagtggcacatttgattctgagttcctgtttgatgtcacttttcataccctcactagtattgttactgaagaaaatggaggtcttaagcttatttatccgctgtcccaaccatgcacaaaatttctccaaacattgccaaaggcctctaactttcactaaattagctctccccacaaggatcatgtcatcaacaaagagaaaatgagagagtcgaggccccgtcctacttaacttgatacctttaatggttttcttatcaagagtctccttcaagggaactattaaaggtatcaaattaagtaggttcccttatatttgacatactatttataattgtgctctaaatccaatgaacaagatgtaaaataagaaaaaaaaaaaaataattatcttgatggtcatttaatattttattgagcatatacaaaaactattattttttactatttaaataatagtaatatggtaaataaagaatataaaaattaataaaagtcaatgaattataataattagtgatattgttaaatttagcacaatattatattttgtgtcaaatttaatacaacttcttaacatgtaacaaatttaacatatcttttaaaacactattaaagtaatattttttcttaagtatactagcaatgagaaaattacatatatccactttattttacttgttttaatttttatctttatttttatattctttaaaatatatccacttttatagatgatgtccacatttaaccccttaagttaatataaattatatgctagacttagtagagagtaaaagtatattgagcaactcactcataaaagtgaatatattttaataaaatataanataaaaatatttttaattaatagataaaaaaaaatatacctcaacttattacatttttggcacttcattggaaatgggttaagagcattatttgacactagagtattcaacatgacatgaaatataaatttaaatatttaattacactacactgtgataagagaggtaacaaaaaattacattttaatatgacacaacactacatgtgttattattattggacacaacttaactacagtacccgacatttttacatcaagtaaaaactatatgtcaccttctctattttgtcttcattaatataattctaatttttgttaaataataaaaacaaaatacatttatttttcaatataaaaaaaaaatataaagacaaaaaataataaaaaatttcacaaaattcgagtgtgagcttttatggagggcagaaggtaatcgaccacactcttcttcctcctcctcacaaatctcaaatcctcaatcgccgattccattatcacattcttcttcgccttcgattctcattttcatcgcatctctggtactctttctctccttctctctaagtatttacttcaatttgcagtattatttatgtcagctcttgaatctttgttgattccaatggttaagaaacgatttgttgatgtgattgtgatgctgcatttcatgtttatgcattattaattacatgattcgaacgattatgaacataaatagatatgcacacatacatatgtaagagaaatcgatgctgtttttgtgatatatatatttatacatatactaacggtactttcttttaggtttttacaactttacattgaacggagaagttgttttgagtttggatatggaccaggttaggagttgatttctttcctttttcttttttctaataatttatatatatatatatatgtatgtttaattttgatctgtttttgtattctgatcagtggtgtttgtgaatatattagtatgaaaaagttgagaagattggggaaggaacttatggtgtggtgtacaaggctcgtgaccgcgtaactaataagactatagctttgaagaagatccgtttggagcaagaagatgagggagtgccaagcacagctatcagagaaatttctctcttgaaggaaatgcagcatggaaacattgtgcggtatgtagtgtagattatagtatatatattcatatataatagtattcatgagatgtcaagtgtaggtatttttaaattagatacataagtggagaccagttatgatgagtataaaaggtttaatcgcatgagcaacaacagtaacaccaatactaataacaagaagtttggacaaacaattttctgctcaatagtcattttctatgatacttcatttgtaatggggtttctgcatacctatttgtatttagttgcatatcttgacctagtaaactaggggactgactactttgcatgctgtttgcgagaaaattaatgttggagctgttggtcaaaatgtacttaattgcatgtacggaaagatctaattggattagtgtgtaaccagtgtaaattcttaaattcagtatccctaaagatatatgagtgcttgtggaaatgggatatctctctgctttttacatctttattttaagggagtctctgtaatgatgttcttttcttgaaactattttctcttagttctctttttagcttctattttaagatatttggttgacaggttacaagatgtggtgcacagtgagaagcgtttgtatttggttttcgaatacttagacctggatctgaaaaagttcatggattcatctcccaatttttcaaaggatcttcagcagataagagtgagttttgtattttgtgttcgcccccttttcatttttttaatcttaaaaaacaaggattagatttgtaggtgtaaagaagattttctatatttcatggcttggttcagtgagatttatattttcttttagttaatgtattaatttttttttctctggtagtatttattagttaatgcaattttctattttgacagttgtttctctatcaaattctccggggcattgcttattgtcattctcatagagttcttcatcgagatctaaaaccccagaacttattaatagatcgtagcaataatgcacttaagcttgcagattttggactggcgagagcatttggtattccggtcaggacttttactcacgaggtatgattatgcagtagattcttattttcttctgtgttcgtagttatttctcattagcttaatatttaattggctctctaagctctattatcaactttctttctcttccctgtatttaggccgc

SEQ ID NO: 37130 - DNA, 4378 bp, Cannabis sativa
tatatatattacttccattgttacaaaatttcaatacatgtgtttgaacaaaatgagtgttatatcattaaatatcaaaacagagtttatcagccatttgctacatacaatcaaagaacatacataataacaataaataatcaaacactcaggcttttgattctaaatctcacaggctgctacatgttttcctattgtcaatgcttcctttcccacttcccctcacgtcttccatctcgctgctccctacgttctactacctgcctagacttgctccctcgagatccatgcctctgagatccaaatccaccaacctgtccatccaagtctggatctcctacactacccgtgtcaccggagtccttgcttccatctatattctcttcataactacttccacattcatctaaacgatcacgagattgcaaaatggtaggaagctggccagtaaattgtctggacccagatagtacaactgttggcattgacaccatagaactagaatcaagctgcaaactgccacttgtacttgttcttgtgctcccttcatttcctgctcgtccattatccctttcacgatacctttccctggggcggctgcaggagaagatgaaaaaccttaaggatcgatatatgtggcaccttaacatttttatagcaaattaactttaagaaatgaattcatttatattatctataagaacaatcataaggatacactaaatgataacatgataaagttcgttccacaaattgtaaatatcccaaaaactttctacaagacaaatgcagcatcaatgttgtaggttaacatttctaaacagccttgtatgtggcatccagatagcaaacacaacacgaagtcaattacggtattacatactggaaaaaagcatggtaacaaaaaaaatttagagattgaactaattacttcaagtgtgaagaaattttaacataaaagagaatctcaaaatgatgctgctactgaaccccttagggttaggggctgttagaccaacatctatgatccccatacatttgtagaggacctattagcacagtttcccaggaatttgttgcccctgatactccaatatattaaacaagaaaacaacttcattatactatcttaaatgtttaaaatatactcctccaacaatcagttttgggtggacaaagagattgtagacatctgtattaaatttcttaacttcataggtatactgtaatatgtgtacatcatttttgcccctattgtagggttgttttctatttttgacacttatagaaattataacctaaattcttttgtgcaacttactatttgaactctatttttaataccataaacatttcacaattttctgaaaaactaatgagatgtctgttataactacaatatacaccgtcatataaaaaatctaaattataatttctccaaatgccaaaaatagaaaatgttcctacggtaaaggcaaaagtggtataagttgtaaaataaacaaaaaatgtctacagctaaaagaagttataagaataattaaccactttgtgactgactgaacttacccactctgagcataggaagaaaactcgcgcctagatgaccttactcctgattcaacctgctccaattcccgctgaagttctctctgcacagttttataaaataaaaagaaatatcaaaaaacaacttactaaaaaattatcacttccagctgagactaaacgtatatataatcctaaaagtcaatctgtttttcattaggctgatagaagggacgtatttgaaatcaagtaactgctatcctgcaagagtggtccagatcaacgatgaaaaatccacaaattaaaagcgcaacggagataagataaaacagctgaactcctaacataataaaacagacttactaccattaatctttcaaaagaagggaaaaaaggcatgtataagtatgtgtttgtgggcatgcacgagtgcgacgtatgtagagagaggactagcgcagtctaaccatagttctaaaactgcagatcataataaaatatcttccaatgctcttttaggcaactggttcgaaaaaaaaaaagacgaaaagatttgtattgtgctcatataattagaactaaaagtcatccacccgttactttgtattagattcttattaataatactagatttttgtttcttcataagaagtattattagaactgaagaagctaagccacgtgtaagtaatagtgtaactagcagtttatctcttcagcaaaaatgtgaactgaaatttagagaaccttctttcttttataaaaattgagccagtctttggtcatataagaaaaccttcataagataatgcatctcaaatcccaaaaccaaatgtgttaataaaggtttctacctgtgtttgtctctccttctccatatcaagattgtgtcgcaattccctggtttttgcacgctcgagttctagcaatcgctgtctctcaatttccttctcagcttcagctgctctctccctaaaggaatgaagctcaataatattgtaatactagagaaatttatttctcaaaatcatgaattcagttgaagaatacaatataagcatattaggatgcaacacctatcaagttcttgtaaaagctctgcttcttgtacagctgcctcttccaaatatttctggcgggtgtgtctcataagaagtttcttctgcctgcgcactgctacgtcttctcgcagtttcgacttttctctaacagaagatcataaaatatcaatatgagaaactgccaatgaaatttccaataaacattaggatagcaccaatcaatgaaacagtaacacaaataagaataatatggcagtaacctgtattatttactaaagcaccagtacaaaagcttttccaagtggttccagactacactcgtgcttatcattacaaagcataaataccactacaccttacacagctacgtaaccaaccaatatacaaaggaccgcgaccataagcaaatgacaaaaccgcaccattttttttttctttttgaaactaagatccccacctaaccctacaatatttagggaccagaaaactataacaattgctatataagtactcaggagggactcaaatctcaggccttgtgagagcaaaccacttgtctgacctacgcctttacagtaatgtacatcataactaatccttatttctcctgccaaaagtgacatgtattggtatcgaaagcctatcaatttctcaataggaaagaatttctcttatgaagatcaaatccttccaagcattggcaagagacttagacttcacctttatattcatttgtggaaacacaagactaattacagcagtaaaaggaacttttattattaaaataaaattatttactattataacaaacttatagtgtagccaaaatgagaggcaatagtaagagcagaagcggacagtctgtcctccaactccaaacaaggattaactacaaaataggaggaatcaactaaataccaagactcctattttcatacactacatattgccaaaataaaagagagtaaaattagtacatacagggagcaaatggactccttgatttgttgaaggcgtgaatcaattttcacagtagctggaaaacacagtaacaaagataagcacatgagaagcgttgaaaataaacttttaactgcaataaagtacttggatagcgctaatagacataactgacgctaaggaaaacagaatttacatgttaatgaaggaatctgacattcttcttttgaattactagatgatttttgcagagcctgttcttttttaagaaaatccaattctatttcagcctcctccatttcctgtaattttcataataaaataacaccacaaataacttgaaataaaaattgacatctgtaataacccagtttaccatctcttcttggtctactttgttggagaagaaatcaaagtacgacttcacagatgttaaattagccatgacctatcataagttataaattagtatgtgggaactcaatacaaaattacatcataaaatgagtcaacgaagttatgacaatatgggtcaaagggaagaaaagaaagaagcatccatgagtagctttggtgtagaaaagcacaagaaaatcaagccaatatatatttatatatacagtagaacctctatctaagaatactctattcaagaataacctttaatttgttataaaaaaaattaagtcctaatttgggctagttataaataagaataacctctaaattgtaattaattatacatttttaagccccgcattaagaaagtatacctctatataagaataattacatcttaataaaatata

SEQ ID NO: 37131 - DNA, 5825 bp, Cannabis sativa
  modified_base (5179)..(5181): a, c, t, g, unknown or other
gtgatccgttgtgagctaaagtgccgccggtccaaacagatacttccgctatctcccctttaacctccatttgggacctttcggccaatgtgtgctagtttccagtgttgggtctttaacttgtttcaaaaatctacaaatttcccgacgtgtacacccacaaatttcccgatatttggccttgtgggattcttttaaatgtcatgttcgaccctgtggtctcttaaaggtcgttcgttatacccacactttccaggtccaaacgtgaggagggtgtattagaattagtcccacattgctaatgtgtggagataaattgtcatatataagatgaatgggctactcctcctattttcaattgattttgagatggaaccttattcatcttatccccaaattctaacagcaatgcatgcaagtatccctcttctttgagccaaactagaaaaagtagctctaaaattattatcattgcttcaaattctttcccaaaaattattaatttggtttaccgttgttatttttcaataaagaattgaggaatcattttttctggtacaaggattgtcctggaattgtaatattctttttttttttttttacatgtgagagaagaaatattatcatcctgaaaaggaaagtaaagttttttttttcttttgaagaaaacatattaagattatttaatgaaacaaaaagtgtggtgtatatattttgcactgtctattgtacaaattaatcacagtttattatttgtcagattatttctctcctcaatgtttgcagactggatttttctttcgttttacttattttctaatttcttcaaaggtacattctaaatgataagacaccactttttgcagattgtcaataaactccactggtatgtacaagatgatgatatggtgaggttttactcattattatattggtatttattttgtatgtgatgctataaatcattgttccaatatattttgaacaaataaattcttttggagaggtacacgttaattataatttgatatgttagtaaaaattgctaggttagacatgtttgtttaaccaagtaattatattgtaataatctaattagagattattgaggagtctcatttacactatccaattccagattgacatgagaaaaggtgtaattatattgtgtaattatcttgagacttgctaaagtttattctatctaaattagagtaattattaacttattgccaaccatgacaatgagaattcaaatgtagttactactttatatccaaacacaccatatattttaaaaacaatgtaattactaacatagtaattacataataacttccaaacatgtccttaatttagttatattagatgagaattttgtaattcccctgcaataattatatttttttttcaatttattttcatgtgtatagatagaatttgttgtatagaattgctgccccgctccattagaacagactgttgtattacttgaagatgtgatttaaatggaaacacatctttttggcttatatatacattttaatgcttgtataaagttatgacgtaggctgtagcagaggtattttaaaaattcttgtattgacatttgacatctaataataattcttgataaatgttttatgatattcatgatcggatgactatcggtcatttattgtttctagtgttcttcacttttatatttgtattattaggattatcttgttgttatcttacaaccagatgacttagtctgtcatttggtttgctatttccactaatccagttttaaatttgtattatcaatggtaacaatctgattacaccatttgtttccttaaacagattgtggatttctgctgtggtgctaatgatttcagtgtcttgatgaagaaaaagcttgatgagacaggaaaaaagtgctcatacaaaaactatgatttcatagaaccaaaggtaatagtttccagatcgaacattctttcattgcctttttttctggaagcagtgtacacattaaaatacccaacatgtatagttggcttcattttaggcacgaaaaggaatcgagtgcaaactaaggttattggagcttatgtttgtttgagaatttgaatattatgggtgggtgccatttaaaatctaaaccaaactttggtatttcattttgacaatctctatgttggcttgtaatgatagttgccaatatatacctgacaaaattgtgaaataattgtattacctcgagaaactcaatctgcatgtttgctgaattagtcgtgtttaggtctagtaatttaactgtttggttaagaacgcctcttgaaggtgtttgatgtttttagtggtctgttaaagggatagacatgtttttttttaatggttttgttttgccagaatgatttttgttttgagaagagggactggatgtctgtcaagccaaaggaattgccaactggatcaaaattggtaagagtgagattttagtttcatcagatcaaagatatttgattcctgaggtcttcaggtagaattttcactttgctttctgagcagatcatgggattaaatcctccctttggagttagagcatgcctggcaaacaaatttattgataaggctcttgagtttaacccaaaacttcttatacttattgttccacaagaaactgaaaggtatttcttcttgttgctaatcaatccattttctgacttaaagcataattacatcaaccagagagaagggtattagttctgctttgtcacatttgtatcaggttggatgaaaaggctcaaccttatgatttggtttgggaggatgatcatctgctatcaggaaaggtggataatttcttccatttattattattgttcttttttccccaatcagctgtattgtaacctattttaatgtagaatttgagatacaataattaactatggtggctgttcattttccctttcagtcattttatctgcctggatcagctgacgttaaggacaaacaaatggaacaatggaatgtgaagcctcctctactttatctatggagccatcctgattggtccaacagacataggaaaataactgaaagtcatgttaatctttttaaacaagaagaggctgtggtagatgttcattcattgggtaaccatgatgattcaggtgaattccatgagcatgccatggctgactctggtgattatggtaatattcctaggcatgcactgggtgaccctggtgattttagagatatacttgatcatgaaatggatgaccatcagaatttcatgccaactgatgatcctgtggaaactgagaatctgaaagatgatgtaactggggtggttggaacaggaggacagaaggattactccccttcaatcagcagcgatagagaggatcgtgagaatcctgctgggaagaaagcacccaatgagaacacaaagaggcggttacagaccagaaaaaataagagaaaaagagcaagggcccaggctgatactaagagcagacatggtacagagatgcccagtagagtatctccttatacagccattaatcaacgttttgactccagcgttcctggcatgcactcccagtttggaatagcgcatgttgatcagttagatagacggtacggtaatgttagtgatgagcattctaattttcccacgagatcagctactgattatggggctaactctatcagtagaccattagatatggacactatgtacaggagggaacatactgttcgatcacagcttcagcattacggccagcaagatccggaggtccaaggaggttattatcctggaggtcaggattccagatatggtcagattggactgcacacaccatacccacctacttatggaaatcctggtccaatatctgatcctctttacagatcaaactcatcaggagcgcagtggtacgtaccacaatcagacccattgcttcactcaagaatgcacataatggggtctgagccaccactgaccatttttgatcctagagcagctcactcttatggactcccggatttccatttgggttctcacctaccctattcacaccgtcccccaggttggcccaatgattaactctccttgtttcaagtagattttcgttctgttgggtgtttaacattggggtatgggtaatttggggatcaatctctatttcttgattcctgttctttaatttctcccctaaggtgagattatgatcgatcaactgcttttctgtttaatatgggataagtttcttgcttaatgaatatgactgcatgaaattgagtacatttgccactgatccattatttttcaattctgatactaaatgctacacgagtaaaaatcaccgggagtgatgtgtatatattgtactatgaggaaaattaccaagtattgtgaaaatttcaagttttgaaaatttaaaacactgttctatgaaaatcagtataagcagcctactatttctgagaagttattttatttgcttttttttttttttcctgtattaaaattgtttccttgtattgctttgaagtttaaattacctcttggttattgcatttctttttctttttcaggtagatgaagagtcgaccttatgatttggttttttgttttgggggggtgatgtgtctacaagcttaattgtaattatatggatttagtgtttagatttttttttttggataacacctgttaaacttatgtgttcatcaatgtaatcattctctttattttgccccataagtaaatcgggttaactcgataattgtttagagacattcgttaatgttttacttttagaaaatactttttgagcttaaggtagtctttactcttgcatcattatccattatccatgttttgtggattattattattattattatggtcagtataaattttgtattaaatttattaaaagaaaatttgaaagtaactaatattgtatatattttttagacacaatgagttagacttaagatattatatgtgttttgtttaagacaataatacagcatataatgatgaaaatagaataaaattacaattttataaacattgggtatttatattactaattttttttttttatactgcttacaaacttaaaactttaagtatttatatctttatttattattattattattnnnattattattattattatttacaatgttaaattggtcaacctgatattagactatgtaattgagaagtttgatgacgtatgacttgtttttttacagctaaatattaacgcctagtatcatagctctttagttcttaacttgaatttagcttttttttgcaattttgaagtttaggggttattagggtttgtatgaattggaattcatttttcatgttcaatttaagttggaaataggttcttgttgctggtttagttgtatgttgtggtggatgaccaaaactcaaacttgagtcatcaatggcatgttttgattcaaggtgtttttctagtttctattgattgaaatatattgtggaaggtcattataggtgttttggagagtttagtgggattggacatgttttgagtaggtttggaattgtttggggaaacctgctgcaaaccggttaacctattttggcagattccctgaacaattcattttctcgattcgtgtccatttcggagcattagttgggtgattccttgtttcttagggtattgaagttccatttagtaataacagaaatttaagttggaggtttgggtttctcggattagggttttagcgtgttatttacctggttttattatgtgattagg

SEQ ID NO: 37132 - DNA, 5943 bp, Cannabis sativa
tgtgattataatgaactagattaaaatattatcattattataatagaattttaacaactcgcagtactttaaaatttatagtttaccaaatattcaactcgattttttttacagttttgctacagttgcttttccccacagcataactacagctgtttttttctacagcacagctgtgccaaactggcccttagagcaagttcattttcaagcacctgggaccccgagcacctgccttccaagtatcagattgacaattcgatttttgcattttctccttcatcaaacggggaaataggtactttcgaggaataaacaacacttcctacgtgtcagaggcaaggcatagtgcctaggttgacattttgtcaacttggaccaattttgatgaatttttcgagagctcttatgagcatcttctccattttcaaaaaagattaagatttaaatatttttagggaccaaatagaaccttcgacgggtcataactggggcccagcacgcaggttgacatattgttaacttgtgctatatctaatgaagttctcgaaaaaatgttctaggaattttttctatcatcaggaataatgaagattcaagaaaactcagggagaaaactagaaacccgagcccttcgaaatagggcccaacacctaggttgacttggtgctgggcctaacgcccaggttaataatcaacctactgcgctgctgtcgattgctcaaatgccaaagttgattcgaccaatgaatctagaatggaataaaaatagggtaggagatcatgccctcaagtcaagaaccttagaattatcaatacaagatctcaagagcttaggaatgagtacccagcgcctaggttgacaaatgacctgttctgattctctttcgaccctctgtctagtttttcacaataactaagatctatgaaattagagaatttaaattcacaattttatatttctcatttctaacatgggaaattcactcaaaaatgaagaatttcgagtgttttatttccgcaacactaacatctccgggaactggtgaccaacttcgctaaaacatagaaaaaaatttagtgatgtcaaaatatcacttaggcatcttaaagtacatcccttggacgttttatacttatccaacaaccaggttgacttcatatgtcaactcaggcgctggatgtcaacttgggcgctggatgttaacttgggcgttgggttatgaactgccttcactaaaacagtcataactcactcaatattgatttgattgacgcgattcaatttgcatttcgaagctatttcaattctctatcaagtcatgtctcacactttaattgcatatctgaagctatcgacctcaaatttcaccccaatggagttacaaaaaataagctatgggttacccatagcgggacatgttgggttttgaaaaatgaccatcgccactaagagctaatttttaccgttacatcatcaatggtcaaaaatatcttttttgtattttttccttatttttgtaggcctccttcacctacaaaaagaacgctcccttagctcatttttcacattcaaaaaattacccacaaggtcaaagaatctctctgtagtttctttctagaaatcagtgtttaaacatttagtttttttttttttttttgtaataccatcttgtgagaaataaaaaattgaagttgacgtaacttcattactatcacgacatgggagtgaactactataaattttgtatgtctctctaaattatatacttacatttattattcatcttgccaatctagcgagctagtgttgaccactttttagcatcaacaatttcaattaattttcaacaagaattcaactaggttttaaggggatttggaaccaagattaaggtaaagtcgctagcctttttctttccttcaaattttggatgttaagcatgatttttatgtgaaatgtaggttttagtttctgtggtttatgtttgagcttagaactatttttcttcatgcttttatggttagaaatagtttgtattgatgctagttatttagttttcgtagttattatagccaagtttgagttttcaaaactcaaagtttggtctctaatggtagattttgattcttgatgtttttgatgcttttgagttgtggattatgtttagaataccctatattgtattttttggataatttggtaggttttgtgcaagtttgggggtaggatttaagtgtgaaaatttgagttttgacactggtgcaaaacaagttcccgtttggtagaaaccgacaactgtgtattcttcgagtgcccaaaattctgagcactcgtttggtgattcagtcgcccatttagggtgattttcaggaacctcaatttttttttttttattttctcgatatttaaggtattgtcaccatatttatcgataatgaaattttaaattatgaattaagtctccaaaagtgttttaacgagacacttaccagatttacattaatgtgacttaaggcctcagatcgtcgagcaattatttcactcaggttgattaacacacctgattacggaattgaggtaagattaatgtcaagatgtacatgtttagtatgcatgtattatgttttgcaaattagataatatatcatgaaaagcggtattgtgtggtattggtgtataaagagttgcacttggatattgacaatatatatattaagaaatatagaataacatatattaacactaccaacagtagtacgaataaaatactaattgcagtttggtattatggtttattatacttatggtatggattgacgaccagagtgttgagtaaaggttggtaatatagtcaatcgtactatagttaagaacgttagagactcagttatacgcgttgaacgtgggtaatagattaatgataattaggtgtatgagcgcctaattacatgttagacatatgctgtatgttttatacttttattactgagtttattggctcacaattatatttcatgtgcaggtaaagacaaagcaaaagctgagaaacagtgaggggcaggcttaatgaattgtacatatccagacgattaaacctggagggttttgatctttgggataacacaagcttaattttgttatcgctaggtgacacttttgatactatgtattttgtaaatgtttgaaaattagatttcaggatcctatatttgtaaatattttgtaattgtgatataagttgagtaaagttttaataattgtgaaatttttattaaatacattttttattttaaaaattctttcattagcaaaggttagcagagtaattaagaaaacactgcagtgtgcccaagttagcagggcgttacaatttggtatcagagttgtcaggttgttatttgaagacttgctagtaatgtataatcatcaccagagacaagcttgactcgctgttcagtaagtttttatgtgctttagtagttcaaatcaaataaacatgattaaaaaaaaatatgataggaagcatattagtagtacaatagatgcataagtgttatgtttgagtttacatgcggtaattagtacacaattatgatcattgcttgaccaatctaacttatgaattcgcatgctcgtcttataggatggacactcaacaaaataatagaagttaggctgatatggtagaggttagaggtggtcatgctcgtggttgaggtaaaagttgttggcaaggtcgtggcgacagtaatgcaaatttgccataggcttgccagattgggagcatgggtttggaaatgcaagccagtctatagagacaaggtgagaagatacaaagacttagtcaacaaggtcctcctcttgcacttcctcctcatgcaccattagctcttgttccactgttgccagttgagcaacctgcagctggtaactgaatgaaatcgttgtatgaaaggtttcggaggcagggacctccaatttttctgggagacccaaatgtgatgaaggctatgtagtggctgactaccatgaatagaatcctaaattttatcggagtcaccagtaatgagtgggtgacttgtgcgacattccagttccaggaagatgtcctagtatgatgggagatggtatttctcactcgtgacatagcgacaatatcttaggatgagttccaagactaattaacaccaattattataatgaggtggtacgtagtaccaactaccaagagattagagtttactcagtttgttcaagaattatccatgtcagtaactgagtacaccactaagtttgataggcttgccatgttggcctctaggatcatatcaaatgattttaataagaaagagaagtacttggcatgactatttgccaatatcagacatgacctactgattacaactgatgacaccaccatatgttggaaaaggctctctgagctaagggtgcaatggaattcctacatgagctgagagtgactcaaggtgttagtggagttactaatcccctacttccaattttggtaggggcagtggtgattccttttttgaacataaaataaaggctccagtggaatctagtagtggcttgagccaaaataagaggttttgagggaaccagtatcggggtggtcgtcaaggtggccctaaagacagttacactaatccagaatgttcagtttgtaagaaacatcctctgggggaattgaaaggcaagacatgttttcagtgtggtttgatgggatataagagggtctgtccccaattaaagaaagaagagcctaagaaggaagcaaaacccactccaactcgggtattttccattgcaaatgccgatgctaaggctagcccgtctgtggtgacatgtcgactccttgttaacatctcttattattttgtatcattttcttttggagctacttattcttatgttgctgcaagagtaatcgataaattggataaaccttgtgacagttatgaattagggtttggaaccttactgcctaatggataattagttatctccaaaaggtagatcaggtgtatgctcgttagagtggatggtcaagagtttagtgctgacctagttgagctagtcatagtggatttcgacattattctcgagatggatttcctgtctaagtatgcggctagtattaattgtaaaaggaaaatggtaacctttcagcccaaatcccaattatttcattattgaaagctagaggcctattacaagatatatgcataagatttgtagcagttatgatatacattagcagacttggatagttgggccaccacaatgcaaaatagactttgttattgatttagcactagaagcggtttctaaggcactctatagaatggatccagttgaacttaagaaactgaagctacaacttcatgggatgtcttatcttgggtttaccccacccagtgtgtctccatggggaactccagggctgtttgtgtaaaagattgatggatcgcttcgtttgtgtactgattatcaagaactgaataagttgacgatcaagaataagtatcctctgcctagaatcaacgatctttttgacaagcttttggggaaggcagttttctccaagattgaccttcgctcgggttatcatcgattgaggatcagggaggaagacattccgaagactgcttttcaaccattgtgaattcttggttttgtttttcaggctagccaatgatcttgcaactttcatggatctcatgaataaggtgtttaaggaattccttgataaatgtgttatagtgcttatcgatgatattcttgtatactctctgttaagcgaaaatttcacatttagaacattaaaaataaatataaaatacaattttacatatgccaaatttatagcataagagtttattaatttaagttcgatccatccaagattataagaataa

SEQ ID NO: 37133 - DNA, 4886 bp, Cannabis sativa
  modified_base (4827)..(4831): a, c, t, g, unknown or other
atgagacctttagtggttatataataaaataaaaacatatcctacaaaatgaaatcacttgaaaataaaaatgtaaagttgtcccgttaaaacgatactctaatttaacttgtgaaagtggccaaaattttcatttttaataatattattgatctattaaatttaagacattttatgaattttaaaatcacaatttatcaaatgtttaacactacttgggcatcaaaaactttcctccaacctacaatccatagtaacataaaattaggggttgtattgacttagtatttgagctaaataaatcacatctaaaaatttatcacaccaatttaaatttaggattagtagagaattcaaaaaaattaattaataaatagataaataagcttatattctggaggaacaaagtgtagtcatcttaattattttaactaaaaatatttagaaaaagaaatccctataaaaaggcaaaaaagaaagaaataaagatttgaattaagacacaaaagtccaaacatagtttagtttttatttttgaaacaccaaacatagtttagttgaataagaaagtcagacaaaaatagagagagaaagagagcaatgataggggttgatccacgtggcaaaatatcttttattaaattttccgaaaaatccgaggtttataaaaaggaaattaaaaaaaaaaaaaaaaagaaagctggtatttatgcatttataatttttggggggtttgataaaaaaataaaaataaaactcatccgcttcgctccggaagggagttggaatttatggctccgaagcgggagagatcataagaataacatcctttcattctcaattcttcattctcattcctcaccaccattcattgatctctctctctcttcccctttcgccatcctctttatccgattccctttcatctaacggcggtgcccgctctccggcaaggctccgccgtctgatttcacccatctcatcattcatctctggtaagtctttatttatttatttaattaattattattattattattattattattgttgttcctgtattgattcatcttattgaaatttttggatatgtttcttaatgttttcttgaaattttgattgattatgtttgtatctgtggcctttgtccgctacctttttaattgcatttaattttttttttttggtgatctgaaaagggtattgtaaaagaattgacttttttttttgggtgaaaataaagaagtatatatttttttatatatgtatatggaggaataaattatttattcatatattgaaaattttcactttttcgaatgtttttgcctttaaattcttccaatttttattttgaagagaagccattatacagatgtaggttatatggatgcattttcatgaagctttatttcatataaaatatttgataatttggttactactttgaccataacagttagattcgttttgaatgatttctcaggtgatatctccaactggagagtaacaatgcaatcatcagaggccttctcaaacatggcaatcttagccactagccaaagcagagtaaataagagaattaaagcatctcgggttctgcctgtttgattatgatttgttaccacacaagcatttatgtccttgtaattttgccaaactttgagttaggcttccttttaggagtgaagctctctgctgctgctgccaccgccacttctggtgttggaattcgccaattctcctccttgttttatgcatcctgatgtggacaagcttgtacataaccaacaccagatggcgcttgcaactttcaaagttcctcctagaagtgagtactgttggaataagcatttggaaagaaaaccttccataaggagacgtgtatttgtgcaaactgaaagtggatctgtattgggtatagagctagatagcagcgacaatgcccatacggtgaagaggaaactacaagttgcccttaatgttccaactgatgaaagctcattggtatatggtgatatggtgctgaaggatgatctaagcgcggtgagaaatgattctccgcttcttcttactaggaacttgttgcacagaagctcgtctactccatgtatgtcgccaaatgcaagggatctccaacagagggatcaaagtggtcctattgagatattaggttgctcatttcaaaatgctaaaactgaagaactagtgatggatattgtgaaggcaataaataatggcattgatccagtccctgtccgtggtggtcttggtggtgcatattactttaaaaacatctatggtgaaaatattgctatcctaaaacctactgatgaggagccctatgcccctaataatccaaaaggttttgtgggaaaagtacttgggcaaccaggcctcaaacgttcagtgcgagttggagaaacaggttttcgagaagttgcagcataccttctggactatgataattttgctaatgtgccctctactgctcttgttaaggtcacacattcaatatttaatgtcaatgatgaggtcaagggtaatgtgcatcgaaatggtaggcaggttagcaagattgcatctctgcagcagttcatttctcatgattatgatgctagtgatcatgggacatctagcttccctgttgctgctgtgcatagaataggaattctagatattcggattctaaacacagacaggcatgctggtaatcttctggtcaggaagcttgatggggtcggaagttttggacaggtggatcttgttcccattgatcatggtttttctctacctgaatgcttggaggacccgtactttgagtggattcattggccacaagcatcaatcccattctcagaagatgagcttgagtatattgataaacttgaccctttttatgactctgaaatgcttagaatggagctgcccatgattcgagaggcatgtgttcgagtattggttctctgcacaattttcctcaaggaagctgctgttttcggtctttgtcttgctgagattggtgcaatgatgagtagggagtttcggggtctcgaagaggaaccaagtgagctcgagctaatctgtatggaagccaggaaactcgtagaggagaagaaaatgcacaaatttgaaacaaagataagagatgaagaagactttcaattcctcgtagacagcaaggaacatgatttggatttgatgtcaaatatgaaagagttatcggtaattagaacatgtcattccacagcaaaaggacaaaatgacagaacattactttgtaaactagaggatagtgtggaggagaaagatgaagggtgcgaagaggataaggtgtctccaaggtcagatgaatatactgacattgtgaaggatcatgtgtcaagtgcttcaaaactatcaaagttttcaaaaagcatgaacattgatgggaaaatcaggcgacgcgagggtgcaaatgcaatgcaaaaggccagctatttagctggtccatcgttgcggaacaagagtgtgaatgaacagcttcctgtgagtagtagttttgtgaagctagcagatttgaatgaagaagattggatgcagtttcttgatgactttcggggactgctttgcccggcctttgctaatagaaaaactgggagctttggtcagaggcagagacagagacttggaacctcattctagatttgagagttgatgtagtatcggataaagtaagtacagacttataaagacttgtaaattgtggtagccagagtctagtttgtaccctttaggcgtgtatagggttttcctgcaagagatatggatgacaacattaggagttggatactattgggaattatactaagccacatgacaatagtttgtgtctgttggctagtggagatgaaaactttgttttcttttttacccttttttcgttcaaccagtgctgtcatcagcagttagattacgttggaataaggctgaaaagagggaatgccaccccccccaaaaaaagaagtatatatatgtatatattgtaatgttgttggagatgctatgtatgtatgtatatgagagcctctatggtttttttatgtctcttttgcaatctgtttgtgtcttgtgccatgttcctaccctatgcttgcatgtcataaaactttaatatggataaattttaatatccaattggctatcaatctagttttctttgtttatgttcttgggattgataatgtcttatgggttgtattgtatggtagcagattcaggctaattaatttactgtcactgatcttttgtgctcattcattcatccatttcaagcttacataaaataaataatgcttacagatttattatatttggattttttttattatccaaaaggttgtcaaactaatggttttgcaggtccaactgtcatctgtctatatttagtgttttatttttgggtaagaaagttattaccgttgggattggttttggttgagaaatgatgtaactgccaatatctcagagtccttgaaaatgggggggccactccaacagtcatatattttggcaaatatttatatatttagtagaatagagacatatgggaacctcgaatcacgtgctcacattttaaaagtatgaacaaaatgacaaagacaaggaggctgctctgctgctaatagatggtgacttgagaaactttattacaagtgtcagtgagctttgatcgagatctaacaataggagggagttgaatgtgcttttattatgaacattgctattagacgtgcctagcacctttaaaacgtctcgccttacaattagctagcgatactccctaannnnnattatattaaattatatgggtctcgatactaaattacaccaatagcaatattgac

SEQ ID NO: 37134 - DNA, 2674 bp, Cannabis sativa
  modified_base (27)..(40): a, c, t, g, unknown or other
  modified_base (67)..(80): a, c, t, g, unknown or other
ccagcgcagtttgcgaaatgtgctggnnnnnnnnnnnnnngaaatgtgctggtaaaagtaacttttnnnnnnnnnnnnnngaactgtgctggtaaaagtgatatttctaatttttcagaaaagacctctatggatataggtcctagcatgtagaatagccttccacaacagtaagtctgaggctttgacttccatatcgagtaaacaatggttcttaccatattttgcattcataacttgtctccaaaggagtatcatccatcaacaatttccaagcccatttcaataggaaggctttgtttgtagcttctattgttctgaaccccaaacctccgtgtgtttcaggttcgcacagggtctcccaggcgattgggtgtaggactctcttgtcatccgtgtctccctaccaaaagtctctaagagtcttatcaatcttgttagtcgtggcgatgggtatgaagtcggaggatgcgatatagtttgataaagtggatcccacaaacttgatgagacaagctcttcccgtgctagataggagtttagcattccagccttggacacgctttaacactttatccacaaggggtttgaagtccttcgttctcttaggtgacctgaatagaggtaaacccaagtaagtggcattgaggggcatcttgctcatccccaagaagttgcaaatagattggattttcccacgggcactcctctggagaagaaaatggaagatttttgtcaattgatagattgtcctgaccactggcagtaagaagataaacaatcctgaaacgctttggcttctttcatagtagcatggctgagtaggatgatgtcgtcaacgaatataaggtggttcaccgatgttccatgccttcccatcttgaatcctttaattagcccttcgttttccttttcgaggaggaggcgggatagtgtctccgctgcaagtatgaaaagagtcggggataatgggtccccttttcttaacccttgaccaggcttgaatttcccaacaatggcagcattgagtaaaagtttgatttatttcaccgatatgcatggccgaacccagtcagtgtagggatgcgagaatccaagttgggcaaggacaaccataataaaatcccaatccattttgttgtaagtcttctcaagatcaagcttgatcatcatgaatcctctctttcctctcttattattgaaagagtggaaaatttcccgtgcaatcatggtgttttccgctatgcatcttcctttgacaaaagcagcttgattgggagagatgattttttgaataactccccgaagtcttgaagcaattatcttagaaatcaccttataagcgacattgcaaagcgtaatggggcgatagtccttggtgtaggctgggttgtcttccttgggattagaacaattgaagtgtcattaataaattgaggcaagtcggtgtggttgaaaaaatgagttaccatatcaataaaatctgaattgatggtatcctaatgatgattgtagaaacttggtggtagcccctctggaccgggggccttgtcttttcccatttcgttgattgtcaactttacttcctctataccaggtatggcattaagtagtgcattatcgtgaccatcaatctgtttgtggaatacaccgttcatgagaggtgataagtagatgggatgtttcttgaacagctccctgaagctatccaaaaataatcagcaatatcttgttggtcccggatccaactgtcatcctccgagctcttgatacattgaatatagttcttccgtcttctaatgataatggaggccatgaaaatttttgagcacttgtcgccttcctgcaaccattgtacacgtgatttttgtttcaagtgtatttcttccctaagtagggcctcggagagtttcttttttgtcgattcaatgacgatgtggtctttaggagagttcctttttgtttcttcaagagtggcagtagcttcttgcacttgttaattagcttttgaaagagagttttacccaagtagttgtaacaaaatagggatgaagatgaagacgggacagattcaaggaaggcattattccttggccaccatgtttatccctatccaatatgaaatgcgagtatgccatgccttgcttttattttaaagatagacccattaaataaatttgcttattttttgttaaaaaaaaaattatgtttttttcttctcaaattaacaatattttaatttattattgcttcaatctacatgctataataaattaattataattcagaataatatgtaaatgtggttaattaataaatattttaccgtgtgtggcttggcttttgtctgaggataattcgtgtgtggtctctaatcatccggcactgaccaattgtaaagtgtctcaactcatgaagccaggtagtagacagtgggacttggagcttattgaggacttgtttgattcccgtgatgttgagctcatcaaacaggtgcctttgagtgttaatcttgcgagtgatagttggttttggaataaggatccaactggctttttcactgtcaaaagctcctacaatcatctacagtcggtcaatagtagttggaactcctctatggaggatgatgtttggaagatgttgtggaagcttaaagcccctcctaaggttttac

SEQ ID NO: 37135 - DNA, 5250 bp, Cannabis sativa
ttttatttttttgattaaaaaattaaaaaaaaaaataaaataaaagtgttatcaaacgcgcatttgaaagtgattctttttttttaaaatttttaaaattttaattctcaattaaaaaataaaaataattttattgaatatatttttaaaaatattttcattttcataattaaaaatataaaaaattaattaaaaattattaccaaactcaaagtgatgggagtcttagaaagttatgaaagtcctttggtaacatagcccattagcatgtcaaactcataaaattgggcctactcaatggactcaatcacttccaacttccccaaaacctcgtaaaaacctctgaaacgaaacacagagaaagagagtgtgagagagagaacaatgttgaggtccattctgagacgagcagcggcgaccgccccaatagctcagccctggtacctctcgtcgacggccaatttctcatcctccaagaccacgaagaccaatgtcaagaacgagaagaacaggaagaagtccaaatccaaaggcggagatgccgcagcagccgacgaatcagccgccaccgatgtcgaagccgcactctttgaagatggctctcgagctcgaaggctcgctgctgaggagaacgacccttccctcaatataggccccaatggacaacctttgttcacttccacgccttcgttgtctgagctcactcgcaaggattcctgcacttacttcaagttcaagtatgataaccctaaccgtatctgtctttgtatctatgtatggatgtgcaaatatgggtatggggttttgatttgatcgagttcgcatgaaattgcttttttttttttttaattattatttttagaatggaggaattgaatgaggcattgccggaggggttgccgcttggaatggtgaaagaattcgaagattcgatgcgaaccgccgtgcttgttcgccagagttttctcgatctccgtgacaatttccgtcgagtcgtggatccaccaatgttggtgtcgagcactaaaggttcgtgcttatgactattggaaacacaacatatagattgttggaatgggtatatttggaaaataaataaccttagttttagaaatggttcgtttgtggtttctaatattgttattggcataaattgcaatatgaaaaaaatacatggtggttctctttccctattcatacgagcatttcttttagtttcattccttttatgtagtcaatacattaggtgttgagatcataatgcatgattatgcactaaattatctgtggatttggtattttcagatacaaaagttagaaagcagatagtattggatggtcctgttagctgtgggaagagtattgctcttgcaatgcttgttcattgggcccgtgatgaaggttggttggttttttatgttcccagaggatgggagtggacgcatggagggttcttctataaaaatccacaaacgggtctttgggacacacccgttcaagctgaaaaaattctcaaggcaagaatttttaatcttttatcatttttttgtataattcagtattgaagttcttatatggtccgccaaagtatgctgaacataattttgaatcaatagttcagataaattaataattattcagtagactcaaaaccaaaacaaaacaaaaaaagagaagcaagtccatgtcattaaatcattagttgattatatgtactcagtcttgattgttatgctcctcatgcatgtaaattttaagattaccatactattcatattcttaatttgcagttctttctaatttctctttgattgtaatattcacatgcgttattcccgtccaggactttctgaaatttaacgaaacccgtttaaaacaattgccatgccaaatatttgatctcattcccttgggagagggtgctggtgttggatggatgaaagacggcactgatacaatggctatgcctgagggttcaagtctgtttgaccttgttgatacaggaatcaagcacacccatgcagccgttggagtgttagttcatttaaggagggagctatcagttgtgaaagatatacctgttctcattgcaattgatcaagtacgatagtcttctgatcatatcctattgttgtcaacacttgatgacatttattggaaaattcccaacaactttctgaattcattgttattgctttttctccagtacaatagctggtttacattcagcgagtatgaggaggcagtaactgttcgttctactcgaccaatacatgctagagaacttgctacagtaagtatccattgtttagttagagttatttaactgttaatggtaattatgtattttttgtggcatgtaatctatattaatatttaattactggaaacgaataactttgccattaatattcttctaatcactttggtgcattctgtgcattgtataagaaacttatatgccttttatgaggaatccttgcaggttaatgctttcagatctatgatgcacgatgacatgatggtgggtgctttctctcattcaacagcagtaggaaagctacgacaacagttgcctaatgttcctgctgaggcccgtgttagtcttccacgctacactttagacgaagcagcaagtgtgagccattactacatgaggtaatttgacagatagccaagttcattatattgctgctttagaaaatagtgttgcctgatttgttaccaactgttataaagttttgtttacaattcaccaaaatcatctttcatgccatccatatattttattgtctctggagagtatgatagcaagtttataacttaaaaactttctaaacaacatgataaactctactatcataaatgattatgaccatagacaaacaacattgataaaaactgtgcttaatcgtcatggagctcttttcttatctattggccatgtaaacaacataccatgatttgattaatgggggcaggtcgtattcattgcaagagtattgcggtattaataacttgttgaatgcaaaaatatgtgttctcatactgagaaaggcatgtatactactatttttcttctagtgaaatgctcgctctctaatatgccctgctcgttgttttatgacagacaaagactagcgcggcgtgaatcattctctgaagaaagctggaaaaagatatattacttggcaaatggaaatggatctgagatgagatggttaatgcctttcatgcggtgacatttcaagcatacccttttttagtgacaatactttaggaaaaactcaagtgaaagggctgcgtctagattcaacccctcgctcaaattcacattcatatgcttaagctctcaattatatttgcccgaggacgttcaagttttggtcccaataaatttcttcgggccattgagagattatttttgtcaaaggactagtggactaccatctgaagcattttgttccttctgtaaaatttctcttgtgccaagcttactatacatgtacttttgctctatttgatctcgtgtttcaagtttcaaccgttattgtaacattaagagcggtcagtttgaccccaaaggcaccgaagtagtgtgtaagtttcgtttgatcctctaattttgtaattatatatactaccgtgactattatatcatcagataaactagtaaagcataatgaatattattacttaatttgcaaaacttgagtagagaactcgtgagaaaggactagttctgtatctgtacattctactgtattcacgtctcacctctgactagaattaatattacaaagagaacccaaaaaaaaaatggcactaaagatcactatggcttggaatcgatctaccacgtgtccgcagaacctgtttgtccaatacattaaatccaagtcaagtttcgatggtagacattaatgagaacgaaaaacagatattaatattcaattcgacagaaaagaaaaaaaaatgtttatattctaaattgctgagattcattatgtagaaaataacactgaactgaatatatctgttatctaccactacttaccaaccttgtcaaaactaagcatttacaaagagagaataatatataatttcagcataacaaaatattgccaaacttacaagtacattgtagcaagggctcggcatatatttcctctccaaccagaatggaccataaatgagatctcaaaacctggatatatggaccaaatatgtatacactcaggagacaatcatattctggttcacaccgctcgttagcagtcttgcacaataattcaaactatatgtttatgcatgtttatactttcttctttaacttcatcaagatcaacttctttggcagaagggttcaatgggaattgcaatgtccatgaaacccacaactaaaaattcaattttcattttaaaagggagactggcacaatgggcaggttgatttatgagaggttgagaaccacttgtaaagacaagctgaatggaatttatgcttgcaagttttgcaagcaagacgaggaaggctgttgtttgcagtatgaatgacactgtaacatatagggcactcttcaacaccttcaaactccttgtcaaaatttcgcttccatatcccaatagcttctgctaaagctccattctgcattacaaaggtaagaaaatgatccataatgctaaatgagtcaacctactaacgcaaaaatatcatgtttgtacattgttcctaccccaccagccactaaatattattcttattatactaatctgaaagaaaaggtggctcttaaactggctgatctacaaccactcccatttgaagagcctagaaagttttacccaaattcaatctcagtttctgtttccacatcaatttatgtctcactcagtattatcctaaatacttcagatactgaatcgtctaccattgaagaaggcaataaacataaagagatttaagaggataataagtacctgattgcgaacaaaagacatcatagacattaaccactttctctgctttacatcactaattcctaggctccttgtacaatcaacatctacaggtcgtaatgggtaagaaacaggaagccggataactaggtccattcctgtctcctcctttgtataggtagcgacagcctcatttgctgatttgcttacactaactgaaaaattctcatctgaaaatttatttttctttatctgcattaaaaatacaaatcagtataaatttcataatct

SEQ ID NO: 37136 - DNA, 4608 bp, Cannabis sativa
gcagatatttgaagttatttttatttctatttgtttttttaggcaattgaatatggttggttgcctggagatatatttgatgacttgccgatcaagtatgtcaatggacatgttctatgtgaggtgaggcttattaccattcagtttgttagtttcttgccgatcaagaaagcaaattacaaagtttgcttccttttgtgaggtttgaattactgtgacatttaatttattttttataagaaacaatgtttttagtaagatgttagatgagggataaggatcggtatcctcaacctcagaaaagcgtaaaaacagagaacaaaaaccaagcataaaacatttaagttagtgaaatatttgcattggttcataatttgcagattcatgattatcgcaattgtttgttgcaaaaagaaggtatctgttctattcagaagtcccctattgttcacagagtgatattacaaatgtccatggagaatgttgtcaaggatatcatgttaatatcagatgattcctggacctacaacgatctcttggtaagtaagcattaaatattagcaatctattggagccaaaaataaattaatattatgagtaaaattgaaatagtgtgcaatctctttagtgttcgcaactacaataatcctaatttacattattatgtattcccttgttgttcaggaagttgaatcccgcattgtcaaagccttgcaacctaatctttgtctgaatccacaaccatcgatgggaatacattatggagaaaccctgacaaagaaggtatgtcccatttacctttatctggttcattttacaattgttggctatgagaggaaattacagaaattaattttgtcaacatcacagcaagcacttataaatgtattgaaatttccaaattttgctttgtcgtttggcaggtcaacttggagatatcatggagctggaaaaagaggaaacagtgtaatgcaccaactactaccaaccagattttcaccgaagacttaagtcatgctactcttacaccaagcgattctgcctgccagaatgtgcatcaagatgaaggagtaatgctggcaaagaaagatattccaactccggttctagaaaaaacgaacacacaagtctatcctttgacatcacatcaaaactttcaattggagaagacaagagttccattgactttggttgggcttggtgcatccaattcttctgtgcctataggagctacaaagaagcgaactattgataaaacaaaaccgacctcatcgaatctcattgttacagaagtatatcatgatcaagcaattcaacaacctgctatcaagaaaccgaaggaagagcctgtggacttctcttacccgcaatttctgggtgaatccattacagccagtgttacacctcagctacagcggcagaatgctctagtgcatcagaagattgaagctggaaaagttcttcctgagagatttcaagataaagggcacctatcacagttattgacaagtcgtctggctttaactaggagagacatcccatattctgcatttggatcagctacttctaatctgaagcaagaatctttgaactttcccggaatagttcttgggaatatggaggatatgagagtgaactttactgatggggtaccgattcaaggtcagcaagcgctgcatttattaaagacagataaccggattgagaatacattgaagaatcccattgctcatgcaattgaaaagcatggtgcaaaaggaaaactttccagtagaaggaatgtattggaaaaacctcggttgatatgtgatggaagcaccgcaccaagctctcaaaatgtggagtcaacaaaggccattactattttaaaaaggaaagcaacacctgatgttaagagctggagtataagcttgtttgactcaaatacttacagaaaacatgttcaaatagccaatgcaaatcgtatctcagagggtattaatcccttatctcatacttcagaaatcgagggaggtcgtatcttagagagattctcaaagattaaagaattgactcaaaggtactatcacaattcaagtctttgatatcattttgttacctttccagttgtgatatacgacttgactttccaatgtatgcaggtgcaaattaattaagaagcccaagctggatgagatgctagtaactaaaggagaaaatttccataaaactgaaaatgttgctttccacctctcacattgtgaggagagtaacatttcagtagctacgatatgggatcaagtttattcgtctcaactctccatgggtgctaataatgtgtgtaaagctagaatattgatgtttgtacgtcaagaatctcccgtcattgaaggtgctgtttcgattactttttcgttcttttaatatgcctccttggttgctactatctttacctaacagtagctttgtgccattagcagatgggatccattttcatggtggagagactcatatcagattagaacttgctcaggagtttaacaaaattcaagtggaagcaaatgtactatatggaagtaaatacgaggatgctcccactgttctgtctcccataccaacttttccttgtgctgtaagttgttgttagtggatgacaagctatttcttcctttctgttcaatcgataatgtttcttttgctcattatttgtagttttgctttactagcatgtattgactcttcttttgtttttggtatatggggaatagcgtctccttagttcttattcttacttactgattttagacgtgaattcttacctatcttcttccgattagttgcttgaatctgaaaatgtttcagtacatttgatgttacggttctttatatttatactttgcaatgattttccaaattctacatattgattttccaaatactacatattattttcgttgctgtttgcaaagcgtgtgttgaaattaagaaggaaaaatgaatcatccgttttgtttcttacctcttcttgttttatgtttgccacttttgtaatcaaattctactggtttataataaatgtattctatttgccatgttacagctattgtataattacttaatttgttcttttttatttttctttttgcagcgttacgcagaacgatttattactcagttttgttctctggtaagtccactgcactagggcatatcttgttaaatagatttcggttctggaccattttctaatttttatctttctatagatgacccgtgaaggttacctccttgcttacgaccatgtactacccaagtatcctgagatcgaaggtagacaggaaccgagtagtactgtcaaccaaccatccgaaacatctgagccaccttgcaagcccaatttcaatcccatgactgcaaacatgtcggtgcataattccagccatttacagtttaagcaaaattatcctgaggagggtggtcagttacctcttaccgaaaatgtacagtcatctccacagttcacaagtaatcatttaccgaatctggacctcgacctcgacttcactgcacaactcagttccattacttcacagatacaagctgttatcgaacgtggccagctaagacatcagatacaagaaagacagagaattcaagagctacttatgcagaggaaggcaatgttgggaggagtggctgctatgaatgcagagggttgcttaggccctagaaatttcagctttggctcagtcggtaataatgttacaaatcccatggcttccagtaatagtaagatatacgaaggagctcgtatgctttcggttgggaatataggtcagaaaaacaatccttgcagcagcaactcgttcggtttaaatgacaacaaacgtgttcttgcttcaactcccagcacaggaaatggtcaatggggtggtttggaagatgtagttcaaggctatagaaatccgaaacctaatgcaaagcagtgtcagcaagtgggttcatctccgagtcaacataatctcgaatctgtcaactttggtcagcaagtgggttcttcatcttcaaccggacttaactcgccacaaaccgaacaatgcagtctagaatctgtcaacttcggtctgcaagtacaacactatgctcaactcttacaaaccaaccaaggtagttcagaatccgtcaacttcggtcagcaagcaagttcttctttcgctggactcaactcgcaacagtttcctcaaccgccaccacaaaccaaccaccaacacagtgtggaatctgtcaacttcagtcagcatgtacaacagtacgccttactgctacaagccaaccatggtagtctagagtccgtcaactttggttcatcttcaagtgaagttaactcacaacagtttgctcaaccaccacagaccatccaacaacgacaacagaaacccaaaccagtttcggttgggacgagaaagaagagtactaaagggtctcagggaaccgtgcagacgggtcggaagaagtgacatgtaaagactaaagtgaaacctttttttttttggtgggatgatgatagtgatataccaataataggaaaaaggcagtagtagaaatacacactttttgttagcaatagaa

SEQ ID NO: 37137 - DNA, 3984 bp, Cannabis sativa
ttacttgtaacctaaatatttattattttattcacaagtaactttttgttctgactaaaagtcacatacatctagtcacataaaattatgttgggactaaaaaattgtcactaaaagtagcagttttttgtagtgtgatatcaataattgtccttttgtgattcagagcactctatcaaacaaaaatatatatataattctattattattttctttttaaacaataaaatagaaaaattggttatgtttcttgaagaattaccattgtgatatcattgcagttacacaaagaaatctttctattattattttttaaaaataaaataaaataaaataaattctattattatcttctgctattttcatgacttattcacttcttctagtgtgaattctcaagcacttgaacatacactctctgcaataccaaccaccaacactgatgatatgaatgcctctctcacacaaccttacacaagcaatgagatttttgaagcacttcaaactatgagtccagacaaaagtccaagaagtgttggcatgtctgccatgttttatcaaacttattggcacattgttggtccaacagtgacaaatgtggttcttagaattcttaatgatggtcatgatatgacattgctcaataagtcaattataatgctcatccctaaggtcaaaacaccaactggtatgggtgactatcgtccaatgtgtgcaacgtcatttacaaactcatattaaaagtggttgttctcaaattcaaagaagttctaacagtttaatttctctcaaatcatctcatcacagataacattctggtagcatttgagcttgtccaccatttaaggcacaaaacacagggtaagaatggttactcagatctgaaattagacatgagcaaggcttttgataaagttgaatggacatatcttgaagttgtgatgctaaagatggagtttgacagttgttgggtctctttgatcatgaaatgcttatcctctactagtttctcattctctctcaatgggaaagtagtaggtactgtacaacctcatagaggcttgcgccaaggtgaccgttatctccattttttttttttttttgtgatttgctttgaaggcctttcaagattgttacaatatgaagaagcggctggtaaacttgaggtgctccgtctaacatgccactcttcttcagtctcacaccttctttttgccaatgacaaccttttattttgtcgagctacgaatagttctgctttggccattaaaagaacaattgacatttaccataaatcattgggccaattcctcaataataataaatcgatgatgtcttttccctcaacgcagatgcgagatttaacaatatatacaccagctaaagtgtaatgccatatgagtcagtccttgtttgcaaagaaagccagaggaatcaccatgattcgatcaatatcaatagacttgaaataggtattcaacagagaaaaatcccattccctattgttagtgatgaaattagagacagacatagatagaggtcctatataagtcagtggtgtaaactcattatgacatggaatccatggatctcatctgctatctatgtgaagaccattgccaacttcaaatttgagtcctttaatcaataattctttacccagtagatactttgccatgttgaagatggggagtgttcaagattgacatccaaaaaagatgagtttgagaaatacttatatttcagcaattgccttaatgaagaatctggcatttcaaaaatccgccaagcttgtttagtcaaaagagtgaaaatccataccacgttcaaatttaaatttgcacaaagatttttatcttttccaatgaattttagatctattttgattagcgccccaccaaaagtttgccatcatgctttcaagttgattacaaaaattcttggttagcttgaagcaactcagagcttaagttataattgattgaaccaccgccttcaaaaatacttccttccctccaattgagaaaagtttgtcattccaagcatgaagcaaattttaaactcgctctttaatattgttaaacaactcatttttatctcgcccagaataagaaggcagtcctaagtaccattcatgacactcagtgatcgacattcctatagtttgagtgtaaaattttgagcaaccgtgtatatattgttaaatctggattccacttggcgacttcgttagaggaacaacatgtttcctctactttagacccacaacgtgattggtggaagtatttgtagtgcttgaatttgccctccaaagatcaaaatatttacttgaaaagttgtacaaaatgtgctcccagtggctgctgcactttataaaaaaaaattataaattcagctgcttgcttgttgtgcgcaactgcttgggaatcgattggaggggacatgccctgtttggttgcaaacatgctaaggcaatatggaagcacaacaaattttctattgattatggccaagctcaacatatgttaaatggtgattacttgttgcatctttcctctctacgtaattaagttgatttataattaatcatttgtattatgcgggctatttggagtgatagtcatagaagtagagtttttcatggtggggtcgatagggagagttcctcaattgctacttatgcaaacacctatctagacaatttccttaaggctaggaaatctcatctgccgcttgttgcaactatagtttatgctacctcaacacacaaaaatgacatcctaacagaaggtgttccttgaaaactaccaaaccacaataacctgaagttaaacattgatgatgtcgtgaacgatgaagcaaaaatacttgatgtaggtgttatcattcgagatcatgatggccatgtaaccctttcaaaagctgcacaaggtcaaggatgcttcagatcagatgagatggaagcaaaaactctcttctatagccttaattgggtcacgcaattacaactcccgataacctatattaaaacaaatactttgcgagtatccaatactttaaatgctacatcttccaatttatcatgctttatagacttaatttttaatgtacgttatcttttatcttttttttttctaaaattatcgtttctcatgttaagagaactgctaattaaattgtatatggattagcaaaatagactctagaatgagaaattccctatcccatttcttcttgttgtaaataatttttaatttaaaataacagtaaattttctcgaacaaaaaagtcggttaatatatttcaatcaaaaacttgtgtactttattactatatacaataaaattttaaagattttgttacttacctcaaaagattcgaaggagtccgttcccaaagacttgatttttgaagtctattagtattaccttactacctttgtcctctaccaacaactatcttcagctttgcagatatcttcatactgattttgtttagggatttctatttgaaatttactgattgattttgggtttcaaccttagctagggtttagtgtacaaatttgggttaaaagctcaaacttccgttgtctgcctgagattgaaggcctcgtacaggatcaatcagcacaacccaaatcccatcgggttcggaggcctactccgctccttccttacaggtatgttcttcatctccatcccattcagttctttcttacttctatttttcgttattgatgaattgtttcaccaaaacatacatagtttctgaagaaattttactttggtcgaaacctgtttataaaattttagggtttatatccaaattttaggatttacttgattacatagagaattcaaaagaggataaaataatcatcagtgatttagatattacagaaaaatgtgattgatttttctttggttttgatattttctgtgtatgtgtgactaactattctaaaagatttttttttttttt

SEQ ID NO: 37138 - DNA, 7303 bp, Cannabis sativa
  modified_base (6735)..(6738): a, c, t, g, unknown or other
taactaatcctattcttcaacacattagtatgttagtagcagacatgagtttgtttggtctaattttgacactgcttgagaaaaaaagaaaaaaaaaagagtgagaatagttaaaaaaaaaaaaaactggtagttcaaagtgtccgggttcttcttgagaactgtaaacttgtcagtcagtatgtaatttcgttcaccaggcattaattccattctcgttgaataaggtaactttgactgcccagtagatattacaccttccattatatataaatataatatatatatatgtgtacgttatatatttacatttccagtgtgagatcaggtatatatacatcaaaacccttaatataatcatgatgtttaatttttgtatttgctgaatccaagtgtatacatattgttgatgaattaccagttcttttattctagttattataatattataacgtggtataaatttcataattaattatgaaagaaagtcgctctcctaacaaaaatataaaaatgagatccaaacatttggaattatataggcaactagcttctaccataaacaatattggaattatttggcaaaaacaacaaaacaaaattataaaaatgtgattgtactaaattttaaatatttttaccattttgtataattttatttatgaaaaatagggtattttaatatatttttatattatacattatttaaatattgtttttttgttatttttataaagattttatttattattatttttgtgttatttttataaaacactgtaaaaatgtaaaaaatttatataattatataattctcccaataatattatataacttgtctttctccctcagactcgacaaaacgtctcattgatctgattagggtttcaggtcttaatgaaagctagtcttttcttttcttgttagtagtaactcatcgatggatcattcttgtattcatgttgttccggactatatattatttatttatttattttttcttttcagtcaattagtctatgaactagtgttgtcaaaataattgacgtagctagctgatagaattgacaaacattggatgccctttgaatcttgccctattccttgatgcatgtattttctgtacggatcatatgatataaatatattaatgcattttttcttcgattaataacaatattcgcctctacatgtttgatttttctatatttcattattaaaactgataagtagttgctgtcattatttgttatatatgaataaataaaaattgctttttcatgaagaacattgatcaagaattatttttctttctgaacaaagtacacatcatgtatatatggactactgtaagtcataacaatgtatatttattttccatagcatcattattatatgataagtattaagtagtgatttctgctgctacatatgattgtggacttgtgtttattattgtgcaatatactcgccaccacgtgaagccacaatcatttacatcaacaccattatcgcattattattagttctgcgcgcgtctcttaatattttgtttctttcattgctattttttttaagaaaaaataaagcctagaaatatttttaatattaagtaatgtatattgatcataaaaaaaaaagtttcatgtttatctatttaaattacacatttagaaatgttcaacatggttataattggtagagattgatctgtttattttcttgttatttttttccattatctttatttttatattttcttaaatgaaatatatatatatataaaaaagctctatctatatttattagtactactaattagggaaaatggctaagatgatttgcttaaatgctagactaattattaattacatctgtggggatattcattaatacgctgtatatgtcttaatcaggagtgctaactaaaatctttattgtatttatagcctcttttcaacttttatttcaaaaaatagaatattttttaatttttttatagtattatagagtaaattatttaaaaattttcaaccatcgatttagctattgtgtacactgtgaccatcaaatccaactgaaagtaccccgagtgacagttatatatatatttatatatataagaagaaaattgttatgaggcatttgaaggtgctaagcaccaagttattggtatattttaatacttgattcaatatattttattttaatttaataaataatatgaaaattgttaactaattataaattgtaacatcctgtaatattagacacttcaagttgccaaatagcaatacttatataaaaaaatattatgctaaatccttttttggtgtttctaaaattgtgtttttagtctatttattctgcatgttagtattgattatcactgttttcaataatataaagtgtgaaaataaaatttaaatattttgtggtacgtttatttacttgtgttaaacaatttttatatttttgattctataaactatttaaaagtttttaaaaatttattagtaattttaaattgttaagtgttgtagtgtacaccattataaaagataataattaaattaaaattttttcttgatgagtaaattaataaaaaaattatctaagtacgataattttaagaagtttattgtggactgatcccctatatatacatgctcagccaaaaaaacactcagaaaaaaatatagtttgttaagaatttgtttatttatttataatattataagcgacagatatatggccgcttctgcagtgatttcaaaacaatgggtgcattacacatttactctgatttgacaagtatatttatatttatttttatttttatgtctggttattggatgtatatactaagtgggtgtttccttgtttactgctatggtaatttgattttacatagagtagaattagtcctctttcatctttatctcgtttaattaagtcatcagaaaataaaataaaattccaacaacatcctgattattagatagaatagcttgtagtaatttattaaaaagcccgtaaattgtacctttcagccaaacactagtacggattgcaatgaataatctttatttatatgtaccgtaatatatacgtatagataatgataatatattcccaaatattatataaatatatatgtactcaactaatttcctttgtgtcacttcgtaactttttgataacatacacacatttgaactcaaagagtggaatctttaattagtggatcgagcgatgagctaagatgatcaaattaaaagccactgggaatcccctaattgttttttttttatatgtgtcgatgaattaattccttgaaatacaactaagatgatcattgaatcaactatggaagaaattataatgtaatttgctataagtataattatatattctatggtttatttcctatgctataataatttaccttgatgtactaaattggatgagacatgatgagatgacataaagggttataccatataattaatggtagatttataagttgtgtaattgatgataatgcagaggttgagaaatgtgaaggggtgggttcatcggaggaggatcaggacaacagtggtggggaaacggaagtagcagaaatagatccacgtgctgaagacagagagctaaagaaccacctattgaggaaatacagtggttacttgagtgggcttaagcaagaactctccaagaaaaagaaaaaaggtaaattgcctaaagatgctaggcagaagcttctcaattggtgggagttacactacaagtggccttatccttcggtatgttctatatatatatgcctcaccaaaacgctctatttattttatattaaatcatacattattttttttaatatattataattttacaaatttagaaaaataaataataaaaaaataattttttaaaaaagaaaagaataaaaaataactatattaataataaaaatagaaattgtttataagaagaattagagccctcaatcaaataagctaaaaccctctaaaaaaattcttatacatataaaaaattatataaatatctattccatataaaatgtcactatgtaacagaatttttattttaatattatattttgatttttttacgttaattttaacagaatattctttaaataatattattatatatatttaaagataaaaattatatatataaatattttatataataaagtcttaattataaatattttatattagtcttcggtgtcatacttagtgtgcttatattattttttttccttttcgatcaatatataagtagagtgaaacttaacaacgattttatgattttattaattgatacatttcacataatttttaaaggcacatgatcttaaattataatttatataaattattttttaatatcaaaatctaaaatattttaagataaactatatttataagataagtcaaacttaatatatcatgattatataaaacaataattattaataggagacatatatacactaatgttgcctcaatagttaaaaaaattctcaaaaattataatctcaaattttatttcaaaaatttaaaaatatatattatttaattaaaaaattaaatatacatgcacatatcacctaattaaacttaattaaaaaaaaaaaaaaactaattataggtgcgcatttgcacgtgacattaactagtatatatacacagggacggatgtatatattaggtcataggggccatggcctcccaccatttttaaaactacacgaaattcattatattatacccaaccctcaaaaatattgatatatatagttccttttactctcttgttccttttactctctttatttgaattgaatactatgataaattacacattttttttttatttcggcgtttaagagaattttttaatttatttttttataatcgtatatgttctaattttttgagatttcagacattatgtataattttgaaaaatttagaataatttacaatattgaaaatagtattcaaatagtatttcacacgcgtataaaataaaagagtcacccatataacaggttgtttaaactatgttttcggtgtgttaattttttctaaattttttaaaattttgcaaaatgttttaaataactacaacgtacacgattatgaaaaaaatttagactaaaaattttttctcgaatgctgaaacaaataggagtaaaaaaatttctcgaatgctgaaacaaataggagtaaaaaaatttctcgaatgctgaaacaaataggagtaaatcagtgcatcatttctagtggccctttgtataattttcctatgtatttgtgacatgtttcaatttaaggtgcattaattatttattttatattaagtgagtaaacaaaatagtgcattctaacattgatattagacacattttcttattctctctttcaaaaattacaagtaaattgatgagttttctaacaccttattaaagcactaatcaatactcaggttttatttttattttgatttcttgattcatattttctagtttattgtatataatatttataaaaattaataatctgattttcttccatcaatctacttaaaaatgagttctagtcaccagaatatttaatggtttcgttagatatgttatactattatatgttggctcccttacaatctagtcctggctccacctctgtatatacacacataaatacatgtaataataaaaaaaatcattaacctctcctagttaatctgaatctaccactggctaaaactagtactactctaaaattagaatggattaaagagtctacgtgagtgttgtaaaatacataacgaaataaattttacttttttttttttatttattttatctcaaacttttataaaattcattaattttatttttcaaatacatgaccaaaatattttttttttaatttttaataaattttatttattttaaacatataatattaatatatacacaatacttatataaaaaaaatattcaaataaaaataattaataaaatatatttagaaaaataaataatattctataaatatagagtaataaatttaaaaaaaaattaaaatgaattagtttggagcatttgatgtaaatggatttttagtttgagtttttaaatattttaaatattctctattaattttaaaacatctaacatgagtgatcttaaaactttagctatatttaactgaggaaatatagttatttgcgggtttttttttagttattgtagtcgagtgtttggtgagtattgatggacatattagctagtactcatatatgttgaattttgacattaattaattgatcattatatgcttaaatatatcactatcttttaaggtacaagtagtgaatttgttatgagtatgggctatttttctacgtacaggagacagagaaggtggctttggcggagtcaactggtttggatcagaaacaaataaataattggttcataaatcaaaggaagagacactggaagccttctgaagatatgcagttcatggttatggatggtctgcacccacaaaatgccgctctctacatggatggtcactacatgggcgatggccattaccgtcttgggccatagtacaaatgctgctgctgcatgccttttcttcttcatctcttctgacaataattctataattctatatatatatatannnntatatatatattatatttatatagtgatcaagaatttttagctggctagcttgaaaaattaagctgagctagttaattatttgatatttcttcttaaggcaggtatagttgaacttagcttttcagttatagtgttttgtgattttaagtaacacgaagttatggaacgttctatattccaatttgatttttgtgttttatgttatgtatgggatatgtggactaaatatatattacatcgtttcatatactgcatgttaaagaaaaataaaggtgacttttattcaagctactattatttaactaacggtgtactacaaccaacttgtgtatttcttattatttccataaatttagggtgttttatttattgagatattaggggcaaaattatttgaattttattatttttaacgcttaactacataaaccgattttttgatggcaaaacctattaaacttgaaaaaccgtgtttttgcaaatgtctgttgtatataagaaaatataaaactgtaagtgtttgtagaagcagaaagtaattctgctacagcaaaacgaaacagg

SEQ ID NO: 37139 - DNA, 2414 bp, Cannabis sativa
  modified_base (483)..(493): a, c, t, g, unknown or other
agacctatgtataatgtttgactttaattattaatttgttgctactctagaattaagtaatgtaagtgaaatgttaataaagagcaactaagtgtagtgctgtgttgtagccttgaaataatatgtaaatctgcaaaattaattaatgataactttccattgccttggtgtactaattcttgatcaatagtgtttttttaggctatgtttagaagtttgattggtagccaagatataaggaaaaaaatgtggacaaaaaaaaaatcaattgttaagtttgatatgaaaatttttgttgaattaagaatttcttttaggaaaacttacaaaaatactaaaatttgggttaatttttacaaaaatactatcacactgaaattttttcaaaaatactacattagtagaacacaaaacagaacaactcaaaacaacagtagaacaattaaaaaacactagtaaaacactagtgaaaacttaacacannnnnnnnnnntatgaaacttataaaaaaaatacagtaaaaaaacaaaaataccgcctaaaaaaatgtcaaaagttagtataccatgtaaatttcactttcttttatactaaatatgagaattttttgttttttattttctagttttttttccttacatttttccaatttttttttttaccaatatctcaaacatattagtaggttagtgaagagtgtgaccaatagtaggttagtgttgtactacccacattcatcatttctcatattatctcataaaagcaagtactcaattaagcaattatctcataattagtaagttagtgttgtgtcttctacattattcaattactcatgaagttctaaattgtatgtgatttactatatattatggtgttttataaatttataacatgcatacacccatttgttaaggcagcaaaggcagtatatataaatagtgataacaaacgtgcaagattcttttaaatgtggtcggctggtcgctactacttgaccttaattattgtaagtatgaaccttaaactatatatatgtagtttataattgaactcatgtataatagaagattatatatacttaactatatccccatatctatggaccttaacctcgctatataattataatacattgataatgaataatatttctaagattaaatttgtaagtcactatatgtgtacatgtcattattagttaattttggtctataaataatttttctaaaggcgaattataaaaattaaagttaaagtcaaagtgtctatataatttaaaattaacagtactgacctatagtacgcattaaaggggccgcctgccagcatttataggaattaatttaaaaaagtcttcgaaacctatataatatatgacacctcacctttgagaatattaatacacatttacaattatattatttatagagagctagacacctttgataaatttaggtttaattggaattgtttttagttgtaatattgggttgccaaatatgtatagcaattttaaggagcaagcaatagagtacgtgaaagaagctgtgcatgaagacaatgctgggaattatgcaaaggcttttcctttatatatgaatgcattagagtactttaggacccatttgaagtacgaacagaaccctaaaattaggatagctattcaacaaaaattcacggagtatttgaatcgggctgaggagattagggcggtattagacggtcatgatcatggcggccatagggggtttggctcatcttcaagcggcggcggagaggaggaacttcttctgctgctgtggccatggccataccggtggagactaataataagcccaaggatattgcggaggatatccatatatctatagcaaattcagaaagcctaacatgatcatttgtgtgtggatgggatgtggggtattgtttctggttgttttgttgatttgtattataatggtgcttgtttttccctttattatgttggcaattgaattgggtatatggatattgtatccaatctttatcttttgttattgaattgagtcaaattagtgtcatataaggattattaatgtgtccttaaaacatatttatataaaaaaaatattgtgaggatttaataaattatattgctttcatgtgctttcatgagactactatttttacatttcatttatctaaaaaaaaaaaaaccaatgttattagatgtaggtttttttttcttatttttttctgctaccgatgtagtcttagataaagtatatcaatgaatatatacaattcaaatatatactaacataaaattattatctgtaatcactaacatatttttatatcaaattaaagctttatatccaatttatagttttgatatttatatttcgattacaattattattattattatt

SEQ ID NO: 37140 - DNA, 4713 bp, Cannabis sativa
ctttcgaattctatgaaatttcatccacattgtgcctgcagttgccacataaaatttctagctaaaagttttataatctgactgtgagttatacaccagatgcttacaggagtctcgaaaagtctttgactaatatgtgaaacgtatctctacacagggaagtctttttggactttgacccgattgccatttcgaaattgaatgagaaaaagattatttctcctgggagccctgccagaactttactatcagaactaaaactgcgagccatgattgacaatgcacgtcaaatttgtaaggtagacaaagattatatgatttttatgttaaaagtttcttaatcaaatagtatttaaactcttaagcaaatgaagctttggattacctatgcaacagacattttacctaacatctcataactgacttatactatggaacaaaacaggcagagagattgctgaaattgctatttttccattattaattggttcatgtatctgttatgatgttaggtaattgaagaatttgggtcctttgacaagtacatatggagttttgtaattcacaaaccgataattagccaattccgttaccctcgccaagttccagtcaagacacccaaagcagaggtcataagcaaggaccttgtaagaaggggtttccgaagtgtaggtcccactgttgtgtacacattcatgcaagttgctggactgacaaatgatcatcttactagttgcttccgtttccaagagtgtgctggaacaatagaggcaggggaaaaagatggcgcggtcaagtgtaagaccagctcaaatatccatatcgagccaactgattttgaagaacttacaagagctgtggaagagttggtgagacgtacagaagaagagttgtaaatgatttaatttgaccgaggctttcggtatgatgtacttttggggtgttgaggacgtgtttgtgctgtacaaaagctttgaacatataaaaatactttaggatcactttgcttttttttttcttctctttttatctttgaatacaatgaaagtagttattaatgttcatggatatgttattctcaactactttgtatcttttcttcctagtccaataacaacttgtacttttcttatccttttgctcgaacaaattgacaagttgcaggttgcataatcaattggtacttcccaagccttagtttacccgctattgactaagactgatattctaccatttggtcaccaacctcagagtacctgttttctagtatccaattgtctaatttttcttctctacatattaatgatggattttacgtgtcttgagactaaatatctaaactttgcaaggttatgcagatatttagttcaattatataaacccccaagtgtgagagttgtattagaattagtcgcatagtggaacaacgaacaagtagctttatttaggaaggttacttaattgacttttccttctgattttgtaatggactattcattcaatttatagttctatcacatgtgatgccaatctatttgcaagtttagatatttttactaggccacttgactaaatttttgactttgaagagtatgacaagacaatgagaaaaagacttgaagagaaaacaatggttacctcagaatatgcagataaacaaaataacttgaatagtgaagaaactcatattgaagtataattattaattatccttctattcattgatatattttgtaagaatgcaaaaaccatactctatagctgaatctaacttttgaattgactgtgtaagagtcatccaaattacaattccagttttggaagacaaataaatctatctagccactcatgaggttctgagtagatgaaacaaaagtaggtgtctaaatccttttcctatttcccggtgtttgtatttacaaaagtagaaaaacatcctaagctgttcaaagacagtcttcataagaaggaatccattcagtgttgacttctcattatatttattcagctggatttctgttgatagattcttcctgagatggctgcagccaatgctgcagtgaaattgggatcttttgtcaaagatgaagccatctgatccaccaagaattttctaacatcaggcgattcagttcttgctggttttgcactcttggtattatcattaccagactttggttttgtaaaatcaagagtaatattaggtccaacagatgaactaatggcgttcgtcgaacaaggaaccgaactgagagccatgcctcggttctgtcctgatgttgcctccatttgagatggttgggggtggttatgttcaccttcatatgttgccactaaaatagattgatcatctacacttctttgaacctgaaaaagataatcattaaaccaaacttagtatatacaaaaatacattttaggagaaaagaaatgtcattaaaagaatcccatatgagttttaaatttaattaccttctttttgacagggcagcttggagcaaaggagcatttgaagtaagctctaggagaagggttatctctagtgaccttttggccatatttcctccactgatatccatcttttacaatctgcatatcacagattatgataattcatcaatacaaatccaaagtctcattttatgtgtatgattttatggggcagtaataagtttgtgttcttaccaggcttgtatcagttgcttcagtccttacacaagtcttccaaactttagctttaatgggttcttcttcccttggtttcttgcaagactcctcatcagttgaactgctctcagaatttccattagttgtgatgatgttgttactgttattgttactactttcagattttctcttctttgaagggctaagctccttttcaactgggttcttgttcatatactcagccaattgatttcttaaagagttgtaattctcacacatcatagttaacatctctgtaagcttcttgttttcagcactaaccctattcaattcttcaaccagagcactagtattctgaggataaaaacacatgaaacccatttagaattaacataaaatcaaaaatcaagactttcatattttgagagagtacaaactacaaacctcttgtttggcaccaagtttcattccaaagtcaataaatttgctttccaactcttttttctgaaagaaaataaaaataaaaacttgagtcaaaaattcaatcaaacaccttctgggcaagatcaaaaactcaaaaggaattatccacaacataccggaggaggaggaggaggaggaggaggaggaagagcagcatcatagaggtctctgctataattaggcttacaattcagatccaaagaagtatcaacataagaagaataatccataatagccttagaagaaattgagttaacccaaaccaagttgctacttttgctaagtgtctcaaattgacaaagcaaatcaagcatatataataaaaaaccaatctttcttctttcttatccacaaaaacaaatatctaagcaaaacccagatcaagttttccacgaatttgtctcaaatgaatgaaatataaactatatatatacaaagctgtgaactttgaggaaacttggtcgaaatagaaagagagagagagagagaaattattaataataataataaaaaataaataaaactaaagaaagctggcacgaggctttttcttgtgtactataaattagttaaatttgatatataaattttctctctctcttttcaagttgattgtttggtgtgcggaccattaagagaggaagaagacttctattagtctttatgtcggtaatggttgaaattcatgcacaaaattcaagtcaagccaccattgaactaacctgttttcttttttataataataattaaaaaggattggctattatatacacgtggctacatatatttcatacgtagtaaatcatgatttttaataaaaaaaaaatttagtgttcatggaagttctatgttagtcttgctttaatttatatgcatatcagtatataatattatgtatatataattatgttatgtggggtcaatgaaaaaccctactataataataaccttttttttggcacgtttctaaacattttccacgttcaatattatttactgtattttattttttgaaaaagaaaaaaaaaactgtactttttaatttattggtttatttaattaagttggatctgatccaaacgtgctcatttcttcttttacttaaatttattaatgtttctttttttatttttcttaataacactcacgtcatgatgtttttatttgtatattcattgcccaaaaaaagggtagttaatgtgtggcatgatttaattaaataatttatattacataaatataatagaggaaagatctacaaacaattttcccattgaaccaaatactatatttttatatgaatggcagaaatagtgtgtgaatttataatatagtattatatatatttatagaattttaccaaatttagttatttttagaatgttgtctgtgggcctgaaccgttaaagttgctattttacttaaaaagaaaatagtgtaggaaaattctacaatgcacccttttaaattggatatattgatgcactcctatgtgttttagcatctaagataattttttagtcaatttttttttatggtcatgtacgttataattatttaaga

SEQ ID NO: 37141 - DNA, 2077 bp, Cannabis sativa
tctcatctattttatattattttataataatatacatgtatatataaatagtataggagaattaagtatattaaaatgtatataatgaattgaggtggtgcgtcgaaatctctctggtcttcttcttggaacaaaagcaaaatacttatatacgtatagtaacttagccgtaaaagaaccccacaaactccccatatattatattttctacatataattcctttattcatttttttcccttcaaaaaataattcaatataaaatattgagctacttattaattagcatataataataataataataaatttatttttgttggtatacataagaactaagattataatataaaatgaattaattcaagtaatttcataccatgaagtctgtcattgttatatcaaaaaaaatgtaaacatcagtgtgatctgttctcttctgtacttgcttgagatgaagttgctttacttgaggtttccccttctattcaattttcattatatttctttattatataataaaaatatatatatacatatatatataataatagtatttatataacctccatccgacaataaaaggacatggtagatagcgattcaaggtttaattagctttgtcacaaagattaactgttgagaattttgcatgtggaaaatgacacattaaaaatcttccttaataagaatttaatttatacacctaagatatagttatctctagtaaattttatattatccttaatcaaattatggggtcaaacgaatttgattgtctttgacaccactcttctatagtttgttctttctaacaactgatcttattcaaatgaaaaactatatacattcaaattgtacctaatatatatcaactacaaccaatgtctatatatatatataccattcaatattgcctttaataaacattcacacactactacaaatttcaactacaacaaaagatttatagcaaaaatgggtgttctttacaatcttttctttttcatcatcactattttggccatttctaaatctgcatttgccattacaagacactatcaatttgatgtatgtcccaaaaaaaaacttcacttcattattcttataatttggtttttttttttttttttaatttgattactaaatgttttgaattttatagattaaaatgcaaaatgtgacaagactttgtcatacaaagagtattgtatcagtaaatggacaatttccagggcctcgtattgtagcaagagaaggtgatcgtttacttatcaaagtcatcaatcatgtcccaaacaacatctccattcattggtaattaattaatttcaacactatcatataatattatatgtataataacacatcaattatatttgatttaatattttggtttataggcatggtattaggcagcttcgaacaggttgggctgatgggcctgcatatgtgacccaatgcccaattcaaacagggcaaagttatgtgtataattacaccattacagggcaaagaggcacacttttttggcatgctcatatatcgtggctaagagctactctttatggtcccataatcattcttcctaagcgtggtgttccttacccatttcctaagccctacaaacaagttcccattatctttggtaatttaccacattgcccacattcaaataaataataacactttaatcttctctctttctctctctctctgaatcttgtaacaaaaataattataatatgcatgaattaatgttgtacaggagagtggtggaatactgatccggaagcagttataacccaagctatgcaaactggtggaggcccaaatgtctcagatgcttataccattaatgggcttccaggcccattgtataattgctcttctaaaggtttgtttcttaagtaactgtaaatttgtgatgaaattacacattttgaaacaaagctttttttcaaaaaaattattttattagaaaaattgataaaatcttttttaagaaaaataataaaaacagttatttggttacccttaggataaccttatccccatgtttttctagatcggaagag

SEQ ID NO: 37142 - DNA, 3673 bp, Cannabis sativa
  modified_base (43)..(46): a, c, t, g, unknown or other
  modified_base (203)..(203): a, c, t, g, unknown or other
  modified_base (338)..(346): a, c, t, g, unknown or other
  modified_base (3626)..(3626): a, c, t, g, unknown or other
atccaataaaactaattagtattttcatttagtttggatgagnnnntagattttatattgttatatgtcaaatctatatgtatatatgaaaattaacattaaagtttaactttttttttattggattggatggatccagtccagtccaatacaaactggatctaaaatattgaatggatccgatccgatccaaaaaatactangtctaaaatattagataaacccaaattaaacaaataaatatatatgaaatacatattccaatggatagaaccgatttatccaacatccaatggatgttggatcgattggatgacgaaattaattggatcggatcnnnnnnnnnaatctaacatccaatatatgattagatcggatttggataagcctaaaaacattggatgtgatccaatgaacacccctaaaaatgagcccaattgtgatgatgattgtctttcatatgtttacatgtacatatacagtgacgtttaatttaatggatattatcggtagtattatctgaattatttattttgttatagttaacacacaatttgattttttgggacaaatttttcaaacttcacttttgttgtgattttattattccattagcttttgttagaggtatacagttgtgaccgttagtgacagttgtaacagtttgtctgttacgacaattctgttagattagttgttagctgtgttctgttgtaaccaattccttatttctaactctaatctttgtcactatataaccgtgtatcatcaacactagtaaatcaatgagattgctctttgtttcatcaatcttcctttactttctttctactgtctctttgtaactttctttcaatccttctttctctcgttcttgctctattttcattgtttgtcaattcagtcatggccaagagatacaacatgtatcagagccttttcctccctttacagcaaacatggcgagcacaagaatcgacaacaatggcgatcaaatcaactccaacaccagtagagctcaaaatcaacaaaatggagcctctaccttcaatcgatcgagaagcaactccgacgatcttaatcctacgtattttaatcacaatatgtctattagattaaatgatcacaattatcttttgtggaaacagcaggtgttagctgcgattcggggaaatagactactgaaatacattcaggatcgagctccaccagtacctcagttattgagcgatgctgatcaagcttcgaacacattcaatccagattttctcgattgggaagttcaggatcaacttctggtgagttggctgttatcatcaatgaccgaaagtctccttacacgcatggtgggatgcaatacagcacgacagatctggaacgcacttgaaaagcattttacactacaagtctcttccaagatcttggagtttcgaaccaagttacagaagcttcgaaaaggatcaatgtccctcaatgactatcttctgaaagttaaacaacatgttgatcttcttgcatctgttggagaagttctaagttcaagggatcatattcctgcaatcttcaaaggactacctagtgagtatgacactttcatcatctcttctaacactagaattgaagaataatctgttgcagaaatcgaagctttattacttgcctctgaatctcagatagagaagacatatcttgatcaagattctgacctaagtgctaatcttgctataattgatcttgatcagtcctctgaggtcaatattgcttaccagaaccatccaaattgtggcaccaaattctcaaactacaatcgtactccttctccctatcccacatctcgtcgtggaggtcgtggatactcaaatcgaggagctttcacaggtaacaattatggattgcctacctttactaacaatcgtggtgtctctactgtcaacagaggaggcaggttcccaacaccagcaaatcatgtgcagtgccaactttgtcataagtttgggcacacgatcattgattgcttttgaaggttcaataagagcttcacaggggtgtttccaggctcaaatccccccacaaatcaagctaatcttgcacagaaaactcaaactgaggacaccagttggtatccagactcgggtgcaacaaattattgcactccaaatgtgcaaaatttgaccattagcacagaatatgaagggcaagatcaactctatgttggagatggttcaggtctgtcaatcaaacacattggtcaaacttttattaattccaattcttccacccctttgtcctaacaatctcttacatgtgcctgaaataataaaaactttgttaagggtgtctcagtttgcttatgacaataatgtcttttttgaattccatgctgacaaatgttttgtcaaagaccaggtcactcgagccatccttcttactgggatacaccagagtgacctttatacctttaaaccctcctagttcaatgttcaagtcacaccaacagatgtctccctaagtgtttacacagcaacattgtcccagaataatgagaacaatgcatctgtctgtactaattgtaataaatttcatgtttccgattatgagttgtggcataataggcttggacatccttcagaaaggattgtcaaatttgtaatttagtcatgtaatatccaaatcagtaataaaacacctctttcagttagttctgcatgttgtttaggcaaaattcacaaattaccatttcctaaagcttctcacactgcctatgctgacccctgcaacttgtagttgctgatttatggggcatggtatacacacatttgttaatggatataaatataacatccaatttgttgatgccttttctagatttacctggatatacatgctcaaacacaaatcagatgccttgaaaaccttcactcagttcaaggcggaatctaaactccaattaggaaagcctatcaaatgccttcaaactgattggggaggtgagttcaagccctttactgaccttctcaaacagtttggaatagtacatagacatccttgcccaaccactcatgagcaaaatggtctagttgaacgaaaacatagacatgtgttggaaaatggcttcactttacttgcccaagcatctatgcctcttaagttctgggataaggcatttcgaacctctgtatatacttgtctaacagactccctactcctgtcctacagaatgtctcacctatagaaaagcttttttatataatacctgattataccaaactcaagaaatttggttgcaaatgttttccaaatataaggccctataataaacacaaattgcaattcaggtcatccccttgtacattcttaggatatagcctaaatcataaaggctataaatgtcttgacacttctggccgtatgtacatatctagagatgttatttttgatgaaacatctttcccattttccacattacccgaacaaaccacacattcttactcatactctaaattttacacctctgttgtcattcctacaacaactaagtcttgatctgttggtagtaatatcagacctgtaaccactaaccatgttgtgccaaatctggcaagttgttcctgttgggttttatgccntaaataaaactcatttcattatattcagatttacttattaatataga

SEQ ID NO: 37143 - DNA, 8032 bp, Cannabis sativa
tcaaagttcggggagaaaaattgctaattagcctaataactaatatttgtaggggacaacttttatgatatctctaaaatactctctatttacatcatccccatttacacaatctaaccccatcggactccacatcagacacaatcggaccccatatcggacctatcagaccactcatcggacctcccatcggaccccccgtcggacccattggaccccctatcagacctacgtctcctacctcgcaaacttacagattcattaaccccatcggaccctatcagaccttgcccagctctaagattctaaaaaacggaatacgaactcacctttgacattgtgtccgatttggttggggtgcgccgtgggtcggtgggggagcaccgtggggaaatgggttcggtccgtgggtgatgggttcggtccgtggggcggtgggtttatcggtcgaggggggggggaatgggttcggttcgtgagtggtgggaattcaaaagacagagaggaagagagagagagtcagtttagaatgaggaaggtaaaaatgagttttagtaaaaattatcccattttacaaattctgtatagttttaaattaatagaccaattttaatccctatgcatacaattttaaatttcccaattaaattaagaataaagagtatttgttcaccaactcatgggtgtgggtgtgggtgtgggtgtgggtgtgggtgtggatgtaaaaagtagaatttacatacacgttttaaaaagaaggcaaattattctcaaatattttttgagggatgaaacaccacacatatgacaaaatagcatcaggttgtctttatgtaatacaattgattttactgtagctacaagtaaacgaaaggttataaaattatgtaattcctcaaatatttttcttatagtatatatcacattaacaaaattacttttcttacaattattttttattaagataatcacagatacaaaaaaaacatttactttattcaaataaaagactgtaaactaaaagatttcttgtttcttaattttatacacataactattcaatggttattccccctatttcaagttcatccaacttcttgggtcttcggtagttcttcaacaacaaagagcagcaaaccacactgactgaggatgctgccatggctgctccggcaatccagggtggcaaccgaaatccggtgaaggggaagagaactccagcagctatcggtataccaagtatattataacccattgcccaaatgtaattgagtcgaattctagtgaaggttgtcctagaaagatcaatggctgttatcacatcctccaagttgctcttcatcaaaactatgtcagctgcctcaatggctatgtctgtgcctgcaccgatagccattcctacatccgccgccaccaatgccggcgagtcattgattccatctcccaccattgctacaatgtgccctgacgactgcattaagaaaaacttgctattggactcttgctaatcatgaagttaattgatttcagttatgaggtttttgctttttgttattgtctgattttgaaatctgtttagtgagtgagaaatttttaaccaaattatgattatctctttcagtttgaaccataaatactaacctgcaattcctttactttttcagctttcatctcgggtttggcttcagcaaccacagtatcaatcccaacttccttggcaatagatttggctgtaccccaattgtcacctgtcaccattatgctctcaattttcatggctttcaagatcgaaatagcttgtcgagccccgggtttgagtggatcagatatggatataattccagcaacttcttcatctatggatactatgatcccagtatgagccattccttcagcttcctcaagtgcttcttgagcttccactgggatttctatgttgttttcacgcattaagctcttgtttccaactatgattttcttgttcttaacaatggccttaactccttgccctgtgatagagacaaagttctctgcttccggccaaatgatgttctcttcatcttctttcatcttttttgcatactcaacagtggccttggctagtggatgttcactgttcacctattaaatacaagtgcttttataagttttgtgtctattgccatgtaaatttatactgaagatatgttcttttaattacctcagttgcagcaaccagttcgtagaattcgcgaataaccatgctgttaaggattcttgtgttgacaactactggttttccaattgtgagagtgcctgtcttgtcaaacacaatgcagctaacctacaaggtaaagttaaaacaagtgattaaattttgaactaatagaaaatttgtgtagggaatgttttatgcgcaccttgtgtgcactttctaatgcttggcctcctttaatgagcaccccctgggaagcaccaacaccagttccaaccataacagcagtaggagtggctaagcctaaggcacaaggacaagctatgaccacaactgagattccaaactgaagggcaagctcaaaactgtccattgaagatggtatccatgaatgtgggtaactatggaactttcctgccaaaaaccaagcaagccatgttgcaaacgaaagtgttataacctgcaaaacaaatcaagaaaagagcagtcaaaactagtagtgagagccaaagtagtttcatttcaatgttcacttaccaatggaacaaagtatttcgaaattcgatccgcgaatttttgtactggagccttggccatctgggctgactcaacaagtcttacaatttgagaaagagcactctctgatccaactcttgtagctctgatatgcataactccattttcgtttagagtgcctccaatgactgcatcaccttttcgttttgacacaggtcgagcttcacctgttatcatgctctcattgacatggctctgcccccataagaccaaaccatcagaagctaccttagccccgggaatgatcttgatcacatcattcttctgtaccaaacgactatcgatttcttgctcatttaccacatttccttccccatcaagagtcaatagtgttgctgtttcaggagccaaattcataagctttgcaatggcctcagatgtctttcccttagccaaaacctccaaatacttccccaatagaatgaaagtaatgagcattgaactagtctcaaaaaaatcagtccccttgaaatcttttgagttagctgctctcaacacaatgtagacagaataaaagtaggctgcatttgttcctaaagcaatcaaaacatccatgttaggagagccatggcgaagcgccttatacgaacccacatagaatcgccaaccaatgatgaactgaacaggagtagccaattcccacctcaaaagctcaccaatagtcaacatgttgactattttgatatccaaaactttcattatcacaggtacatacatgaaaaccattgaagttaaaaaaacaggtatagtgaaaaccaaactccataaaaaccatttgtagtactgcttaatctcatgttgtctatgactatccctatctccttgatcttcagggtatatcatggccttgaaatgacctgatccagatgactcaatcacttcaatgaaagttcttgatccagtcaactgtgatttatatgagattgagatctttttaagttctgggtatgtttcaatttcttgtactccatctatagactgaagtgacttggctatgattttcaaggaatggtcagttttaaagccatcaatttggatatctatcttgctaatgtcttctcctaaacttaaaagtatggcttcaaaaccagtatcttcaatggtttgaagaagctgattatagcttagaaagtttggatcataataaacttctgcttcttctgttgctaaggccacttgagcagtttgaaccccataaagtgctttgagagctgattcaattgtggaagaacaagatgtacaagtcattccattgatgcgaattctgcacacttgaattgacttgtcgtttgctatattatcatcttgtttgattgtcgttgcttcaaatccagcatcttctatagcctcacgaattctttcttcctatcaataagttttaaaaaatgacaattttatttatgcaaccatattagcaaataagtttaattattcaatttttgaaaaattgttacttaacttttcatttgttgttgttaattatgtaaaaaatttgacaacataactttttatataattttatttattgcagttaattaggtacctaaaatctttgactacaaaaatactgaagtacgtaatagattttgttgcaattaactacttatttaaaatattttaaattttaaaataaccatagtattaggcttttaattaatttttagtttaaactattttcacataagtatttatttccaaaaaacaaatctacttaggcatttttgctgtccattttttttttttacataaatagctaattgcaacaaaattccctgcataagtaattttgctattaatttctttacataaataattaactacaatcaataaataaaaaaaaaattaccgtatgtgtcccttcaatttatgtgctttaaagtacataaaatttattcacgatcgttactccaaataattaaagctaagctcataaagttttgtaactaagaaccaaacaatatttactatagtagtcttgaaagtgaccaatttgtgaaatttccgtagttttaaaccatttttgtttcattggtgcatatgataagatgaaaacgacacaagtataacttattcaattttatcttatatacgcttttaatatgtttgtagtgtcgcgcaataatattttacaatcaattaataatttaatagcttaaaaatcttaaatttaaatttataacctcttgcttttttatattttctttttaccactaaactagctttagtcacttttaattctacttagtaatatggataaattttataatattaaattatcatataggtcattattctctaatttgtatatatatattttttttaattaaagaaaacattattaatatatacatatcaaccactattaaaagaaatgtgacatgacacacaagaccaatataattccatttccatcaaactagccacacatattttgcctcttccacccaacttaacctctttgaagtattcagttacatatgttttcttattattattaaagtgggttttgaaggaagagaaatgaaaaaaaaaaaaacaaaaaattacctacaaaccaacttagtgaacatttattttattcaccagtgatgagtctcacaccatgaggtgatatcttaatgatttttatactagttattagtttaaatttaatgtgaaaattatgtattttatgagtttttatacaatttatacaaaaatataatttttttttctaaaacaaaaagaagttaacttgttgtaatttttttttttttttaaaaaagttaaaaaatatagggagaatactacctcttactagataacttagttaaacttaacccttttcttaccctaagataaatggtgaccctaaacttttccttccatatttttttaacttatcttttccgcaaagtattttatttttataacaaacaaagataaaaataaaaattctcctaacataatatatgttaaacccaatagtaaatcggacatgcaataatattatacatttaggcggtatgatcaaccctttgatatttctctattataaattgtcaaaattattaagaaaaaaaatatttttttttgaaaaattctacaatgcaccttacaaaacggatgcattgatatatttttatttgtttagtatttaaaataattttgttggtcaaattttttattatgatcacgttgaaaagaaacaacacgtataattattttattttatacgcatgtaaaataaattgtttaaatattgtacacgaatataaaaaaaagatagactaaaatttattttaaataccgaaataggtaaatggtacatattccatcaatgaatctcttttaagagaatgcattatataagcaccttactttactttttcaatggaataattaacaaaaataccacatatcttctttcaactatataacttattggtttatcaaaaaaaaaaaaactatataataacttattgattggttatactacttcaaagcatatctaatatattttcataatcttatcaaaacccattatggccctttaagatatataaaaacactaactaaccaaagtcacatattattccataaactggtatatgttatgaaaaattcttattcttaagtggatgtatgtgctggaaaccacatatttacataaaaaaaaaaaaaaaattaatccaatttatattttctaaaaacgatcgaaagaaaagaagttaccgtaacaaagttagagtagtaatggacaagagctttgttattcaagatatccacggcggcttcacggatgcccggaagcctcttgacggccttttcaacggagccggcacatgcagagcacgtgagtccggagactgaaaaaagagctttagcctctgcaccttcatcgccgggggactggcctttgggatatttaggcatagaaggatagtgaggcctaggcgatgtgggaccccaactctcattgcaaataaaacaacccaatgaagcaacaaactttgaagccataaatgcagcttcagatatatatgagattttatttatatcataataatagcaatttagaataaggtaaagttggaacgatattatgattgttattctctcttttgtggtggggacttggggccaaaagaaaaaaaaaataagctctataactcgatctttcttacctttggtttcaccctttcttatgaagcaaagcaaactatatattattatgattatgattcttcttaaaaaaatttatagcttttgcttttttgagctgtaactgaaaatgggaaagtagtggttgctttgtgagagatcaagggttgtttaaatagttaagttggagtttggtcaagctcatttattattttttttgaaagcaaatgttttaagctcatttattattagacactagcaatatgataaatgggacatactaacgtattattttatttatttttttgtgagatagggacaataacgttttgtttttttttttttttttttggtatgaagaactatatattgaaaaaataagccaaggaaataataaaaaacggttaaaatatagtttttttagtggcaatatgtggtgggtttaataataatttgttcgtacataattttatgtaggatcccactcacaaacaatggtggaaagattagtaataattgttgttatatagtattgactttagaataatcttgttaactaattatgagggtgatagagaatatttgaagggttaatacttgtttggtaccttgtgttttattgaaatacatgtttaatactttttatttttaataatgattttttttttgaaaattttccatattataattataaattaacagtcatttacaataatagagaaaataggataagaaatttctcctatccaagaaacatcttcatccaactctagaacgtactttgctaagccatgagtagctttattagcttgcctacgagcatgagttgtaaggaaaacttcagggaaagaggataaaagactacgtacatcatcaatgagattattaaaacaagataagtctctatgaaaacagttcaaagcagaggatactcttagggcgtctgtttccacatttacgattaacaattggtgttgagcagcccaatttaaactgtgaaagagcgcctttgcttccatttcgtcaattctgaaacatccttggactggtcttgaaaacgcagcaactacttctcctttgtagttgcgcagcactgctcctgtaaagcccgcttagtta

SEQ ID NO: 37144 - DNA, 2535 bp, Cannabis sativa
  modified_base (2505)..(2506): a, c, t, g, unknown or other
aatattgttatttattgtaaaacaattctataaccgatcaattatgtataactaaaaggatacttgctttctatataaaggagtgatccaagatgaataaactaagcagaaatcatttacaacagtagactaagcagatcgtgatctaactaaatcactatattccctgcgtttattttatttttccaattattcaattgtcttgacagttttctttgaatactcgttattctaagtaaagtatccgttatttcttattatttgcatacttatttggtattatccaaattcttcaaacaataaaaaacgtttacctgtacatatttgtacatacaaataaagttatatatacataaataaagtttgatataaaataagaatttattatagtagtgttcgaaaatgctatgaagactaaggaaatgagattattagccacctgaattttttttcattcttttgggttttgagcataaaaaaaataaaaaataaaaaataaaaaatgctgtggtgtgttgtgttgtgaagctttaactttgtatttgggtaactaaaaggcgaaccaggagccagacccacacccacccaaccaccacccataatcatccgcattagtcatggctggtcctgtctcagtctctatcactatcactaaccaaccaaactagctactaaacatatatgtatatatatatatatatatataataaattgacatatataatttcacaaaattacaaaccctttgctattctatgtgtaataatctctcacatttttgtccaaacctattactttattttgtttttgtttcctaactctgttccactgcatgattttactcattgttaagctatcattatcattatcattgtttattgacagtgatattttgacatattattattgaaattataataaaataccaactcttcttttttttttttttttgcaagaaaacaagttctaataaaataccaacttaaaggatacatctaatatcataattgcaatgttcttgttgtacttgtatgaatgtatgatgattatataataagttagtacgtacacaaacattacttatcagttatcacttttgcatttcactataagttcaaaaaaaaaagattcgttttttgttttcttttttattttactagctcttttagattcctacgaagcgtttactcttttgtggtccaaaaccagaacccaactagcttttgaaaaagagtaataatcaaggcagacaaaaaagtcattatcttcatgaaaactttagaagttttcttcacgggccatgatccaaggccagaaggccctacaaagcccaataatggccatcagaacagtaaaggtacaagttatgttttttagtccttctagtggggaaaagaagtattagtctttttagttgtgtcacttctataacacatgtcataattttcttatagttttaactttttgaattatgaatcactgcctatttatttaaggtaattttatacacttgtggcatattgagaaaagagaaaattgcactttattttttattttctcttttaatttttattttattattttttaatttatacccaattttataatttatatttctattatgtgtttttgagaactctaattttaataaggtatataataaaaagaaagtattaatcaattaaaattatttagagttatatttagttaatatgtattaaaaatagtaattttcaaattatccctattaaaaagagaatagtttttttttttctaaggggcacgctaaccaccgccgtacatggcacatagttgttggtagtaggggtggtaatttgttcgtgtcgtaggacttagaattataaacaaatgttaaatctaatctatttataaattgtattgaaaattaaaatctaattaacctaacgaatttattaatagttaacctgatcaaacctatttaatccacttataaaaatagagaaaattacacttactatggaattttaaaagttcttaataaatatgacacatttaagtttgactaatttatatggtatttttttgtttttaggtctttttgtggtatttgatatgctatatatatgcaattagattttcaaatctcatatttaatatttttatttgtttaggaagttttatttgtcattgatgccgagaaagtcaccggagtttgctgtcggtgccggagaagtcgtcggagtagcagtcagtgccggaaaagtcgtcagagttgctgtcggtgccagaaaattcgtagaaattggcattgtcgctggaaaaataactgaaaaaatcaccaagaaaccggtttcttctttagaaaccggtttcttctttgtgatttttctgttgacaatgccaattctaataacttttctgacgctagcagctactccggtgacttttccggcgctgacagcaaatttcgaaaagtcgttagaattggcatagtcgccggaaaaatcaccaaaaaactggttnnttcatcaagaaattggtttcttgacgaag

SEQ ID NO: 37145 - DNA, 6256 bp, Cannabis sativa
aaggggaaatgtcgtgaatcaaggtaccctgagcataccagctattgacctcagatttggtcaactattagcggagccttatttgtgactaacaatgacaacgaataaattataaagacaaataaaggaattaacacaaaaatttatagaggtttgaccaccttatttagtggttaatgaactactcccttttttgtataacaccacacagattataggcttttaccttgaaatttatagcatatctcactttgaatgttacaatgctgagaatgatgtatgacagattctgaacaagtgatatgagaaacaaacttagtgctagtgacttggaggtggcgtgtgagagagaaaaagcaagactactctagggcttgttgaacttagaacttaggtccctttccacttagcctgatactctttaaatattttagagcttacaaaaaacctacattctaataggataatatccctaaaaaatatgagatattactcttttatcatatatttaaataactaactaatatccctaaaagataggtatatattttagtgttgaaaccctacttttgtgagttgttggagccgtctcgtgggtgaaacgattgtgtgacctgtctaggaggatgattgcggacctcaccatctgattgggcttgtttgaagctctccacctgtcctggcgacagttctttcgtctggggctagccggcacatggtcatccttagccgaccagggtgtggtctagctagaccctctagctagccattttcttgtaatttgatcctgactgagcacttcaatcccttgtcaattgatgtgctgtgtacggtgatttggctcacctattgacacactgtattccacaaggccctagtcttccctacatggatatgccacgtcatatgggcaaaaattgggataaaatttacccccaagtgcctgtgcggatgtttgtactaataggaacttttccactccgactttgaatgttaaaatcttaaccaagcagcactcatcgaacagatatttggcctttcatataacccacttcatgacaaaaaatgacttattttgcaatcattatgcgaatttattattagtattattatttaattttttttcattcttttgctgcacaagtttccacctatgaactctttgtattatgtatggctattttttaggaggaataaccacctactatatttttcgggagaaaagcatatcagaacctttataaggttaacttagtctatcttctcatttccacatcactctctctccctctctctcattgaattctcttcaagaaaaagcaaagtaacctctttaagtcctcctctgcactcgacatcccaaaggtctccattcctgaggttttttcttctttttgacgatccaacctttccacaaacatccacaacagacttcattactatgtaagtcttcgaatctcgctttctcattgttttcttaaatctgcctttgatgagtttaagcttttcaaagcttttttaaaaccttgattctcacattatatggtaatatgtttttacattataatccgaatgatagctttaggatgcataatgtatgatttccaaatgaaaaagattaaattttgatcttcatttagattcttaacactttgagtcacaatgaacacgaagaacaatgtttgagtttttaaaaagtagagttttgatccataggctcccttggtcggcaaatagggcctatttatgactctagttgacacattattttagtctaggaagctggccagttcttggcttctaggctagaaacctgtccagtccatgtcaaggtcatgaaaccctgttcgacacatgctctggtcctggatccctagccagcacatgcttctattctgggaccatggtcgacacatggcttaagtcctagaaacttggccagttcaagcccttatttgaccttagcaaggatatttcatggctttttgagcttgtctcgcctctatccattacttgattccatcaagaactttgtatggcatatcttaggacgagtctaacttggctaattagcgatctaaactcaatgtcgtttgaatttttacacctagatcttgtacttagctaatttatggcttttaacattaggatatctagctagtacccttaggtttagttgactagtactttgtctaagtcctttcatttcattcaatgactcactttccttatcttttgtatgtagatgaactcgcgtgacttttggggaggtgacaaccagatcaataaagacttgcttggtcttcttttgtagaccaacgtccatctccttcacctagttcttctaccaggggttctttaggtagcccctggaatgattttgaggttagcagtagctccccaaaacttgagatccaacaccacaacttttttagagaaaataggtggttaatttatggtccatttgtctaggaactaaactaggggtggagatagttcctcccacaatcatagacctacattgttcgggacagtgtgcccgatacattacccacaggtcatgtaactccattcgttggagatcaccctaccacggagactacagttacgattgtaggctctttgagcctttcatgggttgaacaaaacaaacgtgtcatagggcacctcctcaggaccctcacattgctgagctgatgttaagaaggagggtctgttaggtggaagaggctgagtagcctcaagctgaccaactaggggctagccacgttgaggaacctatgaccgagtggcccattatcggctaggatgagaaggcctcggctggtcatggcagtgattttgatgctgaggaggttgaacttactgctagagcaggtgctactagaaggcgatacaagactcgcaccgtggtcttgggcaatccattgggctcttatgatgacgtctgacagcttttgaacgctcagagtcatccttttgaggttgggatcgaccatgttgatgaagaagctcgtgaaccgtgggtccttgagtacatgggccaacaacattgaaggatatcccctccatcttctctgttagccacaaaacttgacgagatcatggaaggaggacttgtgggaggatttcattgcgacaagcccagtaggtatcagttagcgcatcgtctagcatataactagatggcttggtcaagtcatcacattgagcaaggagtagttctgcgcttgcatccttactttagggaaattacatacttctttagggtgtttccaaccctgatcacaccaaaagctatcgagtacctttcggcgctttttcgttctctacagggagcatagctggcaaaaaccttcaccttacgagatagggttttactttgagttaaaatctgttcctctatagggaaggttcagataattttactttagctagttaggctacgagttgcttggcaacaccaaagataaggcaatgtaaaaaattaggaggtacacctagagttactttatttcttgggatgtgaggtatgttagtcaatgttttcaaagggtactgacatacatttgatagatccctactccccagctaagggaataggccaatcacatcttgtctgtacttgtggagaggcatgacattctcaagttttcctgtaaggaaaatttttagaggtatagtctacaccgtcctgcacctggtactgagggaacccgaggccctcccagaggtcctgacaacactcctatggaagagtgagatagtcaagaggaatggcttgcgcttgagtaggagaagggtgattctcataatggcatcccttttaccaggattgccaagattgtagcccagagggaacagacccttagacaatgctaggcacgaggaggcactgctgcgaatgctcctgtgttgtttaggtccagaggacaggactttgccatgcctgccagaccaacacgtgcattcagagataagggcaaggctaccgtctatgaagatagttctgaagattcctcttctaaagatgataggcttacaaattttcctttagatgatagtaataataattttatacttttacttgcacttagtactgatgactttattcacacttttttactttcatttttgcaaacatggcctccaggatgagaaaattagtgggggggaccgtctggtggcacttcttcttgttgtcctaaggccaaggtgacttggacagctagatcttctgatgtgattcagtccatcctacctcctcgtcctctagagcctattctagccaaccagccagtagttgtggaccctcactcgaggtgcactccactccctcgtaggccgttaggcaaaggggcccagaggcctagtcgggcagcatgttcgtccaagggtgagaaggtgatttaggttgcgtagaactactttggcaaaaattttctaagtgttgatgaggagctccaggagctagatgttgagactctagattacttggcttccaacactctcagagacttttaaactgtaagttttttatttgtttaactctttgtatgcaagacttgtgtacaagcttttctaacgttatttgtctttgattttagggtatgctgaagctcatccaagctcacgctcgagccaagggctgtgatgcaggtctcaaggaaaaactttagggccaaaagttgaacttaagacagagaaggatgcccgtacaaaggtacaagctgacctcaatgacgcattaaattgcttgagtgaggttcaggaccaatgtgatggccttaacgaattgcttagcctctacaaccaagaagtgcccaggttgacttctaagacagcaaggtagagaaaggaccttgacaagaagtgcaaggagaaataggcagcccttgatgggcaacatgccttcaaggatgagtaccttggattatcctcagaggtttttcaccattctgctagagttcacttcaatgagggagggatctttatgagggtagatttctagcagagcaggccaatcaggatgttgagatgatggtcagccagaccatggatgtaccgaccgaccaacttgagaagactattaccggtcagcctatggaggaagtggctggccatcttgatgatgtagaggccagctagcctattggagtttaggctacagagcctccttcagaggctccacttgcccaggctgatgctgctgtctagggtccaacaagtctagatccacctactcttcccattactcttgatgacatttagaaacttttgttagtcttttatgtttttatcttgcattattatcatgttcttgtatggcctataggccttttactttataacaatatttgtatattgcctcaaagtctgttactttagatagatgatcggctagggagtctttaatcctagcattacctttttttgttagacatataagtgtttggacttactttttcatttgatccttgtacggtgtgggtgccccccatgtgatcaagcatacttatggtctcttggccacttacaattcaccaagtactatagacctttgtctgtctattttcatggtgggacttatttgtacacatgcgaaacttaaaataaagattaactttaagaagttatcttgttagcaagttgtttgacgcactattgaattgaaaaatcatttttattcattaattgttcttaaatatctatggttgttctgcaacatacatttattaattctaaaagcttacaaaataaaaagtctacttctagactcatgttatggctacccgtactcgacgtgccaggcaggggccacaattaaagagtgatgcatacttagctctttctaaactaactcttataagtgagttgacaaaactactacttaagagtagagttcttacaaattgctcatagctagtacgttctgagatgttctccattctaatatctttgtaggagaactaactccatgtactcattatacatgccaagcttgtatgcacctttgctttttatctccataacttggtacgagctttcccatttttgcccaaacactcatgcaacatgatctttgttattccagaacactcttcagagctaggggtgagcaaaaaatctaagaaattgaccaaaccgagtaaaccgaccgtcaaaaacaccgaaaaaactgacaccgaaaaaacagaaaaccgaaaaaaccgccttcgattaaaaccgccttaacatggtcgattttagtgtcaat

SEQ ID NO: 37146 - DNA, 4030 bp, Cannabis sativa
  modified_base (3971)..(3979): a, c, t, g, unknown or other
aaaatacagtatctattttgtcatttaacaaaatatagggtccaattaataacttttgtaaaacagatggtccaaaatggtatttacccttattattttatagagtgcattggtgcaaatataactctccgtttataaatattgtggacccaacgcgaaaggtaatgtgtcaccacctctttggcttcttcaacaaaataccaaaccatacccatatttgtattctcacaactgcccatgctatcgagtatcggcatacttaatttggacattttggtaatttactatttatttttggaaaaaattgcccaagaaatttgttgttccattccatttagcatctaaatataaataaatcaaaaagaaacacagtgttcacgcgctttaaaaggactggagcttcagtggtccacactagattgggcccaacaagaaattaattggatttttcagaaaacaaaattctttaatggtccccaaatattcaacacgttttgccactgtcaactcacgtggcaaaataatctccacttttctatttttcgtaaaattaaaattggtgttactgtcacacaatttagtggctaatgctaagcatatcataaaataaacttggattctactaccaacttttatcttaaaatggttacttgtggtaaccaactaaccacccatttattattattccccaacttgatgtgtttgcaccttaattttatatataattatcacaccataagcttattttgatatgattgtgtttgttggatatttcagttagaaattgaaatttggaacttgggatgatttcttgtgttagctatagtactagtaaatatgtctttggtgtaggttgacatcggaaaataattagtttattatgcaattacatatatatatttgagaagaagtaaaaatatatgatttatttttgtatttttacaattcattaataatttaaaagtttcattttgacccttacaaaaaatttaaaagtttcatttcgacacaattattttattattgttattattatttgtggtttattattgaacttaactcaaactgacctctcaatcttatcttattatttagttgtagtttcatattttgtttttttttttttttattttttccttttgaagtggatcaaatgcaacagactttataagttcaggaaaagggtctatcttgcaaagatctcaagtattctcaacaatggtttatatatatagagtatttctagtgtggagattgttagagtttcttgccattgatgaacacgaaaacaagaaagaagaagagaagcgaagaaaagagaaaacagattattgaaagagtatgaaaagattgtattgataaaaagagattgatacatgttcaatacaataacaagttgtaactagaaaataaaagaatggataaactagctacattgaactaactaagaccaacaaactcctaacacacatctaaccaccaacttttaattttaatatcttctctcgaactcataattgaccaatcctcaattttgagtttgtgtctgaagttagcaaacttcagacctaaaattgccttagttagtccatttgccaaatgatcataggttgacacatgcttgatctgaaccattttgttgagcacctttcctctaacgaagtacaaatcaagttcgatgtgttttgttcttgcatgtagaattggattttgtgtaagcatgattatactcaagttgtcacaccaaatggtaagggattgagatagttgaagcctaagttcagagaataagtagtacagccaagttaactctacaatgatattggcaacactcctatattcagcttcagtactcgatcgtgagatggtttgttgctttttacttttccaagccatcagattggagccaaagaagatagcaaagcctgttgttgatcatctatcatcgagatgaaatgcccaatctgcatcacaataagccacaagatcaaagagtttagattttttacaagtgatgaccaaactctgaagtgccatttatatatctaagaattcgtttgacaaccaatcaatgagagctcaaaggtttttgcataaactgacaaaccttattgacaataattgataatatggtcatgtgatggtaaaatattgtaatgttcaaatgattgatcgatataattgaacatcatctagtggttctccctgttgagctaacaaacgaatgaaactagtcattgtagtaggagatggtttagcatcaaccattttagctttcattagaatatctctggcatatttagcttgagaaagatgaatcccagagtcagtgtatttcacctcaattcctaaaaagtagctcagaggctcgagatctttgagagcaaatagatcattgagagctgagatgatatttgttactgtagtttgatcactccctattattataatatgagcaacatacaccaaaattagagtaaaataattggatgaatgttgaataaagagagaatgaccagacttagaagaagtaaatccaagagtgtacaagttgttctgaagtttttcaaatcatgctctaggagcttgcttaagccgatagagtgcattttcatatcaaatttatttttccaggggcttcaaaacttgaaggttggaccatgtaaacctcttcttgcaattgcccattgagaaaagcattattaacatcaagctgtcgtatgagctaacattttgacaaagtgagtgtcaaaactactctaattgtgattggtttaatcactggactgaaagtcttagtaaagttaaatctaagttcttaatgaaatccctttgcaacaagccttactttgtgtttgtgaatagttccaactagattttctttaatcctatacacccacttgcaaccaataacctttcttcctatagggagtttgacgagagtataggtttttttttttttttttctaaccaaggctagaacttcatcgctcatagctttattccaaacaatttggttaagagcctctttaagagacgatggttccctagtagccaaaaaagctttgggtttgtgtatgccaaattttgatctagtgtgcatgtggtgtttgttacactggtctgaggctgtttgacaccttgtgactgcaataattggagattttgagatagcaacacttgtagggatagtgttagcagtagcatcaacatgaagagaatgatcgatggcagcatctgcaacaacagggtgattagtagcagtatctgtagcaccgtagtgattactagcaggttcagatgcttgaggtaagtaagcttcttgtgaactaagagacaagtcaaatatacttgtagaatcaaaactgcatggtactaatggtgaggtgtgctgagaatcaagtaggggtgttcatccaatcaaatccgcactattttgttcatagtgcatccgatccacactaagtgcggatttcattttttttggatctaatccaatccgcacaatagctcaaatccaatctaatccaatctgtaaaagtgcggattgaatcggttattttggattagttactttttaatattaaattatttaatatttttgaaaaaaaatatttttttacataaactagcaataaaataaaataaattatagttattttatgtctccaataacatattaaaataaataaaataacaaataacaaagtcaaaggaagaaaaaaaattgtatgtataaagaaacatttaattttattttaaattgtatgtagaaaaaaaaaatataagaataaaatagacatttgatttataaagttttaaaatataattacacaatattatatgtattagacttttaaagtactattttatctttacataaaaatattatttgtacataaaattttttattttttatttctaaatatatgtgtggattgaattcgatcggttacttttacatgtcaatnnnnnnnnnatccgcacaagtgcggattttgaatttttcaatccaatccaatccgcacaa

SEQ ID NO: 37147 - DNA, 4281 bp, Cannabis sativa
ttttttatcttcttaaggaaagaggagaccttcaactgtaagaagattgacttgactcacttctctttcttggattcacccaatggactgcgataacgacaagtaaaatcccttttcttcttttttggtttttcatatctatgatcggttttcgtatctgggttttgctcagaaatggttttttttttattatttattattgttattggttgttgtggtttactgtctgtacttgattctttgtggtttgtgtatctttggttttggtttgtattttgagttttttttagttaaatgtgtgaagatggtttggagtgtttggacttattctgcagatttatggagaatgagtgtgaatgaatgggttatgtatggattatgattacccttttaataagcaattttttgtagcattgcccttttaatttttttatttttcttcttcattttggaaatgtcagtactggatccaattttccactgctaatttttctatcttttttgttatatatctaatttcttatttatttgtgtgctttaattacctgagaatgagatggctggttcttcaccactgaatagttatctattttggtgatggttttcattgtttttgcttattgtgtttgatgttgaatttaagcccttttcattttgtaagattcaccaggtgaagacatatataacagaaagaaatgcagtagcagtagctgcaactcacgattcaatgagctatatttgtagtttaggttctgagttttgtgttatgctctttgtcttgtcctttttaattggctatggctttcatttattttgtttttctacttgttttctttattaaactgtttgttttctcatattatgatgtaaattgggcagaagtgagcaatggagttgggaaaaggatattcatttccaaaaggatccgaattacggtatgttacacaatgtggcttgaaaacttactaaatttcaacatactttggaagatatcggattttgtgtttaactattttataatgtgactgatgaacagtcatgtctgaaggcctttggaatggagtggctcaaaatggagaagatatttcttatatgtttgatgaggaagcaaccccagttaaggcctgtatggatttggaataccacggtgaccacaacggtaaatatctatgctttttggttttcttccacaatgtgtattgacatttaattgcaactaaatgcccccatatatgctcttttaatgttggtaagtgcatgtcagataatttgaacaaggaagttgaaaaggagtcattttcacaaatgaagaggcgccggatgctacaatttaccaacgaagacatggataattcccttctctgtgatgagatttcatcggtcttccttaactcaaatgtttgttgacattatccctctgctatggattgctattttgaaagcattttacaatgtttgaaagcaatatgtgaaagtataatgaactttataaaacacgagttactacaccgagccatttttgatcttgaacatataaattgaatacaatataatgctctcttcatttgtattgaaatagttttcatctcagactgaagtcggtgttaccacttgtgatttacagttttcttacgtgcttatttgtggtgtatgatgccctagtgtttctaaaatgttaaacaagtcaagtttcaagattttcgtggaaattatgccttctatttgtttaaagagattttttaggacacaaactgcatgtttttggttcctcctataagtttgtctcatctttttctgctctttaggaaattgattccctcgaggaggctctaccctctgtttccgattggatgtctggattcacaggtttttttttcttttctttctgaatgctattccgatataatatgtacaaattgtttatattagattttcaacatctagtgtaacttatttcagaagagacatctgcgtctgcctctggatatgagacactggatcattcgtcggatgaatggattacagactgccttaatgatagttcgatgcatttgagctccgatactttgtatgcttctttctttggatcttgtttggatgtttttcctttccttggcctaaatcttgtatgcatggtttgataaaactacttctaactataatgatggctgtgttatgtgaaattcaggaatacttctggcacatctgattttcaaattaatgtctcaggtacatgacactttgtcttctctttcaacttgtacctaaattcctttactattcttttccagtctgcatttatctcgtaaatggctctcatgtgtacttggttttgatgttgcagagttttgtgagactgcaccagagtatgaaaataacttgcctcaacagcctgtttctactccacaaaagatagttatcaaaggtatgtccttgttcttgatatttctcttgttgtcttatttttctgtaacgaaaatctgtttgcacaccgcctaggaagtattggtcatgaaagaaattcataatgtcattgtcattagatttatgttcttgattgttgcaaatagaaggaactaatatttagatggtttgttttcatgtaccttaggtagaaagtctttcatccgaactccaactaagctggctacttcagtggcatacccgtttgcctttattaaaccctcaggtgcccatggagatgtaactctgaaggatataaaccagagaatccgaactccaccacctttaaagtcaaagaaaacgtacgaagatccaaccattccttaccccacttcagccttttccggtaagcctgttgttggaaagactaagattcgtaccgaaggaggaagaggtagcatcacaattatgagaacaaaaggctaagcagaggtagataaatgttctttaactttcttttttgcggcaacctttgccttacccctccactaaaattattggggttgagtttttattccagggcagtcaggtataggagttttctagtgcaattttttgttggagttggttttgcaaatgcgtaaacgaccaactccgtttatgcaactaagtgatgtattaggtgtcttaagtagctgttattattttttacatgttatgacttttgagtaagtatgaatctctatgcctagtagatcctatttactctgttttgtaaaaagaacattgataccgtgcgcgctctcccggccgcggccgggcccttaattcctaaatataatccttatgtattggagttattatatgtatatgaaaagttgtacttgagagatgagatggaagaaaatgcaacatagacatgagttaattgtttacatgcatgttttggtaatacttttacttattgtttggtatgttatgatatgcactttagtgcaatatttaggggactcatactgtctggtaatttgttcaaaatttcaacattttattacaacttttttctcaacttctgcgttcggaaagatatgccgaaatatttcttttattgtcgtggtcgttatagttatgttacttctttaaacctttttaaaattctaaataatttacaatatcgattcatgatatttcaaatttaaacttgttttcgacactcaaataatgaaaattgctatagaaaaaaaatataataaattccacatgtattttgggatttgaatgtaggttgtaaaagtagatgatttatttttcattcacacactaaaatagtgcaaaatttataaggtgtagtcacatcttattttcatctgagctaaaagttattaccttaagaacccataccattgatgttgagagaacaatgaaaatgattatagaagtgtagaagaagcaaactaagtatgaatgatatgatacccttttttagttgttgattttttttcttctttataacaaagaaaaaggtcaatagtgagtgaataggatgatactatacttttttttgttggtatacataccgacagaatgcattggagaccttggtgtggtcttagtagtcctacctagtcctagggaatgctaacaaaatttcagggcatgcttgattttgtggcagcctttaaatttaaagcaaaagattttgtggtatctagtcttcttcacatgccctattatcctactttcaatgcttattagtatttttattttctactcctcataatttacacttttttcttaaggaaaaataagttgttaaaagtagtgggaaaaagtgacaaagaagatgaaatggtggttttttttttattactaaatgat

SEQ ID NO: 37148 - DNA, 3230 bp, Cannabis sativa
attttgtatcacactttataatagcatacattatacatatgtgcccacaataggactttaatccaacatttagagtatgtttgagtctataaagtttttgaacaattccttttaatccattcactgatagaggcttaacccaacttcccttcataacaatatccttgaacttgttatgagccctccacatattgtaaaatctaaaaggctttatgcctaagttcctttgtttgtgagtcttaataaaacagaaccaatgatcagaaatgacatcccaatagaattcacaatcgagttgggaacttcatccacccaatcctcatttggaaaggcatgatcaattttttaatagaccctatctccaccttcttgcttattagaccaagtaaacttagagccaaggctcttaagtgaggccaccttgtttttgagcaatccatgctgtgaaatcattgatttcagtagagctaacaaccttccctccaactctgccatcatggttaaagatatcatttaaattccctactattagctacgtcttaattggtagatgtagcctggagagacctgtccatagctccttccctctcatctagactattaagaccatcaacaaacatgattataaaggagtgctgaacactcatgattctcaccaagcaatgtacaaattgtcggtgttcgtacaatatctggtcctcaacaaaagattttagccaaataacaataatacgtttcttagtaacactactagaatgatgatcccaaccaaggaacaccttattcatcatgtcatctattttagaaccctgcattttattttccagcaaagcacccacatcaaccttattaatcttcaagagactcaggatattacactgcttatcccttttattcattcctctgacattccaacccattatgttggagcaatccatcaacattagactgagaagcttcccttttttaacacctttcccttgttcttgaagaacattaaacccattgtgaactttagtaagaactgtcagcactaacttcccatttgtctttgaaatcccaactttcttggggacttcccaattatctttgttaacttgccctggagtagatttagccatctgcttattctccttctctacaccatcttctaacctaaatgaaaccttgactaacaacgaatcccctgctgtagtcaaagcctctgaaaccagcatagtatcattctttttcagcaggcatatcttcttacaaacttttcttgatccacacttcttggcttgttgtcttgcaattatccatgctatgtccatatcccttgcaaatattgtacttaatggggagccactcatattcaacgaatcgttcttgaattcggcctttctcattctcgaagtaaatgatggacatgggatcatctgttatcaccatttcaactagaactctagcaaattcaatcatagatcttttcttagttactgtccaccataattagtttcctaatggtgctcaccaaatcactcatgcaattttggccccaatattggaaacctatgttaggtaatctaatccaaagagaaactaatcgaactaacctaacagtatccaaatcttgtgtccaaggatgcactatgacatgtttcttatcaaattgcaccacaccagtttccagaaccaagtcttgagtagcctcatcatggaacttcactataatgagacccatgttcattctcaccacacgttcaattcctagatgaccccaaattctcttgacaaaacctttaaatatagtaaatgggggattgacacccataaccatacaaattacagtagtactccagttttgagcttgttcaaccacttttattaaatcaattttagctacacgcttaccgaatttcaacatcggttcctcatagtgaagtttgataactgcccttatttgttggctccccttgagctttgcccaatgcttttgagctgaggattgatagtcttctttctctgcatcctcaacctagcttgaattcagtatctcgatctcagagttcttagaatcactactgattgatttcccagcagacttcatcaatggttgttctatcgactctgatttctccaccaattgcatatctgtattctcaagtatcatcgctccttcctggatctctttggcatcttctgtcataggtgaaacattctagtttaaatggggctccttgatcttggatcgtgatacaggcattcgagtgattttcttcttcttcatcgagagagaagaaagctcctatgcaagccttttctaatttatttttaatttttagcatttctcttttgctataggtttaaagaaagaaaaacgtatataacaataagcctatgtttagggcccacctaatttaggagcccaaaataaatttctttttaaaaatacacattttttaataattttaaaaaataccatactttttctttaaaaaaaataaaagcacaaaaatatttttttttttctaatgccccactaaattttctagttttaacttattgtttgatttcttgtaaaggtaaagttaaaatttaattagaatctttcactacaaattataaaataggcttataaatgttaaagcagagatatgataatcaaactttattggtggatataagagtttcacagtattcatataaatacacattatttggtattgtaccacgaactatccaacttaattatcagtaaaagaagactatttttaaggagtagtgctatgcacaaaccaagctcattcacattaattattgtctaattatgagcttgatcatgatgatgatgcacctcctcattgctgcgttctcttttaccaatttatcactgctttaacatccttcttagttgtagaatctgcaccaacaaataaatttataaaaccacaacacagaccaagtcaacaagcttttaactactacttgctatatatgttaaatgtgttcttatactaatactatggtgctttgaatccaacgatcaggttgttaatggttaccaatttgaccactatatatgaatcacttgtggtgtctcctcatattctttctataaaatggagttagttacttaaatagtaagtgattttttttattttggtttctatatataaagtgaccataatgtcttattctgatgtggaaattaaactgtttttaattagggataattttacaaatacaca

SEQ ID NO: 37149 - DNA, 2585 bp, Cannabis sativa
ttcttcttcttcttcttactattattttccatgtttgaattggtgcatttatgtgttgttgtatcataatcactctattgttattccattatgtaggacgattgaaatcggatctgataggttcaagatacccgatatactatttaatccatcccttgttcaggttatctttaatctccttattcccggctagctttttcatattctctgttcactattattactataacgaacacttgattttaatgtacgacaaaattcccagacaattcctggtatggagagttttgcagaaatcgccccttctgttcgtgcattgcctcaaatggtaagtccctgacctgtatctatttttttccttttaaatttctaaaattaccctttttttcgaagataaagaaagatctcttatttttgtttcaggttatagaaagtatcaacaagtgtgatgtagacattcgtagagagctattcagtagcattctggtaaattgtcattttattttctttccctttggcattataaatgcattatattgtttttcggtgtaatgtggtacgtttgattacaaaagctccttactttgttggatgctatatgggttatgattatcttttgaatatatttttcggaacagatttgattttgctgttttctatgctcaacagctttctggtggcacagcatcaatgcaacagttgaaagaacggctcgagaaagatctgctcgaggtatttctaatttcttttccttcataatttcatagttagatgtgggactagcttaagatgaatcataacttaatgatcttacaatgtttggctaaattgtctatttgagagctctattattaaatatgagaattgctttgtaatgaaagaaaaatgcccgattctcagctacgcatagtctaatgttttcttcgatatttaggaatctcctcaagctgctagagttaaagtcttggcaagtggaaatgcaaccgaaaggcgatttaggtaaaccatgtttcctttcataaccgaaagacttcatgttatgtctttgaaattaatgttattattatcactaaccgttgtcgttcgttcttttccagtgtgtggataggagggagtatattggcttcgctcggctcgtttcagcaaatgtggttctctaaatccgagtaagtttcgctacttcattttgttttttgacttattgatcactgcacttataattgtgttaaattgaaagttcattcattaattttagagtaatttgcagcatgaatacttatgattatttttgacagggtaataatatataaattatatttttgaatcttccgtagttacctgacagttaagtgtcaagtcaatattcacgtggcagtctctgattggtccagatcattaagtttttattttttatttaaacattaatttaaatacactaataaaaaatgacacgtggataataacttgacacttaacgacctagtacttaataccgttaaaaattaaacttaagtatttatctgcaaccgagagttaaaacttaagtatttatgccgcaaactattcttaattttgaagttactctattgataaatttgatttggatgtactttaaaacaggtatgaagagcatggagcttcttacattcaaagaaaatgcccttaaaagatgaaacacaaggtttcttcctccttcttcgattcgactttgcttcgctttctgattgaaccacccctctaatgagctctctctgtgtctttttaacaattgactttcaggtcaaaccttatgctggaactaacttcttggctagcattgttaaagctttgtgtatttaggtagatatgattatgattatgataagattgtatttgatttgtacctttggtacaatgcttatttatttatcccttcaatttttaaactaaaaaatttctcaatgttaaagttattttacattttattatgttgtgcggtgcataaaattatcatggttggtagaaatgaaatgatttcattaacttatgttgttgcttcacttagttgtgttaaggctttgaattttatggatcatttttatgtacatgaaagaaaaagggttaaattttggtgtttttttttatgggaatatatttatttagtattttgtgtttttatgaaaaatatatttggtatcttgtgtttttaataatacttaattggtatctcatatttttaaattgtacatatttggcgctaaagtaaaatttaatcaatataattttatcaaatcaactaaatagatctcggatatatgtaattaaataattaaatttgaatttctaaatttataaaattataaatagtttaattgtattgataatttttttttttttgactttagtaacaaatatatttgtatgattttaaaatataaagtatcaaataaatattattaaaaatacaacttacttaacttgtatttataaacacagtaatcataatcacaatagcacaaacttagaagggtagatatgtttattgtctagtacataaaataattaacatatttaaatattaactattaattttttggccttttttt

SEQ ID NO: 37150 - DNA, 1796 bp, Cannabis sativa
gagacacaaccagaaagagccaaaggaagagtatacatcatacttgtagtctgaataagaatcccagtagcagcaacagccaatgttggattatccaaataaccagccaatacagtcacaatctcataccaccaccactctaaacaaattcccaaacaacttggtacagccaatctaagcaacccaccaatccccatacaaacttccttaaaacccccaaacaacctcaccatctcccaccctccaccccaccccaaataccaccctcccatcaacaacaccatgttcaaatttgtcatcaccgacgccgccgccactcctcccacccccaaccccatcttcttcaccatcaccacattcagcggcgcgtgtaaaaacaccgccgccatcgtacaatacatcattggtttaactgcttcttgtgaacggaggaacactctcagcggttgtaacaaactgtttgtgaaaaggtctgggagagagtaaaaacagtatgttgctgccattgatgttatttctctgttttgacccattgagatcattattttttctaggtttaaccataatagagttatgggtatggatgctaaggttaagattagaaccattctttgaaaagagattgctaataaaggttggttttttgtaccgtaagcttggctacagactggttctagacctgtggctaaacccattaagactgagtaacctgttatgttggtgaacccgagtgagagtgttccaccggcgagttcgagtcggccgagttgacccaggaagaagacggagactgctgctctgtaaaagactagtaagttcatacctgttatgggtaaagctaaactccatagctgttttagttcttgtataatctgggaaagagttgggaattttgtaaaagagaaatcttggtgtttttgttccatgtttgatgaaacagttgaaagaagaagaaaggtttgatttttgggaaaatggtgttgaaaatttgaagaggcagagagagttgaaagcgaaagaagtgagtaaagacggctctaggaatagtaggattactctgcaactgcaaacatggtttttgggcacactttattatatatatatatatatatatatatataaatgctaaaaggtagcgttggcaagcatcaatattgttataatttaatataataatttttagagagtatagctagtcaaatcgtaaatgaatacatttcgaaagtgataaataccgctagtgtctaataagaatactatatgtatatatataaacaaagagcattcatattattatattactatttacttatttttttttcaaaatacagtttcacgtatatatattcagtattatatttaaattttattattattttaatttatttataattgataaatatatattaataataataataataaatattaaatgttttcggggattagtttatttgtatttatatgaattttgtgtttcttatattatatcgtgtttaaacacatattttttttaatgtatcgtgcttaaattaatatttttttttttttgtgtctagttatacttttactatattaaaaaatttgatcagtatttataatattagccatcctaatataatgctaatatataaattataattaactaataatttttatattaattattaaattaaaataaaatacttggcacggtgtctccttaggattttgtttatataaatatatattaatttcttttatattttaattaaataaaataaaaacattagagatatgtatgaagatggatggaa

SEQ ID NO: 37151 - DNA, 1935 bp, Cannabis sativa
tctctctctctctctatttatctaattttgttaagagaggagtatagttcttcaaagttcaaacctttggagtttggatattttctggtgagtaataatttttttaatcaagttttcatttttctttatgggttttgcttgattttggtatttgtgtaaatgggttttattttattttttgttaatttttgtgctatgaaatcttttttgaagttaaagcttctgcttttttaatttgcaattttcttgatttaataatgtaatgattgctttgtgtttgtaaaaatgcataaaagaacttactgttgtttttgttctgttcttttgtgattctaagctcttaaaactgatacatctgtatatatgtatatataattttggtatgaacaggttaattaatgggtctatccctttcagtactgatatcaccatggagtgaaatcttaaagaatgagttttttggtttgaaagacacatttggaacaatcatagtgaaagaaaattcagagactttaatgagaaagaagagcttagaaagatcaccaagtctcaaaactaaaacaaaggttgaaatggttgataaacttgacagattggtgattgaaaaaaccaatcaaaaacagattgaaaagcccaagattttggtgccacaacagacagattttgtgttctcaagtccaagaccagttagtgagcttgatgctgctgcaactaaggttcaaaaagtttacaagagttataggactagaagaaatcttgctgattgtgcggttgtggttgaagaactctggtttgtcttttctctaactctttaatttctttcgtaaatactattttgcactctgtcgtcttaatttttttcaacctgaaatcaaattttagcacgaatagatgtaaatagtttcacgagacttgtcatagtacctttaaataaagtctaatcgataatttttgtaaaacagagtttaaaaaagcactagttaaagtatttgtaagctagtttctagtacgaatagatgtaaagaatttggccaattcggtttaagtatttgtgtttggtgtgtttttttcgttaacctgaagctagtttctagtaagaatagatgttaagaatttaatcgataacttttgtaagatagagaggttgaaaatagtgtttaatcttattattactattatttattggttttaaactaactagagttgcttgtgtttggtgtgtggttttgtaggtggaaagctttggattttgcagcacttaaaagaagttcagtgtcttttttcaacattgagaaaccagagacagccatttctagatgggcacgagccaggactagagctgcaaaggtttatacatatactcataccctttacttaatgatgttttgtacatgttcttgctaataagtacatcaaaccaaacatgtattactggtgtcttttagcatttttctttactataatacgtgcaatttatttattgataaaataaatggacaaaattgtttatatgaattattctttttataacattgtgtataggttgggaaaggcttatctaaagatgagaaagctcaaaaactagctttacaacactggcttgaagctgtaagttctttcttcacacacatatatatatatataaatagtagtaggtgttcacatcaattatttttttttatcacatcaattattgattgttagttcttgacttttctctctcatatggggtcccaaattttttatcatcatcatcattattattattaatatttagcacagactgcacagttcaataatgaattgattttgtaatgattttttcttttatagattgatccacgtcatcggtacggacacaatcttcatttctactatgatatttggtcagatagcaagagcacacaaccattcttttactggtatatatttata

SEQ ID NO: 37152 - DNA, 2426 bp, Cannabis sativa
atggtaactgtgttttattcaggtttgggaaaaaggcggtgtgggtgttgtgtggggggttgatgaggagagaatggaagcaaggatttttggatgagaactgtttctccagatttcttttgattctcacatgtatcttttctttttgatgtgaggaaatattattaacataagaaagaatattaaaaaagatgacaaactatcatttttggttacagagtactaagacatgaacttaatttgcagttacacccttagtcacatggtaaatcagaaaaagaaaagtcgttatcgactttgtacttaaagatccattattctatggactgaattgtatgcctttatttacatgaaatctatctacttcagtgcataggattatgcattgtactttgtatttcatcattactaatttcatctcttataaaaagttaagaagcataaatactataagtatattgaaaagaataaaatactagcatctgtatgcacacagcacaagtattgcttaatgcttttgctcacatcagtcattaactcaatgtcattcatacctttaacttcttacttttcaatgtgtacatgccactcttttaaatatgtgtatgtgtcactctgtcagttctgatcataaacttctgagacttttgaatcacatgtagataggtatatctatagtgcaagtaggtcattaagataatgttaaggcatgttccccgtttcttatgcccacttggaaataagtattgccatcctcaactttcagcattgcaccaaatattcttttaggtttttatttctcacattttcctttttcccttgcagatcaataatggaatggcacatctagaggctttgttggaaccgttgcttgatctttgtatccttgaaagtgtgagttggagaattctcaattttcacttgtctcgaatgaaaatgaccttgctgaaaattctcattaatgcttgtagtgttagtgtcactgctattgtttatttttgaatcttgattaacttatttggttttattctttttgtttagttttactttttcacaagctgctgatttctagtctgtttatgttgcaggttatcattgttaatagatctcttcgtatacttcatatgtttctcaaggaccttttgagctttgaaaggaaatttggagataggtactgctatttttttgctcaagtgggttaagttttaaatttactttgatattgtaaaatttggtgaatgaattgtatgttttattcaataaaatagtatgtatttatatacaaaattggatagagtaaataggaaactagctaaattagagagactaaataggaaactaactaaatacaattaatatagctaatatattagaatactccccctcaagctagagcataaatgtttcatgcccagcttgttacaaagataatcaacccgcatcccattcaaagtctttgtgaaaatatctcttaattgttctccggtcttcacatatcctgtggagatcagaccttgttaaattttttcacgaacaaaatgactatcaatctcaatgtgcttagttcgctcgtaaaacacaagatttgtggcaatctaaagagcaacttgattatcacactacaattttgttagaatttaagttttaaacctgaattcagtcgaaagctgataaatccatactatctcacacacagactgtgtcatagttctatattctaattctacgttggatctaaacacaatattttgtttcttactctttcaagagatcaaattgcccccaacaaatacatagtaacttgaagtggatcgtctatctaccttagagccagcctgagaaacactcaatctgggtgtgtccatgatccttgtaaacaatatttcgtcctagtgctcctttcaagtaacacaaaatttgctctaatgctgcctaatgatgaattgttggagaaaacataaactgactaacaatactaattgagattgcaatatctagacaagtcacatttagataatttaacttttcaaccaatttgcgatacttctcaggatcttcaaatggttccccatcatgtgtaagatgtacagcgggattcattggagtactataatgttttgctcccaattttcctgtctcaattaacaaatcaagtacatactttttttgagatagaaaaataccttatttactctgagtaacttcaactcccaataaatcctatgtgtaaaactgggtataatgaaagacttaagggatgagatgcctccagtatcattttcagtaatagcgatgtcatccacatacacaactaacaaattgatactagcagttgatcttttatagaacacagttggatctaacttacttttcaacaaaccaaatttctcaatagcacgattaaatttaccaaaccaagcacgggg

SEQ ID NO: 37153 - DNA, 5340 bp, Cannabis sativa
  modified_base (4155)..(4167): a, c, t, g, unknown or other
ctgaacaggagtgagcccgagctgagatgaggttgtacatgtcatggcggcgcgacttggagtgttcggtcttgggacatctagggttgtcaatttgtagttgttgtgcgacctgacatctgtattttggattatattgtaaaaggtttaaaaacgggatcccgacttcgtatatctttatgtaaagttataaagtttaatatttaatataggagttttattttgacacgattttcaaagaaagttctttgattagcaaagatagcactgtaattgaaaaatcactgtagctagccttagcattagggcgttaaaaacacccaagccaaagatgctctatttgagtgtcaaaaaatgttacaaaataaacctctaaaccaggagttgtagttaatggaatgtgaagccacgactaaatatgctttcactcataaagcatagtgctctttcatgcaacaaaagtctaaggttaattggatcatagaaggagatgtaaactcttcctctttcatttaagtatccgagaaagaagagcatagaactagatttattcgattaaaaacactccaagagttagaatcgaaaaagccaaaagtagtaactaatgtattcgtgaattactacaagcacttattaagaacttgactggaaggaaggagataagtattacgagccatagtcaagaaaggctagttgctatctgaacagcaggcaaacattcctatggttgtgtacactaaagaagatattaacaagcaatgcttaatattctagggattaaagtgcaagggttggatgggtatactagttccttctttcaagataattgagacctaattgaagataatatttgtgaagtaatttaatcttgtatgcactcgagacatctccacaaggaaataaactctacaatcttaacacttattccaaaaactaagtgtccaaatactttaagtggcttccatcttcttgtatgttgttatgtgatttataaagtggccacaaagctcatatgttctcgactgtagcatattttacctgagctagttgcacagaaccaaggaggtttcataaaaggaaagtttataactcacaatataatgatctgacctagtgagacactatggtataaaatcatcaaagtctaattgcatgatcaagcttgacctttaaaaggtatctgataccatagagtggggattcattgaagagatattgcaagaactcaactttgcaacaaagttcatcaatttaataataacttgtgtgctaacactaagattatcgattatgtttaatggatcaatgcatggtttttttaggccaagcggggcttgagacaaggagatcccatatcgcctctactctttgtgtatcttaccagaatattgcaatagataagccttaaagatgactttggttaccatgaaagatgtgaagacttaagattgaatcacctaagccttactgataatgtgctcctattttgtaatggttactttaaaattatctattatatgttacaaggccttaaattattctcaaacacctctagtttgcagcctaataaaacaaagtcaacagtcaattgtagtgcaatggatgaaagggaaattcaaagaataattgctgtgtctagttttagcaggagtgaagtaccttttaagtacatttgtattcctatatgcacgaagagaattttagcaacaaaatgtaaagttcttgttgagaaaatgactgcctgagtgagagcttagagtaccaaaaacctttcatttgctggctaagtggtattagttaatttggttcctctcgcgatacattcttattggagccaaattatgctatttataaagaagaccattgcaataatagagattatatgtcaagctttcttatggaaaggccaagcaacagtcttggatccatgagtagttgcatggaacacactgtgtaagttaaaaacaactagggagatttgctttagtgtcattttaaactggaatgcttaaatgggtaaatattatcaacttacaagatgaagattggtgaaaatacaggctaatgctcaaagtacttggtattgaaggaaaattgtcgagatcaaaaacaaggttagtcaacttacagatccaaagtatcgaactgcaaatggtgacaagatactttgtccagctcaagataaggtaagatggtgcaaagaattttggtgtagatatagtacacttaaaataatattttgttatgtggattgctattcaaaataggttaaaaatcaaacaaaggctacatcggttcaatataattgataactccacatgtttattgtgtggaacacatgaggaaacggttcaacacctcttttttgagtgtgatttcactcttgaatgtttggacctagtgaagagctggctaaagtggaaagcttgtataagctcgttacacaggctgcttagacggattgagaaagcaaaaataggagtgtttaagaagtaggttttttgagtagctttaacatgtttagtttaccatgtttggcgactctgcaatgaaaagctttagatgtcaacagattagaagtcagattgattagtatataacgttaaaggagttaccaaggatagaataacttgtgtaatggttaaaatgataaccgagaaagagttagattggtttgagatattgtaaaaaaaaaggaaatcataacaggttgatttggaatgtatggggatgagttatataattgtataatgatttgaggtttgttgacaagttctcattagtttgtaaaaattattttttagagtaattaatattcagtttgttcataaaaaaattataatttatcacaactaaatatatttttagttgcaacaaattttgtgtatgtatttttttagttacaacaaatcaatggatagtacttagtgtatcggtaagcaaattatgaaatgaatttaaggaatttcaacaaacataattattatgtttattttaaaacattataatttaaatttaaactcagtatataaatctcttttattttttatcttatatcaaatgtggcgatataacataaagcaattttttgttttaacatttcaattcaaatttaaactcattacacacatctaaaaatatattttattattatttttttactcaacccatgtatctaaaaaaaaatatctttctattattattttttttaataaataaaatagaaaaagtgtttatattttttaaagaactgcaataccgctacctattacagttactaaaataatatctttctattattattttctaaaaaaaagttgggaaattacctcaaatactatttatttaacttttttttttcaaatttacggtttgagttttaaaagtggttgcagcactagttgcaataggggtttctatacgatttttttgtggcaatttaagttgcagcgttagttgcaatagggatttctatgtataaaaatacaaattttgaagtataaaaatgaaaaaaccccaaaaaagtttatgatatttctatgaaaataaaaaaaatattataaaattaaaagtattatggtcaaactaaaattataattaacaacaaattttgaatattatcatgtaataaatagcacataaattaaatattttttaatatgatgttatttatgaatagcattaagaaaaactaaaataaatgtaaccaaaataaaaaactaagaatttaactaagtacatgtgcatttcatgtaatattgttagattttaactcgaattatttatttctttattaatttatctatatttattaagttacaatttctctttgagtaattattaattgtgagaaaaaaagaaaatcttagtggctaagttttgatgagtcttcttaagtaagttttggaatgtcttggtccccaagttgtcttgaagccaaagttttgtaagtttataaatatgtgttttgtgtgtgagagagaggtatgtgtgtggagaaaataatgagttgtaaaaatagaagtgtgtgttagtttgttgtgtggtaagagtgaggaaaaagcaaatagtgtaaagaccgcttagctttaatttagaaattagcagatacttagggcttaattataaaaattatttattagtattgaattattnnnnnnnnnnnnnttatttgaattcagaatgcacttttatgtcatatatagaaatttcataagttttgcatgttttgtgtctggcaatattggaacgcggtgtttggctattagaatcacatcatagtattttttgtatagtgggactatatagttagacattgcgaatgttgagagtagtcgggattttagagtttcccaaaatacccctaagtgccttttatgcccttttagtgtgggaggggcaaaatgacctgccccataagctttttgtctttagtgagtttatgtaaagtttattaactctgatttttaatgttttcagctgatatttaattaataaaacaaactttttattcatttgaaggaaaattagaaaaaaaaaatatgaaaaagactctctctttctactccctctttctctctctcgaaatccctagaatcaactagggtttggtgtgattctctccatttcaagcaagtttctagaaggattaagggtgtttaagctctaggtaagctcttgactttatcctctttaagtttcttgagttttaagaaattgaatttatgcatgttttgagttattggctgctgtagttgctgctggtgttttgtatgcatttatgtagttagattatgggtagaaatgttgaatttagcatgttttgatggctggtgtattgtttgagcaagtcttgagttttagaactcaagcttagctctttaatggtgtttttcaattctgagcttgggtaattattttgctgcttggaaatattttattggggtgtaatatgcaggtctagaaagtttagctaagtttggaatcgctttggtgagggtttggatttgtttgggtttcctgggtaaaaccggctaaccggttttacaggtgcctgtaaaactgggtaactgatttttgcagcagggttctcgaagaattcaccttgtcgattcgcgttagttttaagtttctggttggttattccctgctagtttacggtattgccatattaagttccagtagataaggttttaatttaaaacctaactgctggttgtgatttagcgagtcacttatccctattgttatggatttgatttaggagcctataattcgccaatcagttgttccactcaagttgatcggcacacctgaattcggaattgaggtaagattagt

SEQ ID NO: 37154 - DNA, 4917 bp, Cannabis sativa
tataaaatatgtttatatcaactgactagtgaccatagttcagttgtcttcctatcagaaacttttctcttcaggtcggttggagctttgaaaacattcatcccttgctaaaaattactttgataataagtttgtttatgattatcacaaactcaatgataggaaaaatttacatccttacattacatttatttatacatggacattctatgcaaccaaaatggttccatagctggagtttgatggagttttataaatcaaagaaattctcatattgataatttgttttgtttaacaagtttaaaggtatttataaaatagttcagtctaaaggtttgttctgagtctcactcaaaagagtcaagaatcagtagcaatagcagtctcctggaacctatgtacagtttactcaaaagtcatgttttcagcctcatgccttatggaatcaaaaagagtagttgataggtaacgttctccgaagcttgggaacaaaacctgcaaagagagtgtagaagaagcaaaaagataatcagtatgcaagttttaaccgatcttggctacttatttaattctatagtatatcactcgagggaaaaatagaacttaccacgatgagtttttcagcattttcgggcctttttgccaacttaatggccgctgcagctgcagcaccagatgagattcctacctgcaaaagaaaatgttaccacaatcagtactagaaagtcaagtctcataaattcatacaataatttgaagtcatcatatatgccataccagcaaaccctcttttaaagcaagctgtttagcggtttcaatagcttcggcagctgatacctgaaatgttgtgatatcagtaaagagctcctaaaccattaaaatactttgtaacaaccaatgcttaaaaagctaatgagttactcaaatggcttcataacttactggaataacctcatcaagtagcttaacatccagaacatctgggacaaaaccaactccaattccttggatggaatgtttccctatgacatgtccgtgggatacatgtctagttagagaatcaataatttaaacaagtacaacttataggccaaagaataggacaacatgcatgagagaaagaaacatcaaaatttctcaagtctctctctctctctctccctctccctcaccctctccccctctctctctctctttattcataaatggcaggctcaagattctaatttattattctatactagtaattggacattgacattcaagcacactaggccattcctcatggctcatgctatactttttatccttaacagttaacaagcacccatattccataaatataagagaaggtaaacaacaatgatgaacaaggaaattgagtgtattatgagttattactcacctggtgatccaccgttcaagattgcactttcaactggctctaccccataaacctataaataaatacatggaagcttaataaaactgataacacttactctctccctccccaaacaaataaaaaataaatctaaactaggcacaagtatgcataaagtatgacaccttgatgtttgggttctgttccttcagaaacttccctacacctgttattgtacccccagtccctatccctgctacaaaggcatcaactttcccgtcagaatctctccatatctcggggccagtggtctcataatgtatctgcataaacaaagataacagaattcaaaaagcctgatcatgaaggcaacatcaaggcccattgtttttgcataataccttcggattggcaggattttcaaattgattgagcatgtaactgttgggggtatcatttagcagctcggagaccttatctaaaaccccttgaaatcccttttcagggtttgtgaggtacaactcagctccgaaagctagaagcacaattcttctttcgacactgtaagaacttggcataactaatttaaccttgtagccctttgctgctgcaatgaacgccaacccaatgccagtgttgccactggtaagctcaacaaggacagtctttaacccacccattgcgcaagcatacccaaccagaaatagatgttagttgagtgttcagaaatttacaaatcaattacataagtggcagtctctcttgcatgaatgagcaaagaaatatacatatgacaaggaatgaacttcacttgaacttgtaagaagatttcatcaacatgacaaaccgtgaaaatgagctctggtcatatcatcctatatgagtggccaactattatcatatctcaagacataaagaatcttcatggctaaccttccctggcgtgattagacccttctcctcagcatcttgaatcatactgtgtgctatcctgaatatcagaacagtgagacaaaatgcattgtaactcaaccaattaaactaaaacaaacccaattgactagaattctcataccaaatacaattaatgcacattaaaaagaaatagaagaaatataatatatctgtgcctgtctttaacactggagcaaggttccatcatttctagctttgcagcaacgcgggctacacagccatccacaacattattgatataaactattggtgtattgccaatcaactacaaaatacgaagagaagatcattagtgaaacggcatacaaagcaaaagaagaatcataagattaagttctgataaagacatattacttcagtaacatctttcttgattctagacttgccctccatgttttttctattccaaacacagtgaattttctcctctctatgctccaattgctagaactgccaaagaccattttgtaaacataaaatgtacaaatggttaaaagacaggaaaataaaaaaggaaggtaaagcatctatcatgaattaactttatcacaagaactgagaggcctcaggacaagtgttaacatctcaatccagtttctaaacaatttgaatcaaagaaaataaagattattcacagagtataataagtagtagagaaagggcacatgaaagtttcaagtacccagtaattgaaacagatttgtgaagatgaacacaccaattcagaatgttttaagaggattttagaactaaaacagtagagagagagagagagagagttaaagtcagttcatacattataaattcaatttgcttcaaatcaaaaaagggaccagtctagtaaacctgacctgaaatgacttaagaactccacatacaggcgataacaacaactatcaactgggtgtggataagcagcttacagtaaaaatctcataccaccctttcgttttctctcaacttgtttcggccacagtggtcaccgcacttattgtgtcgactgagtttagagtgttttggactgctatggcttcttttctaccctcataaacgggtaactctaagttctaaacatttttattttatgagtctaggctgtaaagattataaatcatgacatttttttttttgtttagtgtaagaattgtaatagaatcgttattatcagtttgtttttatttttaaatctttgtaattgttttacattgtaatgttcattacttatttattgtaatccctattatattataaaaccaatgtaatgcgattacattgttagaaaatatctattttgttttttttttattacttttttaaaatttgaaatattaaaaataagaaaactaagaatatttttgtcaatatacaacttattaatttgattacaatgttcattatagagttaaaccaaacatcataattccattcctattacaattcttattctattatattacaattactattcacattatattacatgacatcaaagcaaacaccaccttatatttaaattagaaaacacgcttagcgtgcctttgtattttgtttagtgagatatcaaatttcaatttttttgatatttttttaataatatgagtaattatattttttttatttttattccaaaagtaaatttaaatatagtaaaaaaaattcataacaaccgaaaaagacaacattaataattaataagtgtcaatttattttaccataaatctacctttatagttacatgtcataaagtacttatatatttatatattctcattctcattcataaatatttcgaatgatacaacaatagagatgtatacatatatattaataataagataagatagataaaaaatttacaatcttaaataacaaaaatgcgtatgacaataggagcaaacttgttctctttcatctagttttgattttattttccaagcggctgaatgaaagcgaaagaacttatattgttatgttggtagatatttttgtagtttttttttaaaaaaaaattaaataattattaatcgtgtagcattttttaataataaatatttataaattacaactgatttgattcataaaaaaataattataaattattatttggaaacaattttatagttagaagattatttttaagcatatgatttttcaaaaaatatatacgtatgtatattttttggttgatgatattttactttttttttaaataataattattaacttaaaaaaataattaataaaaaagaaaaaaataaataaaaaggtttaatgagtaggagagaattaacaacaattttattaaattataaataaatatttttatattttaaatttttgtagtcactaattagtaaattataatttaaaagtactatataggttcatagtatttagtgttagacattaattaaaaaatttataaattaaaaatttgtagtttggtatatatagtcaattaatattttttagtcaataagataaaagaaaatattagttcacaataatattaacatatttttttaaggtttctagtatttttttaggctaattaggat

SEQ ID NO: 37155 - DNA, 1651 bp, Cannabis sativa
tatatatatatagatttaattttattaaattttcataaagacttagacgtaaacataatttacttaaattaaagtcgtgataacaattaataatacaaggaatatgactatttcaaacttatattataatcttattaagtgatcattatttgttattattgaattattgattagtgccaataaataataatcatagttttgtaatataagtcttcttttgttcggcttggaaaactttgtagcctcacacataacaattaatgagattcgaattaagcctaaattttcagtcttaatttggaccactaattattagttttgagtatagcatgtagttgtgcctaatttttgcttaattatcaaagagtattaatatatatacatatcatcatctaaataaaaagtcacctatacctatatatataaattagggagaatctacaatacaacacactttttttctatagcgaaaagttcaacatatttatatgtgacttcaatttgtcacttatcttcaaataaaaaaattatcaattgcgtcgaaataaaaaaaatatatacataatatgacgtcataatttctttacaccatattttctatgtcttttcttcacttttactttgttcttctcctctgtcctctattcctttcatttcctataatatttgttttaaatactccaagtgtccaaaaattttagtttgaagcttcattatttcagattaagtgttttttttttttttttttttcattttaaattttttttcttcaagttaataaaatattcattcacaattactttttattcttaactgtgagaatagaacttgtaattaaattgggtcaattatctattttatttctatgaaccctgttagaatagtcgtttcactttttcataaaatatactattttgaaatcatcaatgttgttagctaaaatttgaagttatgatctttgatcgatgtcggattgggcccatattgatatgtaccaacgtacatatcaacatctaatttggtgaagccttctataatctaatacattttgcgaccccttacgaactttcccaaaacaacgtacgatctccccataacaccctaacaatatgtacaatctctcccataagaccctaacaacccatgcaaccctaacaaaaaattgtgcacatacatacttgaaatgaagttcctacaggtggaacacctttccacaaaaaaaaaaaaaaaaagaagtggctcactatgccgaccgatcttttttgtttgctgtacaaataaaatgtaaaattaccatatgaccggtaccaaaacaccctaacactcggtataacctttcccataaaaacctatatgatttcccccataacactccaataaaagcccatgcaaccttgaaagttgtgcaactacattacttgaaaatatatttcttcaagtggaacacatttccaaagaaaaaaaagtggctcactatgcccaccgagcttatactttcctttacaaagtgtaacttcatcacgcaaaaagcacatctaatcacgctacattgacctttgtaaagtgaaaatgggataacttgtaaggtccctgcttcaagcctccattgggtccttccacccacggactcatggctcttatacacgagtac

SEQ ID NO: 37156 - DNA, 4045 bp, Cannabis sativa
  modified_base (3983)..(3991): a, c, t, g, unknown or other
atcaaagttaatattgatggagctgttttcattgatagcaggcattttggctttggttgtgttgctggggattctcttggtgtggttgtggaatgaaagtgtggtaagagagagggtatatttcatccactcttagttcaagctttgagcatcaaggatgcgctaagtttgattaaagatcatggatggacggatgtggtacttgaatctgattgccttactttgggttgtagatttgaacaataacaaaaacatggtctctccttatggctgtgtactttttgattgtaaggctattattaatagctttcgctcttttacttagaattttgtcaagcggtctcctaataaggtggcgcatatgttagcgtaatcttctcgttttgagtcagatcgtagtttttatttgaataatcttcctcgttatgtttcatcctcaagcttggatgatatttcttaataaagcgccgattttattcaaaacaaaaaatgtaaaaagttgttaaacatatttttgagtggcaaaaaaaaaataaataaaagtgatatttattgttgtataaaatttagccccatactaaattttttattaaatttgacacaatttctagtatgtgttaaatttaaattatattatacatcactatttaaaattaattttcttaacatggactaaaaaaatgaaattacactatttttaattttttatagcatttattagacatggtcttaggggtctctggactcccacgaaggacttttttcattaaaaatacacaatgatataattttgccaataacttttacagaatagagagaaacaaaattgaaaagagaaaatgaataatatagacattatcattgcccttattttttggatgctaattataactctttcttgaacagtgttctatatataaaatgttacaagttacaacacctatatattgctgacatgaatttatctagtttctgtaccaataaaagaataagtatacttacctacaatcttttttttttttttttgtatatataatatatggcgtaatattgaatatctcagcataagaaattcatatgtaagtgtcgtgtttgaatttcaatcacaaggaaaagccaacaaactatccaagtaatcactccccaaatcttgaaactcaaacacatcaaagtgatcatcaccattctcatcatgatgatgacttgcctttgatctcctgatagctggctcttgatcattcttcaatttcatcattttacgatcattattgttgatttgattttcccactccctcaatgatctcttcctgcagagcttatcaaaatcatcgttatttctacaatgagtagttgtattcatggtgttattactcttagaagaacaagaataatcaagtcccatagcctttgtaaccgtctcaactggaaagttaaggtaagctttggcgcctctgattctcaaagcggccttatcataagccaaggcagcatcttcagcggtctcaaacgtccctagccaaacccgagccccatttctcgacgagtctcttatctctgcagcgtactttccccatggccgcctcctcactcccctatagtgccttgtggtggccacggccatggcggtcctcttctttgtcctatgatcaacgttgtcattattatcattggcagtagtatttcctgtcgaagggtgctgctgattttgatcattttgaggacacaaattacttgaaggatcaactatgatactgtcaaggagttcttcccaagtctcagctcccattgaaatccacctccctagacttggcagcctttgtagaatttccatcgactcttctttcccatcaagatgaggcaattcgtcccaacttttggatagtatctttccttcatttacttcattgccactgataaaacttgcccaaacgttctctagaatagcttcagatttttgacctctaagtatagccattattctctttaaaaaacaccctcacaaactcttatacgaaaaaagtttatataaatgataaggtcaagtatgcgtaataatctgatgacagctcagatatttggttttttcctaaattatgaataggaacataattggaaacttgtgtttgaattcattagctgaattcatggggaaattttggattggaatgttaagaaaagaggtggggatgcttttgtttataatatccaattttgacttgtgtgcttctagtaatcatttctggggctttctcaatgttgattctatgtacctctaatattttaatttgcataagctttcccttcaattcatctgtaaatacaacataaaaacagatggaatgagtagaatcgaaagctgtgcatggcttcaattataagttggacttttatattgcatatctttgttttaattaactatattggtagttatcttgatcatgacaatttaaatagattattagaatatatatatatctaaattttttattaatattaatatttatgcatataaaaactaatttaaagttggtataagtttttgttttccaaaaaaaaaaatttgtataattttttaaacttagaataaataatattaatatttatatatatttaaattagtgtaaaaaataatattaatatttatatatttataaaattaaacctactaacaccattaaattaattaatagatcaatattcctatattcttaattaattaattatgttaccggtattaattttaactgctaaaaaaaataattaaaaaaatggtcaaataatcacatttaaatcggtgttatcgtgtttatagttgcaatattctgtagatgtgaatgaggttttcgacgggattattcaatattataaattaccaatgattctaaaatttgcttgatttttgagagagagagagagtacatttgatttcttcagagatacattaactaatataacacatatttaaaactaccttttcttgttcccaatggagattccgggtcttaatgttttaaacgtaaaaggtaacattacacctttgatcagacattccattcttcgctggctgcactcaacgcttgagtaaaaacatcatattatagtactagaaatatgtacacgatcaaaatgggatttcatcacaacaaaatgtcatatgaaccatattgtcccattgtcatattattgcaataataatgtttgtatattaaggtagttttccctaacaatgagattaattagacaacttcagttcctaacttaatttcaataatcagacaataactttgaattatatatatgccactttgttggaccaccactaccaattttattttttattaccttcttaagaggttttgaacaaataaagtagccatcacacttatattgagggctattcttaatttttccaatgtgaaatttgggttaataccctaatgctaattgatttttacaaatgaattaaatttttgtcagggctaaaatgcaaaatggtcctaaatctaacaattaagttaataaatgtctctttttataaaaaaatgaacaaaatgtccctttagttaaaattttgatgatgaaattacaattataatcttggataattgaccctagctttctactatcgtgtctagaccatatgatttcttttttctctctcgacacagtatatcatgaaggaaaggaaaaaaataaaagtacattagtttagttttttttttcgtatatttatattttctatggtatattatttttatgtgatatagaatacttgaatgaaaggaagaacgtaaaaactacgaatggaatattagtttaattttctggtatatttaattttgcattgtgatatatctttattatgtactatgatatattaagaaataaaaacttttaagagttgtatagtattttcaatttgtggtataatattttaaagtgtttggtatatgaaaaaaattgaaaggtagtatattagtttnnnnnnnnngtatattattttaatgtcctatggtatataatgaacgaatgacgaaaattaaaa

SEQ ID NO: 37157 - DNA, 1943 bp, Cannabis sativa
aaattcaatattaacaactaaaaaatatataaatcccatggctcagtgtacagccaataaatctttaaatatacatatgcattctacatacctcaagctcattcttagacttgatgggtcctttcaaagcaccatcaccatcttcttcttcatcggcaacatcagtatcactccaagtaaccattgcctcttcatcattgtcgtcatcatcatcatcatcacttttatcatcatcgtgagtctggccaaccatgtctggtgcatcagcatcccttatttcaccttcttctacttcagttacctcattaaacttgctctccgcctttaccttcatattttctttctcttctttttcttttacttcctccttttccacatcattatcgctagaatcatcgtcactagagctgcaaccagaagaagaagaagaagatgatgcagtttcaccctcagactgtgaactttcactctcatccttgtcactcattattttaccctccataccatttccatcctttgtttcactctttatatcatcacttacggttttactttttacagcattttcatccattcctgagttttcagacccacccaccaaagttactttccccatcacctcctcaatcaatgaatttacacttccagacatttcagactcccgttcttccaccttcacagtaaattgagacccacaatcaatcagctcagaaccagcagcaaatggtttagacccaataacatttgagtcagactgatcaataacaggtccttgaacgtcaatttctctgcaagaatctgcttcaagaacaccagtcttaatctttgctccttcagccatatctgggtttgaaatgttgtcaaaccaatcctttatagagtcaaaatcaaggaatgagtcagtaaatgacataatgttgatcaaaggctataaaactttgagatgtcactccaagatgcacttatagaataagaccaactccctgaaagttgcgttagaaactacatattagtatatatatgtacgtgcatataacatcattctttctaaaatggtcatgaggtgtataatgtattacttatgtctaggaaactctatattcccaacaaaactataagaattaacatactaaaatttagatgtatatgtaaataatgtcaagaagaaacaatataaacattatgttatttagttttatatatagaccgcattattacatatagcttttctttctttcattctctttttctttttcttcttctttttatttttttttttttttggtagaaaaacaaaaacataacactaaatctcaaaagatcagttgtcaaaactgaagaaaccgtgaaatcatctaataaatcaaaagcccccttgtatggtaaccccattaaaaaaaaatgaactgaatactgcttaaaatttttaagaacaaatcgtttttccaaccaagagtaattatcaagtaaataaatatacttattatactcatcagcagacttccagatcactcaaaatgacacctaaactcatctagttctcagagaaagctaatagttataaggttcaatacaaaccaagcatcaagtagtaggtatgtagttcagaaatgataataagtttcagattaataagcacaaatacacatagaaatagtatggccatgagagactcttgctgttgagagctagcagagcaagaggaatagcttctgccggaaacctcttcgtcactgatgagcttctctcagtaaatagaggagaggcgggcggcagtgtgaaatttaattaaaattattaaagaaaaagaacttcaaatgcatatatatatgtatatatatacatatacatatacatattataacaaagcagaaccatttcaaagaaaccatgggaaacaatcaacaacaacaaaaatttcttaagcctatacattccatttc

SEQ ID NO: 37158 - DNA, 2078 bp, Cannabis sativa
tacagggggtaaaaaagataattattcttaaaagaatgaatgacacatgtttcattgaattcatgcaacttatgcttttttagttaccataaatgcatgagtacacattcatgtgtgtgcatgcatgtatataattttatatggaatattgaatgagtgcttcaaatgatttgttcaaattatatcatgaatgaacacacttattttttgattaattttaaaaagttggtgcatattcttaaaatttgttgtgtaaattataataaaacatatcacttagaaaaactttgccattgagaacttgtttccaaacctacaaaagactaaacaaattagaacttagcaatggagggtccactgagaatattaaaactcccacaaacagattctatagtcttaatagtagcaacatgagctgcttcattaaacagttaagaatattcaaataaagattgtctgccattgacatatctttcctcaaacagactagttggcagtctccatacattactcaacatgcctgttgtcacagactctctaaagctgccgttccttcccaagtttaaagaagcatatcgaattaagaaacgtagtagtaattcctcccaagctttgatatcaaacatgttaggctcttggaggcaaaagtactgcttgttctttattcttctaattgctttcattgatctctcagaagcctcaagattgcctaaggaatactttaaacagatgatgcccaagaagcttccttctccttcctcatctccttccaaaggcaccaattcggttactacaccatcttccaaggctgtcaaagctgatacaaaccttccttcttttgatggaaaggtttagttagtcaagagaagcttattttggtcaatccactccatctgcacaaatcacaaatcagtcttctttggagcacacaagaccgctccatcaaagctagggaaggcataaaaagaatcacatgttgcaattggtctgatgtgcctataaatgaacagagtcatatagatatacatttgtagatttttcttacttactcagcggatattcgcaattgtaaagatacctgagtatttacaagttcactgcgcaggatgaacagaatcagtagtaattttttataatggaaatttgatctaaaatagatctttcaatgctaagcaagcgtaaattttattatccaatcttaaatcattatgattttctattattttatttttatgcattatagcaaaaaagatatatattcaaactaagttggccatttgtaaaaataatgtgatcacgaccttggagcatggttccaattaaatattgcttagtttcaaattgatgatattaagcttttttggtctattataataactagtcttttctaaatgtaaatttgaagaactttaaaatgagaaaagcagtgaaatctgtaaaattcagctgaagagtctgtttaattaattactcaattagtgggcttatgcaaaaaaattcttccctagtccttggaatttttaatgagtgataacttgttagatttcttcttctatgcgaagcttataaagacaaaatctgatttcactaacagaatgtatgataaaagaccatactggaacataattgtgaaaaagataacatattagtcaacactactatatgggcctttagtgactctttttcaactctttttataaaaatggaagtttaagtgtgtaaaagtacttatctagtacaaaattaatatttaaagacaattttttgataaaaaccgtaagtatatcatttatggagtatatttaaaggcagctttagaatcaaagttgtaaagagtgagaagttattttcaaataactcacgccaaacaaaatcctgacacgtgtaatttttttacattatggcgtcagttaatttcaaataaccaacgccataagggtatatatcaaaccctttcagcatatcagccttacttcgtcttcttgttcaccatgatacacacaacagccacaccagcccagaaaccaccacaaaccctcgccaaccaccaccctaaactctcgtatctccaccatttt

SEQ ID NO: 37159 - DNA, 4577 bp, Cannabis sativa
  modified_base (1124)..(1129): a, c, t, g, unknown or other
tgttgtgtctctctacttcttgtccttattcttgggtttcttctcttgtgattctccctcttgaaatgagaggagtagtccactttatataagctaagggacccaatatgcaagctgtcacagttgacagttaagttaattaaaaattaactaactaactaaatggttgttgggggtttaagaaataataccacatagtagattggtaaaattgattactctaccgcagaatttatgaaataatataaactaaagcatattaatataacaataaactgtttgatttttacaaggattaggccaaacacaataataataatctattttcagacaataataaaaccactaatatgacttattgattatgaaatttgacattttaaagtgacttcctcatgaagaactaattatccaatgcgctcttcttaaatacattattgtttgtacaattggcattatttttgctgatatatatgtcaatgccttacatgatatatttcttcttcttcttcttctaaacaatgaagtgttgctaaagatatggttaacatttgcatgtgatatgcttgcttagaatataagtcttaacaactttccagtgtctcaatcatgagttgtcaaataatcttgcaagattttctatgcaagaagaattgtattgtctggcttggggtcagaagggttatttatttatttatttaaaaattgtaacatagacatgcacattgaactctgcacatagttttgtggctgacaataaaatattagaaaactattttagtaataaccaaagcagaaaaccaaaaattctattttgaggcttgtatgcacgttgttttttcgagaagaatatgatgctttggatgactatattctatatttaatatgtgtacatgtactagatatgcacacaatgcagtatgcagagaacacaatagtacaaagaatttgaaatttctagattatagattatggttttttttttttttggctaattagaatttttgtccctgaactttgacatgtaccaaatcatacctcctaaacttttaaggtcgctaaaaataccccttgaactattgtaattgttgaatttaaggatttttttctaattttagtaaaannnnnnaacatggatgaaagtttagggagtataatttagtacatgtcaaagttcgaggggtatgatttggtagatatcaaagtctggggagcatggtttaatatataaacaattactaaaatagtaaaattgaataaaattagacgaaagtgcttaaatccaacaatctcagtagttcagggagcatttttaacgatatggacaaaaatcttagttttttttttcttttgaaaaataacaaactttgtactcttaaaaaaaaatcatgagcagcttaggtaactgataccaatgtggttactcagttattaaagatagttacttatggtaactaacattactacttatgtaaccaacaaaacttcaactaaccaaaatactaaaccaggttctcaaatcattcacaatcttattaccaataacttttgtgatctttatcattataaaagaaaacactagcaaagcaataaatatttccagactgtcaaatacttgaagcacacaataccacaacaccacatccaatatatctaccccgataagccaattcaacaaatcaagacaagcaataacagcaatacaggccaaggtgaccgagtacacactcttaccctgctacttttgaaaaagtacaaatcagaaaatttttaaatcaattttaggaagagcaaaactttaacaaacgcaataaacattacacatttcagtgcattgggaacaaaataaaaatacagtacgttctttatagaagatcagcagctttgatcatgctttacagacaatacaatgtaataaaaacagtagccttttttaaagacattttcttggctgttataccatctcaaagttataatccttgcaaagtattcttaaagtggaaacagtaaacatatttcgcaaatttgtacatttgatactcatctgactagcagtttcactgattcaaattaatcaaggtcgtttttccccctattcaagatatcatggccttcagttcggcaattcataattcttcgaaagacttctcttagttgacgctccaatggatccaatccatttcgaaaactttcacaaaccgcagctacctcatgcaccctttgctctacctcctccttttgctcttctgtcaagggaaactgaacagaatccaccaagtcagtcatgtggcgtgcacatctttcaacctgataaatctccctcaacaatccattggtgtttcgattctctctctttttggattcttccaaaatccgattgagaagtgacatcaaaggcgttccccatgagaaattgcggggcactgagaaatggacattaagaccgcgatcctgacatgggattgcagccacaagagtccacaaaacaaacatgagcacaaaactcattgtgaaaacaggtaccgcgagcccatttgtggccaccatctcgtttccacgaggtggtatcaagtttgtggcaatggattggagttgttttgcagctgaccaagaattggatacactccacgaaagagaccgagaatgccctgaggattgatttctatggtgagaaagatgatccttcttcgtgttatgacggccaaaagacatgttcctgtgagaaaacaccgaaccagtgtccctttcgtcgagcattacaagtgccaaatcgaccaaagcctttcttgcacggcggaattgtccctcactcagtgccctcttcttcgagtctaaagcgcaaacaacaatatccaaaagcttatgccatgacctgatcttctcaatcccatcacaggtggcattacagatatcaagagccttcacaatcctttcaaagaaatcatcaaccaaacgctccaacggtggctttgagacctctgccttattattcaaaagaattactctgaaatcctccaaagaggaattgaaagcatccaaaagcttttgaatccatggaattgaaagcaattcatcattgccagcactagaaaggtcttggaatcgttctgtgacacgctgttggaagaactcgagctcagattcaagggcactagagtcctgattagtctccattgagtgaacttgttctctcctaaaactccaaattgatcgaccaaatgcggccagaggtgaagaagtgcctgaattttccgttgaaggcattattacaagatttcaaagcaaaaaaggcccttgatcttatcaacacaacaacaccgaaaaacacaaaatcagtacaaacccattaatacttagctaagaaggcctcgacccagaacttcaactctcaaaatcttcgaaatcccacttccaattcagtctactgcaatagttaagcccaaattcagaaatgttttcaccatattatatatcagaaaattatccaaacttgtcgaacactataaccaaaaattccatttttttttttttaaaaaaaacagaaatttcacccagatcaaaaagctcaataacctggcttatctaaatgactcaagcaaaaaaaaaaaaaaaaaatcaagacgttacatctacaaaaatgtgaataagcaattctaaaatccaacgaatatttattattgaaaaaaaaaaccaaaaattagtagtaccatacattttagaaaaaatattaagaaaaatcaaaaaataaaaggaaaagttgaagaaaatggcttacttggtcagatgtagtaagaatattgtgaagaaaagacaaagacatgtggaaagaatgaatttattacaggaaaagaggttcttgaaacccggcgaggacacgagcccctcgcttcggagagagagaccctaaatctacgacccaaagcaacacatactttatacaatttatattatataaatatatatatatttcttttgaattatattaattaaaaaaggaacgcaaatattatttaaatgcttttaaattaaggaaataataatataaatttcatgtttaaggagaaactatggcacttttacgcatgttgtgtcagctacgagttgggaaagccgttacattaaattaattgtttaattattttctttttggacaaatgttctcttgtcttgatatagtaaattagcatataatgtatattcatttttattttattttttatttctttaaaaatacaatatattcctccatatcaatatgttttaaatgagtttctttctaatttcaaaaaagaaaaagaaaaaaaaaagaaagggagtttcttacttattttaaattagttcatgttaacatatatattaaagaactccttacagaaaaacaaaaaaaaaaaactgatatattaaagaactattttcttggtcaaagctcaatagttttgttcaatcaataaaaaatgtgaatagtaaggcaaatgatgctagctaggtcttagttcggcccacggtgaacccatcaaggatagcgaagtgttgggctggaagccagcgtatgtatgataatttaactatcgctttca

SEQ ID NO: 37160 - DNA, 2383 bp, Cannabis sativa
atatatatataaacaacagctaataataaataattaagaggaagcatatcacaccgtcttctctgaattagagagaatagtggggaaaagaagaaccactttgagtctttttatctttggaataaaatttgcaatggacccctttgaaggatctgattaatttcttgttggcccttggtatcaaatccaaaaccccacttttaaattaaccctagctagctagtacaaagagatattcgatctaataataatattaatatataattaagagtttaattgctttttgaaaagatcattaatattatatttatttatttgttgtatatatagatatagatccaaaataagtaagagtgtatatagtactagataatgctatatgtacatgtacattttatataatataatcattatttatgtctcttttgtttttttaggtgatgatgatcaaatgttgtaacgtcttgtatgatatgataatcatgtttggtaaaagagtttcatccgttggatcaagatgattacactcaattacctagctagaatataatcccttctacacaagtcaaaagtgtaagagagaataaggtaattaattaagagatgatcgagcacaatattatgggatatgatcatgatggtaacatttcatccgactggtgtgtttggttgatgactgatcatgatcgatggcttgggtagataagtccaaagtgggaccaataacacggcctacataggaatattatttctattattattactataattattagataataagatcatcaacgtatatacacatatacataacaataataatgagagaattactgaaaattttaagtttgtaagcagcataaattcaatgattattttttagtggtacaagtacctaatgtttataaaactgtaattttcttctaatttcatcagtacagactttgttattgtcttaaatatgacacatataagacctaaattttagattatttggcctagacgaaaaatatatagtatcaattacttccaaatctttttttaataaatttaaaacggagcctatactgacgaaaatagaaaaaaattacagttttacaaacattgggtgcttatgccactaaaaaaaatcattgagtttatgctgcttacaagctcaaaactttgggtactctatttaccctaataatatataatatggaaaaagatgagatggagagaaaaaaaaaacagaagggagcccacagaagcctgcatgtgcaacacgtgtacagtcagaaacatcccgctccatctctgatgtattgtatgtatatatgcaaaagaagagaaaaaaggttctattataaggcatacaattgttacaggaagcgatactgaaacttttcaggcccttttccaaaaaccgtaactgggccactcccccatctcaatattgtactgctccccacattaaattcaccactacatgacacttccgtattcatcatcttccctttcatctctctctctctaaacgcattctcattctcattctctctctttctttctttctttctttcgttggtagtactgcttaaaccacacctcttataactaattaagatataattaattctcctcaccaaacaaaaacacatatcatcaataataatgggacaccactcatgctgcaacaaacagaaggtgaagagaggactatggtcaccagaggaagatgagaaactcatcaactacatttcaacctacggccatggttgttggagctctgttccaaaacttgcaggtaataatataactaattttttttctatatatatgtatacatatgtactgtgtgtgtttgttaatgtacataaactgatatatatatatttatacaggtctacaaagatgtggaaagagttgcagactaagatggataaattatctgagacctgacctaaaacgtgggagcttctcacctcaagaggctgccctcatcattgaactccataccattctaggcaacaggtatttatatccatatatatatatatacaaaaaaaatacataatgctagagtgtatttctatatttatacttatatacaagttggtttttatagatgggctcaaatagcgaagcacttaccaggaagaacagataacgaggtgaagaacttttggaactcaagcataaaaaagaagctgttatcaggccatgataatcatcttcatcatcatcatcatatcattccagctgcagctttaacctctttctctgatcacattcatttccccaacacaatcacaccatctgctttttccggagatcattatcataatcatgatcaaactactagtttgttcactttcaccgctggatcaaaccctaacaacaa

SEQ ID NO: 37161 - DNA, 4069 bp, Cannabis sativa
tatatctatatatatatatagagagagagagagagtagagagaagagagtaagaaagatttacagctctaaaacaatgcaaaaacttatttcataattgcattgtacacaactagtgaaagcacagttcacaacgttaaataggacaagacaccactatctaataatataaggccaccgttttggccacatagaagaaagaaggaaaattgtgaggacacaaatggctttcctaagctctactgttaaaacagagttggatagctgtattcagacctcaaatgaatccattgcttactgagctttcacttcacagatcaggaaatcttcataattaaatggttacttacttcatgtggaagagtcagattcagaaggcccatatagctttggatcagtttggtagtaaacaacatcccctgtatcactaacatagtgatcctttttcatgcttcttattaaacttccaagcaagtgaaatggtaaaggtccagatttatttggctccttatagtatttaccaaatacaggtctagctgcctctgtctgttgagttaatatttcataacaaaattagaaattgtatgatcaagacacaaagaatgagagttgccaagatcaaaaaacgaaaattttagtgatacttactgcttccactaagtgataatgtgggatttgagggaagagatgatgtataacatgagttccaatatcatggtgaatgttattgatccaaccataatcacggtcaagtgtagttagtccacctcttagataactccactcctgttttgtaaaataatatatacttaacaacatggctaaagcactaaactttgattggtttttgctatgttgactaaataagtaatcatagttgaaagattccttgtatatttcttatgagagaggtggtttggtactaaaataatatatatgtatgtgtgtatattcaatttcaatttcaatacctttccacgataccatggaagtttgtcctcgtggccatgatgatgcaagtaagtgaccaagtccaaccacatgacaaaaatctgtatttgaagggaatcagagaaggaaaacaagaggaattttcttccaaggtcaaaggaactaactgtattaaacataaagaaaagaaaaagtacccagtagggaacaatatagagcttaatgagttgaacaggacccattacaaaggaaagcacaccgagcagagcaaccatggcagtccaacatgcagtggaggtgatgatgtctttcctttcactctcaacaaacaagtcactgtttggatcaaaatgagaacccttctttccgggacttcgactccactgtaattaatttcagagccacaaactaagaactctaacaaactaacaaataaatggaataagagagagaaagctagaacaagattgcttaccagataaaatgggtaagcaagcatagggaaaggcaaggtaaacctcagcaatttggtacccttatccaagctattgtagattttctcagatagctgagaaatcaaatgatataaaatcactgaatcatagaattgttgcatgacacaaacacaaacacatatatgtacatatgtaagaggttacacacttaccggatgccaagattcatcgttttcaatgtgtccatggttctgatgatgagtcctgtggcttattctcctgtggaaacaaatgaaaaaagtgcaattatgtaagctcaaaacacacgcaaagcaaagaataccttagatgacatataatataataaaaagagattctacccttcatttatgtgtgaaactcaccatccatggtatgggacaaggattgaagaatgaagaatatgacccaccacgctattaaggtttgcgttattagaaaaacttccatgaccgctgtaaaaggaaaaaaaacagacaattgaaacatggatatccaaaataacagaatgtataatcatcttggtcaccagaaaaaatataaatatgacaaagctatataacctattacaccactttaaattcttctaatgtaaaggtatcaacttctcagccaaagttttctttcttaaaggagagaaagagagagagatcataattaccagtcgtggccaagaacaaaaagagcccagaacatggttccttgagcaatccagtacagaggccaaacggcccagttgtttaaataagcagccgcagccgccataccaaaaacgacaacaacgtccctcaaaacatagctcatagatctccatgggtccttaatccaacagtgtttaggaatggctgctctaatatcagccaacttaaatggaggcggcgcaccagggtcgaatccactttcatcttccactaccctcttctcattatcttcttcaccaacatcagagactcttaatggagcactcacattaagtttccaattctgccccctaaacccacttgaggaagacaatgagaaacccaattggctactcttacagaccggcaatgtcctaagactcgacgggatggaaggcttcaacaacattccggttctgggttgagggtagactctaagaagaggttttacgccacattctgataagacccaagtcgccattggagacccagatgaagaaacacacaagaattgttcaaacttgaggtgtgagaccagagtatcttcccctggcgaaaggggtggagatgactgaatgtgaagagaacagagtagctaatataagatgaggagaggagataacgaaaaggtttctctcctcacctccaaagaagagaaagaataaaaaaaatcacaacttgtgcttgttgttgcttgactcttctactctatctatctttaatagacggggtgttctccctctcacaaagttgggtaatgtggtacggtgaccacctcagacttagttgatagagagttgatttttggtacgtgtgaaattattaatgtaaataaaaatgaaaggttggattggttcgattgggccattgctatgccaaatgcgtccaaaggtacgtggtcaagtctgccaaaggtcggagcaatagaaactccattaatccattttatttaagatgatattaaattgagaaatgttaaaaagacaccgccaacaccatgttacgtgtcaatatcactattggtataatatagtattgggcttcatatagtttaacataatagattttagggagtatcgctagccaattgtaaggcgacacgtcttaaaaggctaggtaacactggtgcccaataacaatggtctattaaattttatacacactttactttatttgatttaatttccacttctatttttaatgatgttcttattagatttcttagtttaatgtaaattatatactaataaagtagagaataaaagtatattaagcaacctacttaataaaaatgaatatattttaataaaatatataaaaatatttttaattaatagatacaaaaaataattattttccaacctatctcattttttaaagatgggttttctccaatagtaaagtagagaatgaaagtctattaagcagcttactaaaaaaaaaatgaatatattttagtaaaatatataaaaatatttttaattaatagataaaaaaaataattattttccaacctatctcatttttaaagatgggttttctccaatgctttttcttctacggaaattagtaatattaatatgcacaaaataccattttacctgttttaaacaattttataatgtaccactaatatgacattaatttaattcagttcaataatttgaaaaaaaaaatatataaaaattattttaataataaattatgataatatgtcatatatattattgaaattaatatttgtatgtttaatattaataaactaatatcaagtaatttaaagttgttaaatagactctcatcttacatataccggcaacttatagctacataaaaaataagcttttttcataagcgtacaacaaaaataacataattacaaaaaaaaaaaaagttaatatcattttaaatcctgtatttataaaagttaccgattggactctat

SEQ ID NO: 37162 - DNA, 2006 bp, Cannabis sativa
gcggtgagtcctaactttttttttccatgaaatcgaagggtttagacctttttttttttccttatatctctctatgtcttataggttttccaaactactgctgttggccttggacaatccacttgtgttggaattggtggggatccttttaatgggacaaactttgttgattgccttgagaaatttcttgaagatccccaaacagagggtaagtcaatgttttctttcgatttctgtactagaacaacacatatttgctctggtatcaagtattatacggaaacaattattttttattaatcaagtatctgtgttcatttcaggtattgttcttattggagagataggtgggactgctgaagaggatgccgctgcattgataaaggtatgcagcatatttatcaagttttgactttactgatttttttaaagggttaagtatactattttaaataagtaacgttcttgccacaaaaaaaaaatgtaacttcctttcctagacattctagtacaatagtcagggcctggggcttggttctaatgtctgcactttaagttttatttgtggttaaacagaaggttaggatgagttgagccaaaaagatttctgaaggattggttttggacataaagctcatatgggtcattgagtaatgcacacacaaagattgcagactattaacacacaatgatgtgcaattaattttaacaattaatatttttaagtgggatcacatcattttaaattcttttctaggggacatgctttctttttttcttgttattttgttaggtgaatttgtagcttcctggaaacagtgattttgtactacagaacccacaaacccctaaccccaaccctacaccacttaatattattcctaattacccttaatattattggaactttcaataaaagccaatctgccattctaccactgagctttgttgcctcagcgacccctgcgtcaaatggtaaacactcgttaattttcatatttttcttcttttaccaaaaacttctgcaattctagttcttaggaacccaagtatattcttatatgttgttgaaacacacagtcaatgtattagagtaatttccttacctcaaatcacatcattattgattctcaaaggtatctttttcttatacaattaggtcgttctcaattggagtttaattttttttttctcaagaaatatgagggattgtgagcaatgagcattaagggtctgatcagaattagatattgttttatcttagtgaatgttaaaggaatgtatggattattggtccttccactttgattttgattaaggattgtgatgctccttcaagggaaactagttctcttttatttggcagtgcagtaagattttcattgtctgaaacgagctaaagtaatgctgtatttagcttaaatagttatatctataatgaaatctttatggtgatttatcatagcttacataactaataaatgtaatttcgtagactttttctccccttaaaacttcacatgcaagaaagacaagaagtaattgattggtataaacttagactgtcttagttgattggtattcattttggtgaacgagatatggtttttcttgtatgataaaatggatactattatttaactttcaatagtgaaaatattattttgtgcccttgccccatactttttaaatttttttagagttatgtcctaaatcctaagtttactgctgcactgtgttgttcatttaatatattttaagcttctacactaaacacatatatctcatgactttaaacaggaaagtggaactgagaagcctattgttgcatttattgctggactaactgctcctcccggtcgacgtatgggtcatgctggaggtaatattttgatttatgacaacttgcaccaaaatggactaataaatcattatagtaatattattactagggcattttttcatcgattgttatttgccaacgtgttaatcatcatgcatatgat

SEQ ID NO: 37163 - DNA, 5196 bp, Cannabis sativa
ctttattgttacagggttatgctctttgggctaaagaatgtaggagccacctaccaatgtcttgtaaataagatgtttaaagacctcatctgctacaacatgaaagtttatgttaatgacatattggtcaagtctgaaaaggcggggggcacacactactacaaaatgtctattttatgggtcaacgcatcacacaaaatagttgatcgacacaataaatagctagtgattttatgcttcgaagggtaactgaagctaaaaaagttcaattaacgtcagttagctcttcgacactaaaagaaaaaccgaggaaaaaaactaaaattttgaaaaatatcgctacattttgcttcggttcaaaagagaggctaacttttttttacttcagtttaaaacttaagctaaaacattaccgagtattatcaacagaagcaaaatgttttaatttttgctaaaccccccttttgacaaatgaaactatcatttcttaacttaacgaaagaaaatatttcacaacccaattccaatttctaaccctaaatcatttcttcctcaccattctcgttcatctcgctcttcttttcgttttctttttctctcttatttttctggtgcacgaagatcacaccaaggtaaccgtggatcaacatccctcttgatttcgtggcttcacatctgatcgaggtaagtaaatttcctcctcgcattcatgtattggagatataattttaaacttggtcatttatgatttctattgtgtgggttggaaatttgaggagctatgaaatttgtcaacgatgatttaatttttcaaattatatatatatttttttggtgttgtgagatgattatgaggtttgtacttttgctttctttgtctctctcaattttcttgggactagttattagaatttggggtgagaaactgatattttgagtttgggacataagctgtttgaagaaaggcctctatgatatttcaacatttttttttacttctcttggtgaatcacgattgttgcttgttcctatgttgttacatttcatcacagctgatgctttgagtctagtgaataattacttgggaggggttgaagatataagaaaatctaaagtatgttatattattggtagtttttgcttttgactatttcaaaaattttgctttcaattatagttgtatttgtgcttttgtacactatttctgtttcagcatcattaaatatactatttttctcttcaaattcaattatttcctctaaagagtttggatttgtcaataaagaagtctacttaaagttttaaggtttaaactattaccagaacttctaaaatggattatgggtcatcatatttagtcacacaatcagctttgtttcaaactttgtttaattttttttttcagtctttccttggtgttgaggtcaaaatagattgggtagcttttgatgacttataaactatgtaaacataataaacttagctcttttggtagacttaataaacttttattgtaatatttaattgtcaaatgattgatggtagttgtaagttttccctacacctaacgacactatagtctataccacactgcatttttttaggagaaaaaaacattcactaataattaaactacactgcatttagtacgtttaatacaatatattagtgaaatatcacatcacttgtactataaataccctcactaaaactcttaataataaaataaaattaatatgtatgtagtttcttcatgcatgttatatgtaaatgtatattctcatttgatatttttccactgtagattcctttaaaactaattaattaataaaaagttttgagtatcatatccttgaagtttctttggataggacactaattttgtaattaaagcatttcgtgttttacatctctaagtcttaacacactaatgcaaagtttacacctacaagacctttccaagcattgtttatttatatattagttgttgaaaggtttatcatctcattatttcttgccataaatatggataaattttctcataaaatggttacctttatgtacatagaggacctaaacgagtgttttaaagtcctttgagaatacaacatgaagctcaacctccttaggtgctcatttggagtcaactcatgaaagttccttggcttcatagtaaatgcccagggaatcaaagcaaatcctgagaagatcaaaatccttttagacatgaaactgcccataaatatcaaggaggtatagagtttaactagctatataataacactaagcaaatttgtatcaaaatccacatttaagtgtgttcttttctttaacatcttctaggaaaataagaagtctgaatggacaaaggagtgtgaagttgtctttcaagaattgaaaatgtacctagctcaacctcccatcctgtcaaaacccttagataatgaagaattgggaatatacctggcagttacaaaatttgtggtaagtgcggtcctcatttgagaagaaaatggagttcatcatccagtgtattatgttagcaagaggctcattaatgcaaaaagtcgataccctgtaatcaaaaagctaacatattgcttgctactagcttcaagaaaattaaggccctacttttaagctcatcctatcagagtatacaccgaccaaccactacgacaagtgctacaaaaacctgaagcgtctggtcggttgcttaaatgggcaatggaacttggataataagagataacctactaaccaaggatagtaataaaaggtcagactctcactaactttgtggctgaatgcacaaatgtaactcctaaaaactccgagcaagagcaagaacagaagaaaaagcgaaagaagaagcgagagtaagagaagtagcgagtgcaagagcaagaaaaattggcatggaagttgcacgttgatggtttttgtatggattaatcatttggtgtaagaatttctctcattgcaccttgaggcagcaactggacgctgccataaagtttggtttcaaagttgactacgaagccctcattgccagactaatattggcacatgaggtctgggtagagtaccttaacatattcagtgactcctaaattgtggttaatcatgttataggtgaatacactacccgagaataaaagatgatggcatatttaagccaactcaaagggtacaccatcaaacaaatccctagagaagaaaataccacaccagatgcccttacccggctagccagcaacacattagtggacaggacaaatagtccctattcaatacctacaagatccaagtatttctattttgaaaggaatagatatgctggatgatagcccaacctggatgacatcaatagcaccatacctctagtcatgagccctaccaaaaattaggaataaagcaagagagataatgagaaaagctgcccagtatctaatcctagatagaattatgtactgttgtggtttttcaatgccagtttaagatgtgttaccaaagaagaagttgcacgactactgatcgaagtacatgaaggtttctacaacaatcacgatgggggacagtctttcaaagaagatactcagacaagggtattattggcctacaatgatcggggattcaatggactatatcaataaatgtgacaagtgccaaaggttctctaagatcccaagagtagtgatacccttaaccagagcagcaagggtgtcgaatttggccctacacacatcatgtgtggtgatgtgtgtattagctggctgcttcttgttaatgttgttgtgcaggctcttttgtcttcctagtctatgaaaggcattgatcgacataggccttgtggttgtaacctggtcgtgtggctttgctggcaactgtggggatctatcctttataatgatagagtcatctcttaagcgtttactttgtgaggagctactcgcagtactatactgactatttccttcaaaatagtctttcttagagtgacatgtggggagggagttggatcgatttctcaacgtctccatgcacctgtgggaagtatttgtactgctggccatcaagagctcaggcaaagtacctacaccaagcaccttgtgcatcacataagtatttttgagtgtggagtagttcattaatcttcagcctctgaatctcatactcttcacttttgtgacagagcttctgggttcttctcctatgtttgactgcaggtccctttccctttgcagggtcatggggtggtctagagtcatcaaaattgtgaagagaattccatagaggagatttgtttcatgcattgtttgaattacttcgagcagaattgtagttggtcttaccatttgtgtgtggtggacctgtaggtctgcgatctcgagtatgagtccttttagacgctcactcgtagctcgcttccctaacaggtgaccgctccatattaggaggaggacccatagatccatgttcttgagtttgagtcctttcagacgctcgctcatagttcgcttccttatggggaatcccaatggctgttgcttgttgagtagtggcatggctaccaggagtggtagtgtggctttgcatgttcatgaataattacttgcttgaattcctttcgaaacaaagttcctagagagaattcgaactgtagttggggatctcaaattgtgactcccaagaaagtaccaaaatattgaccctgaaaagtggccaacacaagctcactagattcgcgagatgaataatgagtttaagtaaaaaaaatagagagacacacaatttatagtagttcactcatgtcgcgatggtaatggagctacgtctacttcgagtttttatttctcacaagatggtaattatagaaaaaggctaaggggttgtttagcttcataacttaaaatccgtttttcagtttttaaaataggatacaacttttaaaaactaataggagttgtttggccaaattttttaaaaattgagttttaaaaaactagaaaacaagaaacatcaaaatgtagttttcaattattaaaaattatttttttgtctaacatattatattttacatttttattcacataccagaaccccaaagacccgaaccccgaaccccagaccccgaacttgcgaccccggacctggaccccagacgctagaccccagaccctggacctcaaactc

SEQ ID NO: 37164 - DNA, 7660 bp, Cannabis sativa
gtcactatggtatgttcttcatttccgcttacaatgttcatcaattttacctttttagggtttgttttctggataatgcttgtagatgatgattattttgttcttatctgttcttagaaattatgaattggtagtgtattgggggaaaatatgctcatgttagtgcttcccataggataagatgggtaaatttttggagggatttcgtggagggacataggaattggtttctgtattattctgttgttttgaaatgtaagaatctgtgatagtttgacaatgatttaggtgtgctaatgtaagtaaggagtttatgaatgggttttaatgtagtgtatgtatggtttgactagtgtgtagcatcgacccagatacctaatttttggtcaggtgataatgttctactgggactgcattgccattttgaaaacaagcttgtggagtttccaaccttactaccataaaattagtagaatcttatagtggtaaaaaaagttaagacacaagaatacccaatacttttatttgagatttattaggctcattggccaatttctttcatttctttttaaggaatatgagggtgagcatcaataccatcactatattttgacatgtttattgtatctggaggagatgatatgctatttttaatttaagtagatttgtggtttgtatcagagcagatttgacttcttccattgcgctttaaaaagattattttttatatatttgtttgtttctaacagtgatgcatctttcattatttccctctttttgtactaagctctacttagcttcactatcacatgctgactgtctatggctaagataatcgttatgtgtcattgtagtttagactatgccacagctaaatgcagttttaagattttctgtgtacgaatccattaaaatttctgattcttatctgatttttttgagactaggagcaggtttgctccagttcccattttgttcccaaccttctttagcataaaatttgccaaaatttatttatgtactctgcaggttattccattttccaggggaagtgcatgggagcaacccccacccgacttggcatcatacttgtacaaaaatcggattgtgtacttgggcatgtctcttgtcccttctgttacagagctgatactagcagagtttctgtaccttcagtatgaagatgctgacaagcctatttatctttacataaattctactggaacaaccaaggttagcagtgttgtttactctcttcaagtagtttcttgacctttgtttacatagtattttgtttgctttatatgtttttcactctatcatctgtgagagttttgaattatttagaaattttgtgccattgaaaaaattgcctgattgctttatgactttatcttttaaattctattcagaataaaatattctgctttatgttggtctgatggaataccatattagattgcgactttggaattttgacaaatggtgaacttttgtccaacctcaactctttcttagccctggctgggcaggctgaaagaaaccaactgctagatgatatggttggaaattaccagcttgtatgcatgtcagcgtgctttataaatgtgcttgatttgtaatgccttgttctagttgacttacagtgacacttttttctctttcttttgtattaactagtcaattagctcctataaaaaagaaaaaaactagttaattagctaaatttttaaaacatttttcttggattgttgattaatattttacttatttattattatttcattttattttattttcagggtggtgaaaagttgggttatgagactgaagcttttgctatatatgatgtaatggggtgagtaatcattatggtcttgtttatagatcatgtttttagcgatcttaaattgattctcctctccctcaggtatgtgaagcccccaatatttacactctgtgttggtaatgcgtggggagaagcagccttacttttggctgctggtgcaaagggaaaccgttctgcattgccctcatctacaattatgatgaaacaggtttttttttttttttttcatgacttctgttttggcacaaatgtatgtatttgataaaattatgtgtcagtgcatattacaattgaacttgaaaatttcaccttcttacttatgcagcccattgcaaggtttcaaggtcaagcaacagatgttgagcttgccagaaaggaagtaaataatgtgaagacggagttggtaagattagcaacgattagacttccagctatgcattttatgctcattcaaaacgcatcaaaaacttagacctttaaccttttcagagtcttcataatatcttaaagctaaaagaatttagctaaagacttatgttactcatacatctttaacttagctataatagatttgcacttcaacaaaatacttctctaagagtgagctaaaagttttcttttgttattaattttatagctaacttctttaattttatataatatatagtataatattttattaatttatatattataaatatattaaaagtatattatcttaatgatgtagataaaaatatagagaaactggtgtaagtgtaatgtaaaagtgtgaggaaaaatagagaatatgaggttttgaagagggtttttttgaagaatagagactttgatgagagtgctactttctcccaattttattagggagcctcacttgtggtgtagaaaaactgtggttacaagctagataaaataatgtaaagcacaataattacgctcaatacaatccctatacaattagaagtttgtgtggctaacagacaatagtaatttgtcaggcctatgtctgtgtattttggctctattattacaaagtaccactctagcaaatggaaccatctaatttttaaattgtctgtagaacttaattcatcaaaccatgaatagaactcaataacgtgtcaaagtgacaattggaagaaaaatgaaaatggaaatacataagcttctgaaaagatgttttgctaatgatgcttagaatactgcacatatatttaattttatttaaggtgatacgtcaatttacatttttttcgttttgtcaaggttaacctctttgcaaagcatattggcaaatcatctgagcaaattgaagctgacatcaggcgtccaaagtattttagtcccagtgaggcagttgaatatggtatcatagacaaggtattcttattagcagtgaagttgtcttcaaatataaagtttgatattatggttacctaaattaccatgttttctaactttctctaggtaatctacaatgagagaagtactgaagataagggtgttgtttctgatctgaaaagagcacagcttatatgatgaagaaagagtggaaatcattaatttgagaggtaaagagcagccacaacttattatctatttgtggttatgatgttaattgcttctctacttttgaaagttttacaatgtatatttattatttgtataaaacattctatcttcaaggtcaagcttcctttccagatgcagttattatattcatctatcattgtgcatgtattgctgctagttataattttttctttttctttttgtactaggctccctttgttatcctacaatatcaaatgctacttattattttaactaagtcaacacctaattgtgttgatttatctttttctccacttgccaatgaactgtagaggcttccaactttcagctttttgcctatcttcttgtagatgttgttgagtttaaacttgatctagtattgtatgtttgtagccaaaaatgccacctttgctattaccatttaagtgctcaagggtagggttggtggaacaaataggtagttgtttttcattttaggtttgttctctttaccattattgcttcctttgtctcctagaagattcaacagggagacatctggaagcttaaggtgtccgcttattatgtgattaactcactttgcaccttatttttcttttcagttctgttatgaatgcccattttggaatttgatagtgactgaataggcattgttggtggttggtgatgtcctttttaggtgagtagatatggcttcatcctcatggcatgaccttttgcatacaagtgtcgaacagggatacgaagaactaatagaatttatgaaggggaccataatacttttactccattttctatagtgtcttccattatttgctcttaagtgctgtgacatttatggagagtgatgccattgtttatacctttttatagtgatggtcactttctttgagctggaactctctcccaaaatcatcttacaatcagagtgatgggataactgacgagtttaaagatcttaaatggttttgttatctgatgcagggttgatataagtccttttctttttcgttagagctagttgaactaaaccatggatgatttagaagtttaggttataatatcagaacttattactgagaacaaatcaaaaaactcacatacgtttgccacatagtgttaatatgatgtagttggtatgcaatggcatgattcaaagtttgttatttactgttcagagtaattttgtcctagattaattattcattagacattttgacctctcactgtctataccctgtccacacaatctgactatttattttattccaactttatcagattgaagtttatgcaatgattagcttctagaatagcaatgcaatagttgttgccccatgcaaggaaaaagctcaaattcattgagaccagcaatggaggatgttcgcaatacatgcaattttggaacccacaaaccactgggaattggggttcaaaacctgtatcaatgattctttaacttcaatttctttttttatggccagctttgttggtgtgaatgaagttcagctcctttgacttgactctatagattgagcataattatgatttagtgactcattgaaccaactataacatggattaaaaattaaaaaaaaaaaaatcaataaggcatacaaaatcaaaggttaacatttggatttgttgtgagttgctgttgtttagcaagtgatcgttggtgatagtgattttagttcatgaaatgtgtagagtaacaaataaaacttcacccaatatggctcattcattaagggttcgcaatttattatattaattattacgatcaaaatttttaatacaatgtatgttgtattatttaataggttcgtattaacttgtattataacatttataaaggattaggagtcaacaccgatttccgactcgaactcggactcgggactcgaacctagatccagacctgaactccggacttggacccgaaactcggactcgaactcaggacctagactgagtctcggacccgaaccttggaccctgactcgaacttggactcgagactcgaactcgggactctggtgttgggatgggtatattaagaatatattgtaactttacacattctattaatacaagtcaatattatatattgtattgtattaataatattaatgcaatacaaaacaatctaacacaacataatacggcataacaaacgaggcctaaagctcttattagtgctcaagtgcaaccaaatgtaggacaagtatcaagagtcacctactcccagtccctattgcgattcttttctttttaatgttggaatctgattgaacattggctttctttattgcatctacttttccatgtcatataattcaacacttgtactaacattaacatatgccgtcactacctatgtcgaaaagaaaatacccttttcattttatataaataaatttatttaaaagggtttggttgcaacttgttaaccacactcgtaaagaagttcaaattgaacttttaatggaataaacatatgagtgctcaaacccctaactctaattcggaatttgacacgaaagacctatatctacacacgaaataacctatagacatctcttgagtgcgttacagccaaacatgataatgggtcttggtaggtgttaagtatatccatttttttaaatgaccaaacctttgagtttcgaggttttgacttaacaaaccaatgagattttctctgggtttatagtatacatgtttatcctaaaacatagaggcgggttaattagataacatgtatttttattcgagatttacaatcgaaatagaccagtacccattgatcacaaacaagttgggcgtacatggttttaaatagtattatccaaattgcagccaaagctatataaggtttttctttctttctattttggtcaaatagattttgagatggtattcaaaatcaaatccacatgccctagttcatagaattgaactgaaaagtgttacactggctggttttcactgtaatatatacaagatttaatacgacatttgcagttcctagtaaagaggaaaatggaatatgttgtcttcaatcaaaattcaatattaaacaatttcagggaaaatgtaagggattttttttgagaaaaaaaaattgcaaagtaccatgataattttggcaataatatatataaagtttccgtgttttttgaaatcatgatacatcaacatctcaaattcatgtatagtgattagtgaatagtgattattgaatataatacatatatattttattttgtgtagaaataatatatttttttttatttgggatgatctaaaaagtacccattcttatctatttagggtgaaaatcaacatgaagtcaaggctgagattaggattgggattgtgccaaatttgggttaaaaactgagagggagatttgaggagagcataaaatagtgagaaaagagtgtgattataataaatagtcattagagaaataaaaaattaaaaaaaaaaagtgatggggaagggaaagtgatgatagtaaaaaatatgtgaaagaaatgtgatgataataataaaaatgatgagagaaatatattgtgatattagataaatgattttatattgatatgattaaattataagaagaaattacattatatatctcttttaatttaatatttttaatttttattctttttttcaaaatttattatgtttacttcttatttcaattattctatcaattttatccttatttcacgatagtttttatttttctctaattaaaattttgttcaaactttctcacaaacttgcacatctatctaaagaatacaaatctattatattttaaatttgttttaattatgtgagtgtgaggatattttagatacaatactaataaaaaaagtatatttaaattaaattttatttagaagtaaatttggttaataaataaaaaaaatattctttaactttttcttataatgctgaaagtaaggaaaaaaaatgatgtgacagaagctaccaagaaataataaaataacttaaaagtaaaacaaaaattggtctttgtaatctatttacttatattttttttgagcaatgacatgacaaattatcatgaattaacatcttgagtaatgtagtaacatatttatcaaaaaataatcccaaaaaaagtaaaacattaattaataaaataaaaaaattatgacataccatatgcattcatgataaattttcattttt

SEQ ID NO: 37165 - DNA, 6129 bp, Cannabis sativa
tgtaaagggttttatttagggcacaaaacccaacatgataatctttcaaattctagctttgaggactgggaagtgagtagtgaacacacattctccaaagcccgaggtgcaacatcattagtatcctaaccaagtacgtaaagaagggaacaagcatttcatcaaggaataaaagaaatgttggaggcgctatcttcctgcttcctagacgtaagtgtccagcccagagttgttgaaactctgcctaaagcccgcccaactttgtttgctaagggagttattgttagggagtttgttctgtaattgttgcaagacacactactgaattaaagctcccgtctaaatgtagaatgatggcacggacaaagtagacaatgagtaaagcttcaaaagctgacccacactttgctcgactgtttactgcaactagtgtggagcaagcatgactttgtaacaatatagaccaatgtccattcagaagctagtgtgctcttggccaggtggaggcattcttatctgattgtaccccaaataggcttccataaagcttaggatttcatgcccagttgttgcatccacgagctgatcgattcttagaagtggaaaacagtcttttgaacgtgccttattgaggtcggtaaagtcaatacatactcatcgtttattatttggcttgggcaccaatacgaaattagccaccccggctgggtaaaaaacttcaataatgaacttgtttaagcgaagcctttctaccttttcttttagttcttgtgcacgctctttgtccaacaatatcctttttgttagatgagatgaaagtttggatcagtgttgagggcatgagacatgacagttggatcaatcccgaccatgtcctcatgtgaccaagcaaaaatgtcgagatttgctcttagaaattttattaaagctaatttattttgagcaaaaaacccttgccgattttgagcttcttggtcggtatggtaagatcaatctctacttcttctattcttccattggcctaacatttatgtttgtttccccaagttagggatccatatcttcgtccccaccttaggcgaatttctattgggaaattgttcttcccttctctaaaatttggctggaggtattctcctttttggccttacatagagcaaggttgtagcattcccgtgtagttctctaatttccctttagacaacccattccactctttgttggaaatttaacgcataggtgaaagactgatgtgatgactcttaagtcatataaggttagccaacctaacatgacatttaaagcagaaggagtgtcgatcactaagaactgtgccattactattatgctcatcgaagcttttcctactgtgagtggtaagcgaatttgcccaagtggtgcaagactttggctggagaatctgtagactaggtgagtgcaaggaactaaatctttaagttgaaacaccattttcatatgttgttttgaacaaaatatttgtagaacctccattatcaactattgtttgagccaccattttatttgcaatttgcactcaatgaccaaagggtcattgtgcggatagataacgtggctggagtctgcatcgctgaaaattatgattggttctccaacacgtggttgtttatgctttctttcttctacgaccagaactacatctatttgttcatattgtaaggctcaggcatacttttctctagcttttcccgagtctccagcaaggtggagacctccaatgataacctgaagatgttcgtccactagtggaggcattaactaattttgggtgttgtctgtttgggtgaccctttgttcttggttggtcttgacatatttttgtaagtgcgggttatttttcataatgaggaattctatttctcgctttacattgttgcattcatatgtattgtgaccgtagtctgcatgaaaataatagagcttggtggtgtcctattggctcatgtccttcttcatgggagagggttttctatatggcactatagactgggcgatcacatcgattatttctatgtcttctattaggattgtgaatgtagtgaactttgaggcattctcccgagaatgttgttcagagttgccactgaacctgctttttttccgttaccctgtatgttgccattgtttgacctctttccaccttggtttgaattgatttgatttttcaaattctagtctagctagatggatgtattggttgtagtggtgtgttattgagttttcttttgtctagctgtatccacacgtcggactgcttctttgaactttataaatgcatctgctcgatccaagaattttgccatggattctgtcagtctttttatgtctttccatagttctcctatgggtacaatacctcctaggattgtggccaaccttccttctttggtcaatcctttcacctttattacttcagtcatgaacctactgatgtatgctcttaaaggttctcctggtatttgcttcacttctaccaagtcttctaaatgagatggaagctaacgagaagagggaaactttgcatggaactcagatgagaaggaaatccatgagctgaacttcccaaagctaatttgaagtaccactgttggccagcctccaccaaagtagctgggaagattctacactgtacatttcctttcaccccttgcaagtccatttgcttttcaaagtatttaaggtgagacaaaggatcttctttgcatgtatacatcttccatgttggcattctaaacttgggcagtaatttgagagcattaatttctagtgagaatggtgatcctcttgctcgatcaagttcaagatctatgagttttgggccggccaggccttgtatgaggctcttaagctgatatatttctgcttgcactaatggatcagcttgacctgcctgttgaccgacctgtgtcacattaggatctctatgaactgtactggggacatagttgtttgcattatttggatggatagtaggaggaactttttttctatcccagtcctcttttatgattcagattacttctgaggttgtgcacggtacccaattggtcaaacactgatgtgctaagaggtctttgtgtttgacctgatatctccattcgattatgggtgttaagctgaatatttcctcccaaagggcaatctggtagatctgcccatctacgatttggcccacagtataaacctgtggcctcggattgggaggttgaccgatgtgagtttgtgcagtgtgatcaactatatactcttctgacccatttagagatcccatgagaatactagtatcagtcactggttgatggacggtgatctaataagctctttggatcagcacgatggcctgcctagaacggttgtcaatggccgcttacagggctctcatgatctccatctctcgatcctccattcctcgaactagcatatctgcttatcaaaagcaagatgaatagctgctcggatatcttgttgatcatggtatagagtgatattgtagccttgcattagccccaatgtaatgtccgtatttgaaaattttctaatttaaatttaaacttgttacatttataaaactcataggttgggatctcgagtttaaaacaacggctgaaaatacatattctatacatatatagttacatattattatgtttttttacaaacaacaggcaacaacaaattgtaattcaaaatgtagtatgaccgagaccctccaggttgcacagccgcaatatgtacaatctttgttaagccccaactcactgctcctccagcttagcgttacctttacctacacaaggtagcaaactgatgagtcgacagactcaataagatatgcataacatatatataagcaatgcgataccgacttaatgcttaaaccgtcctgagcccaattaccaagctcaccaaatggttaagaacgttctcaatggaagtacgaccactgtaccatatgtactagagtaccaactgtgtactcgtactcgtgttggtagggccattattgtacttccgggaattactgagtgttgtaccacatgcactccgtatcccctggtactcgtgttggtaacaccgtaactaccctaataccctacattgtactaacacccttaaaattaactcattttagtgttagtagtgtaacaaataataataaacattcatttgcatatacatactttatgctatcttacctcgttccagattcaagcgtgcgggtcgacctgaatggaaaaccttcaagctgaacggaggtcctaagtcacattacacatttgggtaagaaactcgaataacttgatccaaaaccctagctcacaactaaggttaatcttaatgacacatacaatatactactacccaaataccaagggaaaccaaactaagctcgaaaaatagcacaaatttggaaaagttgcaatttggggggtcctgcttgtaaactggttaaccggttttacagaccctgtaaaactggtcgaccgatttacaccagcaaaccccaaaaattgcataactcgaccaaatcttccctaaatgcaaacaaagaacacctgtatacatatcctagaacaaaatccacaccaaaacagcaaaagaaacacaataaaattcaacataccattgttgagtcaagtttgagttccatgacctcaaacttgctcaacccaaaaattaatcatcaaaagaagtgcaaacaatcttagaatatcaattgagacctaaagaaactaaccctaataattcaccaacacagaactaaactcatcaaaaccaaccctacacctaacaaactttccaataacatcataaatccataatagagaaagcttagggttttacctcagattaagctctcaaatttccacataataacctctgaaattgaagaaatcccaaccctaggctactggttcttgctagctgaacaagaaagaagacgagtgatattgaggtgttttcatctatttccttattttgcaaattaatggataaaatgttaactaattaacctttatttacttaagtggcagctgtcaaacaaaggtggagacacctatccaaaaagggcaaaattactaaactaccattacctttaaacctaactcaataaacggcttaggggtaaaacggtgcaataccattatccgccaacaccaatcgtttgagctacataacatgtttttatcactaaaaaggctctgtttacccatgtgactaaaatatccttcgttgtattttccatgccaccgagctaaactcacaagaacaagatattttgcggaaactataaatgttcacatatatccgtcaataataatatgaataataataaaattagtatttataatctcactaatccatatctaaatcatgcggtcattacaattattcccacgttaaaaggattttgtccccgaaatctaacctgaatagctccagatattgagtcctcacgtcagactccagctcacaagtggcttcttccactttactatttttccaaagtattttaaccaatgctatggttttggttcgaaggactttctcctttctatccagaatttgtactagttgctcatcataagaaaggcccggtcacaactataaggcttcgtaacttagaatatgtattggatcagatacgtactttctcaacattgagacatgaaatacattgtgcacaggtgacaatgttggttgcaaggctaaccggtatgctacatgtctgatcctttcaagtattttgaaaggtccaataaaccttggacttagcttgcctttctttccaaaacgcatgatacccttcattggtgatacacgcaggaatacatgatctcctatctgaaatgtaacatcctgcgcttaggatctacgtagcttttctgcctgctctgcgaagcaagcattcgagctttaatcttatatattgcttcatttgtcttctggaataattcagggcccaaatattttcattctcttgtttcgtctgaataaattggggagcaacactttctgccatagagcagctcgtagggagccattcctatggtactttgataactgttattataggagaattcaatc

SEQ ID NO: 37166 - DNA, 6965 bp, Cannabis sativa
tactgcgtcaatcccacgatcttttctgtttatatccattgtaacgagaagggaaacacttcctctccaagtttacagccctataaatagtgatacatgtgcactggacaaagggtcgcaaacagtttagtcgagaccttaccttaaatatattatctaagaattcttattcagagatactgttgtaagagctataagaaaatgaatctttctccttgttcttgagtcaatacaaataacgaggattaggctattaccgaactgctcagggctgaacctctataaaattcttgagtctttatatttgttttactatatatcgattgctataaatcacttatcgcttactaaataagactcattatcgttggctaaaagcgaggtcaacaaagtttaacatttatacttttaatgtatatgtaattagaattttaaattagtttgttaaaaaaattattgttatgagaataaataaatagggtagtataagaaaaaatttgagtgttatacataatgaattatttttatatttcgatcatataaagtcgttgttatcatcgtatcttatttgttatcattactgtatctcgcttggtcatcactgtatctcacgtattgtctctctatatctcactcttttgtcattgtcgtatcccactcgttgtcattgtcgtatctcactcgttctcttacctatcatgatcaccgtatctcacttgtagtttgtcactatattcaaaatcaaacttgtcactttatatttttttgatgaataaggaaagttgtattgctcaaatcaccaattacatccattgtttttgtacagaactgtattctatacactatagttagatataaaatttacaagaattacaagtttagcaaccattgcttatctattccctctgttttgcttggaatcagccctgctattctccttttactatcctgctgaacattgttgactatgacattaacttgccattatttttgattccacaaaacacatcattccttggaccccatagctgatacaccaaagcagccaaaactgtagtcatcatgcttcttctggttgctcagatcttcttcattttgctgatacattgcagaagtttctgcaaactgactgcatttgttccccaatgcagcttccttttcacttttgataacatttcttcctgtattcataattaaaacaatgctctgtggtttctttttccttcccacataatagacatgtcatgtctatattcttatcataattaccaactctttccttagtatttaatatgccccacaaccccagccatagaatgaatatgttcttaggaataacaagtctatcccacacaaatttacaccatgatttcttttcttgtttgttgtatagtaactgatagctatgtgggattttgaatttctacaatacaaatgtagctaggtcagtttttagcttcagtttattcttgactccaaccagcttattccaaaaccagctgcaataagtgggagcttcatagtcccaccattgtttgacttttaaatacacattgtgtatccatttgacaaacaagcgatctttcttgctagctatatcccatacatatctggccaaagctgctatgttccaattctaaatatttctaaaaccaagtcctccagcatctttgggaagacaaacatgttcccaatccaccaaactagagccagccccaacctgattttctttccataaaagcgatctgtaaattgcttcaatatccttaagcaacttctttggaaaaagcataatctgagccaagtatgtatgtatggatataagaacagcattgatcaaagttactgtccccatataagacaagtttcgagtgctgaacaatctaatcttactgaccattttctctaataaaatctgacagtcagaattagagagtttctttgaacatataggtattccaagatacctgaatgctagagagctccttttaaagtttgaggcctccaatattcttccaacttcagtatctgacatgccagagcagtaaatcacagtcttcggttcatttggcattaaacgagaagttgaagagaataatttcaatcctttcaacatcaacataattgagacaaagtctccatgactaaatgccaaaagatcatcagcaaaacacatatgattcaagttcaatgataagcatctttcatgaaatttaaatccaagccattccccaatcttttgaaagatcctagacaaatactccatccctaacacaaaaaggaggggagacatgggatctccctatcttaaccctctctttgcattaaaaaagccacacatggagccattaaagagaagagagaatttaggtgtcctaatacagatcattataagatcaatgaattgagcagggaacccaaaaccagtgagcattttttctaggaatcccaattctacagtgtcatatggcttccttaaatctatcttggtcatgcagcttggcttacatttccttctcccataaagcctcaccaaatcctgacaaactaacacattataagcaatatacctaccatgacaaaccccccttattgtcaacaataaggtcaggaaaaacctttcttaacctattgcagatcaccttagtggcagtcttgtagagtacattgcagcaagaaattggcctgaagttagccacacattttggacaggtaactttaggaattaaagtaatagtggtggttttgatttccttcaacatttttctaatactgagaaaagataagatagcttcaacaaattctgttcccacacgtgcccaattatcctgatagaaggcacttccaaatccatctggtcgtggtgctttaataccaggaatggaaaacaaggcttctttcacttcttgttctgtgtattttgccatcagaatatctttatgcacatcagtaatcttagggcccagattaatcactgattgcaatactttcttcctatttttcatactagtaccaagcaagccttcatagtaccttagaaaagctttttgaacaccttctggagaatcattccaagttccttgctcatcttcaatcgagaaaatcttattatgaatccttcttgatttaagagaagcatgaaaataggctgagttttcatccccaaaagttgcccaagtgattttagctttctgagacaaggacatggagtaagctttatggacttcattgtatcttctacttgcttcctgttcagcttccattaactgcaggcatagtggattctttttcaattcctcttgagctgctattagttctgcttttgccaccatatcaactttttgaatctcagaaaaaccctctcgattgatcttcttcaggactagttttagtcttgtgagcttagtaaccattttaaacattttcgagccttgtacatcttcattccagcattgagtcacttgagtatcgaaatcaggagccaacttccacatattgtaatacctgaaaggtttctttcccaagctcctatcttggtatatagatactaagatagggctatgatcaaaagacaattcaggtaaaaacactacctcggaatcagggaaggaattaatccattgaggattcaccttacctctgtcaaacttgaaaaaaatcttgtcatctggcttttgcttattgttccaggtaagaaaagagcctaaaaacttcagatcagtcatctcacattgctccatacagtccctaaacctttgggaaggaatgcagtgatctttccttcccactctctcattggcattcaatattcattgaagtctcctataagtatccaagcctcatgtattcctatagctaatttcttcaaatcacgccatattttttctcttttttgctcatcattaaagccataaatgaatgttacaaaaaacttcccagtttgctgcagtgagtagatgtggcaatgaatcaattgaatagaacaaaacttcatatccataatataagcagaaggttgccaagctacaattattctccctttatctaaccagggattattgttagagaaacaccatccctgaaataaactactataaagcttccccatattcttattttgaaccttagtgtctaggacagtaacaaaaccaacattctttgaaaaaatcaattgcttgatttctttatgcttttattggctgttaatccctctcacattccaacataacaatctatccattggaagtagagggatctcccccctcccatattactcacttcctccaacacattctctaaagaatcaaatctgtgatttactgttgtttcccctgtttcctgttcaagcatcactctcttttccttgaccaccctttgaaatccctcttcatcaacctgatcctccttcttctcctttgttttcttagggatccaaatttgtttcacttgttcttctttagcgtctttcttcctacatgattgagtatcatgcccaatgctcgaacaattataatagacaagttgtatccattcatacttcacttccaattaaactcatcagtaaacgaaatcttattagggaattccagatatagactcaactagattagaattctagggtatggaagacgatctctgttcttaatgatgttgtcaacctgtagaggctctcccaactggctcactatcttgaacagagaattttccccccagtatttgatatctaatcttttcaattggatccatgttggaacattggtgccctcttccttggtgaaatcgtccacagagttccatggcttcatcaccataggcttcctgtcaaagaatatgtacccctgctccagaaccttgtctcacatttctaggttctaaaatttgataatgaaaattcctctagtaaggagccctactttcaccattgcatccttccatattcgacgaacaaagccttctagcatgcttattagagggttagctccaataacataacacaccagtgatggctaccaatagttaacattctcagcaatgtcttcaaactcaatcttgacattcttctttcgatctgatcttttatctgcaacgtcacctcccgatctttcaaaaaacatttccaggttcctttctacattagatctgagtattggaggagaagggttcttccccgtactcacatcctgagtaactctgttagccaccgtgagccaatcggagaagtcttaacagatctcgcttgcaggcgaaagcattccttcagcgtactgttccattgacccctgacactgttccaatgcttccaaatcttcagctatatccaattcctgaattccaatcacagcatccacggatctggttttgataaccctattagttgaagacagccctgttttcttccccttggatttctcttttccggccatttttgccctttttgccatagcactggtgaagcaccgaaagaaagagaagagcgggtttattttatttaattacaatttatacttgtcactttatatgtgtttactgaaattggtagcttttccttaatcttgatcacataataatttcttaataatacctcatcaaatatgagtatgtgaatctttcctttcaaattcaaatacattactaacactaatcttaatttgagtggtgtctctctttatttgagccttcactcattttcttaatacttatcttaaaattagaaatttaagctaattcaaaatattaacgcatacatattatttgttacatgtactacataattattttttttttaaaaaaaaactaatcgtaagtgataaataaatataaatatattaatttagttagctatataaatctacgtatataattaacttatttcttaaaaaaattagaaaaatagatttagagagaacaaataattacttatatccttttatttttatattaattttaataaaaaattaaaaaaataacatttcaaatttaaatattcaaaatataatttaaatgaaacaaattttttggggcaacttattttaatagaaatacatatgttttattttgataaacaataaattatttatctaatgattgattaactaatttttaaatcggtaaataaataaatatattgagtggcaggactgaatgtgtaaagtccttttttggcaatttagattctaaaatattttttatttggagtgaaatttatttgtgctttcaattcgattttattatctttattattcagttttattgctcttttctatcttaggaaagattaattttttagctggctttttcttgtatggaaacttcttgtaagagaagaaactctcttatggaaagttggtttttaaaggaaactttgactattattattttccttaataagtttgattgtgtcttgataagatcagatcatatacactatttatggcaagtatcaagatccaatacaagatcgaactcgtttttgacaagtttccgtttctggtcttatttgctgtgtcaaaatctcgttctgatgctgcaaatcaagtttttcttagaaaagttttgtacaactgtagattcgactttgtggttgtctctagggtttctatgttctataaatagaacctagagaacagccattcgaatcaactcatctagattttattttttgcatttttcttatttgtgaagagagagttatttttgtgagaacctaattgttcatctaggttcttgtgtttttcatatctgttcttaccctgtcttaaggttagttagaacactcgattgaacaagagagaggtcttcgggagaagacttcttcaagtcttactttgggagcacgtaagcacgcacacttcaaaggcgaagggagtttgctgtttgaaggtatttcagaagtcagatttataaagtgcattacaaaggattacatcaataatttagatggagtctaaacttgtttaagtcaattg

SEQ ID NO: 37167 - DNA, 2162 bp, Cannabis sativa
tgtagacaattcattaatatatattaagtacttctccaacttaattaatgacattagtttaattattaggcagaaatttcatgaaattggttagggttttgagttttagtagacccaatattggggttaaggacctctctctctccttaaaaaactagtatagtttggtagaatacaggctcctacaagtatcgctatatatacattaacctggtatgaaaagaataaaaaacaaattaattcacaacacaaaaattacatgttatgtttagtgtgctttatgggaaaaaaaaaactaatacacaaaaagaggcgttcaaactgatatacaaaaaagaatctaaatttaacactaaacaattaaccaactaaaaaatcggccattacatatatgctgataattatatattttaatttaattctttattaatacttacccatgacatatttaattataattttatatgtaagagaaccagtggatagagaggcagaggaaactaatcaagctctcaaatatatgatttatacacgtacattacatatatgtataaaaaatatctataacctttggtgcatgctagatttagactttagtgtgaaaagatgatgattaaaaaaaatgatagatttaaataataaccactcctatgtaattcatttttcttgtgaaccgctttcattataattaacgaaagaaagtatccaaaagaaaatacggtggtatagtccttagctttgagggtaaatttctgttataaaaggtagtatatataaatatgtgcatacaactaaagatattggtaaactttttttcaagaaaagtgagtatttttttagtacaattaattcgttaatttttcttatggtacgtacgtatactatttacgaaatttatgtaattgtagagcttttaatattgtaacttaattattatcttccatagaaaataaaaaagttaggcacactatagcttttatatatactagccagttaataaatgtgacaaattatatgctgcaatttttccaacgacataccttatgaattatttcataaatataaaagaaattataacatttctggaatattataaaatattattacgatttttaaaatgttatttactataaatatcattttttatatttgcatgctatttgtaatcgatatgaataagaggtggaagtggaacttcatgcatttatactctaattaaattgtgacacatcaattaatttaattattttaaggaaaaaaaaattatctacatggttaatagaatctaaaaaaagtagttaattagttgaattattatatttaaactacaccaatttttaacctataatcttaattccgtttatacatatatgttattatgatctgatcgtaagagacagggaaggacgcatgatgtctagtcgaattcttgttctttgagttcagataattcggagctggaatagtagtagtatataatatatatatatatattattatgtgtgtgtgtgtgaaattttgtggattgtagaatttgatgaatagggtaggtttgggtgaatcatatgatattatataacaaataactgtaaagtgtataaaaggcagtagtcagaacaaacccgcgtgtgcgtgctgtacactgcgcacctatatatccatcatcactttgtttgccgctgccaggcctgaattatttctggttctccactgcatcttgatatatatataatctatcgatctatctatatatagcttttgtgagaattaaattgtttatatatatacatgttggagatgtagctcatgtataagtctaacatagcatttataattacatatatttgatcatttttcataatctatacttagcagattataaggattttatgtatttagactagacgattgcaatataaatctatgaaattatatagttataagagataatggggctaagattatttgtgtatattatatatatacttctcctacgtgtattacatctctgtactaatataattattattagctttttaacacatacttttatatattttatatatttatgtagttgtttaacgaaaatgttaatttaaaacttcttttttattaaattagtgattaaaattaatacagttaaattaatcaattaaaatacc

SEQ ID NO: 37168 - DNA, 2154 bp, Cannabis sativa
tgcctcaacgttaatatatttttatttgatttattaaccatgtaatcagataaacctgctaatttcttgtaattctaaaacgatagttgtttggattccatagattaagcatcacaggtcatacgtatgagtcagaaatatcttagtttgttatggctgtttagcatcatgagtcaaattgtttcttgtgagggactgctacttggattatgtttctactgatgattcttgttagtgggaatgtgttacaagttacaaccacttgggtagaagtcacttctcaaaagctagtctaataggagggtgtccaagtagttatataccttcaactaatcccatactaagtcgacgtgggatcctaactgtacaaattcaaccacttgggtagaactagctcctaaaagctagacaaagagatgatgctgcccaagtagttataccaccaactagttcatacttaatggatgcgtgatcctaataatccactcccctttagagtcgacatccacagggactcactttgtgttggcttgctctcggctttttccttacgttgccccgtcgtcgatgttggtcccacttttgggtgctggtgcatgaccccttttgtgacgttggtacttgggtgcaactgcatgactttgataccatttgttacaaccagttgggtaaaactcacttccttatataccaccaaccaatctcgtacttagttgatattatggttgtttagcatcacgagtcaaatttttttgtgtgatgctacttagattatgtttctacttatgattctctttagtgggaataaaatatagctatttatatctcttcaccgaactcagttgtttgttctcaatctactcattacaataatttgtcctttcaaacactgaactttatgagattgcaaaaagaaccacagcttagaaaaaccagtcatgagatagggtgaagaagccagaaacataagtagaaggctagggtttctaaggatcccctacaacctcccaccaagaaggaatttactccaaatcttgtctatatttttgtatctcgtgaaagtataataacctctacctaacaacaccggatatcatgtacacagtaccatgaccgctttttcctctagactccacccaaattaccttaatactgcttgtgcagtaaaccagcatttatgaggtttattaaataagtaaaaatttgtatcatttttgtttcatttgtttttgttttgtcctttttacatttaagtttgtgtgaatacctttcaaagcttcttatcatggaagacataatttccaagtacgcaataggtttttaataattcttatttcattttaatttgtttacgttgtgttttatttattttattttttgcattattggtctcaaactcatatggatctaaattttttcttgggatttacatttatatgctttagaattgtggctaaggttcggaaaaaatatgaataaaacgagtaaatcaattgaactgggtcaaaaaatctggaataaaacagtgtatacaaataataatataagaaaaattataatgggatggtcagattttttacacaagtaaaaaaaggaaccatggttttcctcgccacaagtgaggatcccaatatatttggaagaaggctattctaagacatttgactttgtctctttttcaaaataaaataaaatggaacattagttgattggtttacatgcacagtcatcatcatgccatccaattctgctgtcagaacataggggcaatgggtggaaatttaaaatcctttcttttttatcttttttttttggctaattatgatttttgcctcccgaactttgacatatactaaatcatgccccctgaactttgaagactgttaaaaatttcccctgaaatattaagattgtttgatttaaagacttttgtttaattttaataagaaaagtttaacatagatgaaagttcagggggcataatttaacaaatatcaaagttcgaggggcttgatttggttgatatcaaagtccggagcgcatgaattagtacaaaattgaaggaaattggacaaaagtccttatatccaacaatcttaatagtttaggagaaatttttaacagccaaaaaagttaaggggatatgatttggta

SEQ ID NO: 37169 - DNA, 3534 bp, Cannabis sativa
ttttattttgacaaaaaataaatttagggtcctatttgtactattttgaaaaatacagggtcaactttgtcatttattaaaacagatggtccaattgtaatgtttgtaaaatgcatgatccaaaatggtattgaccctaaaagtaaaaaaaaaatatacattatctgctaaaaaaatatataaattattaataaaatcattgtaatcaacacaaaagaataaaacaacgccaaaaataaaaattattataaaatattaatttaatgttttttttttgtaattcaaaacgacatgtcgtacatggtttttctacatgaaaactctgtcgttttctgtataaagaaacaacgtgtcgtttaatcagagtcgtgttcttcaccataatatattgatcaaagctgcttgaccataccaccacgtggctacacaggagtggaggagtggggtttaccgtaagcttacaaggaacgtaacacacccaatcatgttctccctaacctttcttccccaaacgggtcggtgaaggaggtgacccccttcacaagaaaaaatctcacaaagatcccaattccattaccagatatatatatatacacgtatatagaatcaaattacaaagaaaatcaaaaatggagagtgatgaaaatggtctgaaacaacaattggaggaattacaaagagatctatcaaagaagcaaaaattcgaggaagcaatatcaaccctaaaatctcttcttcatcatcgttacgcctcttcttctccttctattcaaaaattggtacttttttattctctgattctttacatgtttttaatttaatgggtttttgataaagatttgaattttaggtttttttttttttttgtagttctattctgttatatgccgagttgcgacggtgttaaagacgaggtacacctcgccggggttttgggctgccggaatggatttgtttgaacaagcccaaagcttggtttcagattcttctcagaagacccatttgggggcttgtatttctcaggctaaggaggttttgaatcaggaagataatccttctcattcatcccaatcaaccagttcacgaggtaatttttcgatttggggtaatgatttgaaatggggtttgttcatgtttgaatctttagttgaaaattttgatcaatttcaggttacttgtttgagggtcatctaacggttgatagagagcctcctcagcctcaatggcttgttcaagccaatcttctgaatgctgcagcttcactcttgccagctgaatcttcttcttcttcccaatcaatagcagctgcacttgaagatgagaacccttctgatcctgcagcagctagcttaattcaatctcttatggaaaatttagatgattttctactaccggtattgctctagattctatcttagtatgtagcttttgaagtattatatatgtagagttcttatgaagtgaaatttgtgtagataatggaggatgatagagcagcccctagagtaccaccagctagtaaagaagtagtggctaagcttccaataatcaatattacaaaagaggtattggagaagcttgataaagaggctgagtgtgctatttgcaaagagaatttggttatgaatgataagatgcaagagttgccttgcaatcacactttccaccctccttgcctaaagccctggctggtaatgccttaaacttttgattttgatgttactattgtttcttagtttgtatgttttttttttctttggaaactgatgattttggatagaattggaatcaactttttgatttgatattactaaagtttcattagttgatatttttgtctccttgttttcttgcttgagaatttacatttcatggattggtttggttgataaatggatatgcaggcacagacaaacttgacacacacttatgtatcaagtaattttaactaatcatatttatttaagaagggttttacacgtaagtgtgtgatttatttttatgtacacatatcattactcatggttgaatagatgagcacaaattcttgtaagacatgtctatactagttgaaatttaagaatcatgcatataaatgccatcaactttggatttgatgttactatagttccattcttgacatgtttttaatccgagaaaggtagctcaaatggttggacatgtggtttgctcccacaagttttgaggttcgagtctgtcttggttacctacataggatgaacacaattcttatccaatatgtcgacacaagttgagaattgataatcattcataatttcataaaagtgtaatggattttgagttggtgttactatagttccatagtttatgttattgttctcttgtgttcttgcttgagaattttcattttattgattggttttttattgataaatggatgataggatgagcacaattcatgtccgatatgtcgacacgagttgagaaccgatgatcatgcatacgagagttggaaggagagagaaaaggaggctgaagaagagaggaaaggtgctgccaatgctcttcatgggggtgaatacatgtatgtttagagcaacatttgctcatctgtgttaatcattatttgttattacaaattaacagttgtgcaactttttaatcttcttcttaacttttcatataaaatatatattctgagcacataacatattctggttctgagttctattgatattgcaagatgagaccatgaatttaaatgtgtttgctgtatttataaggtcaatgttctttcagctcgaactatatttgataggtttagtttcaacattggtcattgaattttactcagttccaacattttagcattttggtttcaaatataataaggttgggtttgagtttctctttgttgtatagtttttttttttttttttttttgtaacttttttatcttcaaatgttatggagtgtagggttattaagaaagagaaatgctatgatgccaagcactcttgtgaggtaatatcactattagtgcaatttaatatcaggttttatttgttttactttaataagaaaatcgtcaaacaattataaagcgacacttcattgtgattctaggtactatgggtgtctcatagcaatgctcattaagaaaataatcttaatccaaaccaatttacaatttaaatattatttgtgcaaattggatgtacatttgtagttacttacaagtaatcagaatgacaaagaatcgaattgatcatgaatcagtttcagaataaattgtttattttttatttatgtattaatattgctttcgaatccgaatcgattatttattttaagttacaaaataaatttttaagttttatttggattagttttttaagttttattaggatttcttttgatgttatttataaaaatatatataattaaaaatgagtaaaatttaattttcaaaattttagaaggaatagagtggccttatttggaatggggttgtgtcgtaatctatgttgtcttggactcccttcttctagg

SEQ ID NO: 37170 - DNA, 3243 bp, Cannabis sativa
taaaataaattccaacaatataaagtacaaaataatacaacggtcgactagcgactatcaaaacatagcttttgttgttttgaagattcgaacactccaagtctaactgtctgaatatgtacagtcttcactaagctctagactcactgtggttcaaatttagtcttgcctttaaccacacataaagacatatatttgagtccacagactccttaagaaaagcaaaaaacatacaatatatatcttacccgtagttaggggcccatacacctaactatcgtaagtcaactacctacatccaatgcatatgctaagtctcaaacattcctaactatattacgattcaccataatatcaacctatactcaacactctagtcatactgatgtgatagaatgaatccatagtataagtacaatttaccataataccaacttatactcaacattccacttgtactgatgttgtaacgtccattggcactttactatattgccaaacatacatatattgtctgtatccaggtgtaactctatgtacacaaatacaactataactgatatgttatataattggtaagcataatacatgtataataaacatgtgaatatgtccatgtttatactaatcataccttaattttgtaataggtgtgtcgatcaacctgactgaaaaatctccccgatgattgtaggccctaagtcaatctaacttaaatctggttagtgtctattctaaaaaactttctaattgccctataaaatcttgggttttctacaaaatacacggtgaaaataccttaaaataaaatacatattttggctctaatttatgtaatactgtagagtttttcataagatttaaaatcgtatatggaatgtgaaaaatggacacgtgagttataaagtgtggccaagatatgaaaaataacctttcctgacactatccaattggacatctggttgttaaaactctgtaccaacctaccgactagttcctggggagtaagagctcaacaaaattcaagtattaagcctcccaaaacatgctcctattaaacttcaccaatttctaccaaatgttctagaacacaaaaatataaaccactaaatatgttccacaatcaaataccataattaaacaccaaatcaaaaagtgccatggatgagcaatgcttgagttctaaaactcaatctcactcaaaaaaactacagttgtaaccttcaacaaaaactagttggattcttaataaaaaaattataataaatagctcacaacatcaccacaactaacagaatcaactcaggaaagaagcacaaaattctaaccttaattcatcaagaactcaaaggtaaagtgattagaagtcttacatttatcttggttccaaagttccctgaatttctagttgaatacatggaaaaattaagtgtaattattctgagaatttctttgttcctttggtttaggttagtttcgagagagagaagaaaaagctatgagagagggagtaacttggtttatatttgcccttggttttcttgattcttctagcacaagtatttagcatatatcccttatgtccacataattcaactaagggtacataatttaaacgtatattgcaaaatactatactacacttactttactactaagcgatcttcaaatttatgggtaaaatggtcataaacaaatactctgcattaccatgatattctaaccatccatgattgcccagtaattctaaaatactaatgcattctatagtgacactattggctaatccgtcgaatttctactattatcaagcatataatatgaaaaaatcaaattttatttataacacatatgccaaacctaaaattcaataaaatctctataattgagaaattataatactaatgcctaacaataggacttattttcacattattgcacatataatcatattttattaattaatcactattaaaattataattatctactaatttctatgtttaatcacgcagtcattacactatgtcggactttattcaatttaaaaagcttgtagaaagccagtttgatagaaaacttaagaggttataggctgattgggaaggtaaataccaaaccgaagatttcacatattggttattaaaaatggcatcaactttacacattcatttccacaaactttacctcaaaatggtagagttgaattaaagcatagacatattgtgggacttacctttcttgctagagccaacatgcctttgaaataatagtgtgatgctttcatagaattatttatcttataaaaaaactacctacagctaatctagaaaatatctcaccattagaaacaatttatggcagaaaactacattaaaaatttcttaaaacttttggagtagcatgttatccatgcttaagagcctaaaaaactcataaatttcaataccaccctactaagtgtgttatttagtgttaccctgagagcttcaaaggttatatgtttcttagtagcataggcgagtcaacatcttaagacgttattttttatgagatgaagtttcttttaaattatggttttctaaatacacacaaatctaaattgagtataaatgttcaagtcccttattagtcatcattgacaaatattcctccaattatctcaaacactcatcttgttgaaagtcatctacctcaaactaatgaagatcatatccctagtgtttttggagcaccctcatctttgagttctacaactaagaaactagataaaagtatgctccatgtatttgatcaaacagatgttgatttgatagtcaacattcaggtgaactaagaactaaaaatcatagtgcttgtaatgaccgcttggctttattatgagaattagctaaaagttagggcttattatcagaaatacgagttattatttttgcaattgtggtgatatatttaaattctaggtgtattagttttgttatatgtgaaacataatagtttttaaattttatgcccggtaacagtggaatgcaacgatttgatcaatttgagtcacatagatacattttagtatcatagaattggcgggacagtatagttagacattaagaatatcgagaattttcggagttatggattatcacaagtttactatgaggtggttagataacttcatgggtaagtaagggtgaaattgttatttaccctaattgtttattatttattattggatggattttttat

SEQ ID NO: 37171 - DNA, 3551 bp, Cannabis sativa
ttacataaaaatattgcataaaatacaacgacgttccaaacaagccctcaattcatctctatgaaacttccacttcaagtattgttctttaataaattacagaaatacatgtcaaagaaatatatgcgagggtctagaagatggtgaaaaggaagaaaaaatattcaaacttttttttttgctatgaactcaaacatgttcaatctgattgatttcattaacaatcaagtacatcaaatgccggagtttgacttttatacaagaatgacataagaatgagaagagagacaaaattattgagtatttgagttcctttaataagatccccagaattttaagaaaattttcaagaaatcttaagagttagatctgtgtccatctctattgatctttccccaaatttgacttacagccctggtatcgattcaagattgtatttcgcagaaggtgaagctttagtttcagcttcgtcgttctccttcgagtttgacatatttttaacatcaagagtttgcaaataattgtaggaagcatttcgatttggtggaaggctaggattgcttattctgcttgcaaggaagcggcgaatcaggccccttaggaatggagccatggtctccggctcatgctccaagtaatacattatcccgcccatgcacagacaaaacaagaacacctgtacagttgaaagaatggtttagtttctaattagaagccaaaaggaaaggaattatatagtaaaaaattatctttgtttcattaggaagcagattcacaaacaaggagagaccagaagaagatccttctttagatgattgaaaaataagagttgcaagttgttactaaggatatgcagagatgagattttttagcggactcggtaatgcaaccccacattccccactcccttatataaacaacagagtaagaatatgaggtaagtacctcagcattcttgatatttggtagcaggtggcggttcactaagatataccataaagaatccccagctcgtggaagaacatacagagcaagttcaccacgtctagcttttttctctatgagtactgaaagcgcagatattccacctgcaatccaatatacaagcttgtggtcttttgttgcaactttcctatgtaagcaaatgaccccctagcatcaccacagaaaagttaacactttatgcagattataatgaaacctctaaaaactaacaggaaccagattacctgaaagattccaacaaaagcagataaaaatgatgttgaacgaacagcgcctttgacagcaagccaacaggtacgagcaggagaactcaagaactaaaagtacatcaagttaatatgtaaatgatcaaaaagaaaaatatgtaactacatatttatatgataatgcaatttggtatcccattttgaaacctattttcttttccccatcgaataaaagaaaaagatatagactgttagtagctatgaaacagcaaaataaagataagaaaaattggttaagtgcagcatacaaatcttaatcataccattcaagatataaacaggattaacaacagcatcttatttattttacttctctggaaacagaagcccctggcaaggggaaattgagggagagaaaatacgagtgggtaaaaaatataccttctgtaagcgcagaacaacaaatggtacaaatgtcaatgaaaaataaagaggaaatgtttttctgaaagtagctgatgctgcttttgcattatgagctaaacaagaacttgtgtctggatgaataacagagcaagggatgatggcggggaacttttccaactttacattgttggagttacttctttccgacaaaaaggctgacagtgaggcaatgtccactggtaaacctctacagcaatctctcacagctttgtacacaggctttgaaactggccctgtcttctgaatgaaatcttgatacgattttggaagactttctggacgcataacaaaggcatacataacctgaagaccattttgatattaataaagtgacatttcccacatttgatagaatcacactttttgttagtaataaatgaagtgcaaaataaaagcttttgacctatcaaataagatttctattacctgtgcacatgcaacggaaaaaagcaatgtgtccccatgcctcaaatggcttccccaaattggaaacttgttcttggactttgcagaattgtaagcagactaaagaaaaaaaaagggaataacaatttgagtaatattagaataccagatagcttaaaagaagtaataaagagactggattcattcagatactacctgagctaacctagccaacagatatagagctagtgtgcgccttcggtttgaatcgtctaaagctaaaatagacaaaccagcaactgaacctgctatgactctgctccatcatgcccttaaaaaggtcaaaaataagggatatgctttatcatgaaacaatagcaagcataaagaaattccggtggtaaatcgaaactccttgacaaattactcacacgatgtaggatgtagtcttacacatttaatggagtttctttcttcctcaactttaacaacaagcatctaagagcatggtatgatccggtgaagccgccaaaaagtaaaccaacgcgacatgcctcttctcttactataagatctttttctgaaacaagttgctgcacaaaaagaaaataagttaatgcagaaatgaaaatttgggaaaatcactatcaacccatccaaactactgaactagatttaatttacattttaacatcatatcatgaatagcataactcttaaatgtccttgctactgcaaagtgatttctttttcttgaacatagttgattataagtagcaaaataatcaaaattctcaagacagtcaaataatacttattttcccaaaaatttatttcatatacaagaatttgaaagtaatcagaaaaaattcttcaaattgaatcggttctctctgtatcaaaatattcaaagttcttccccaattattatggctcaaacttcttatagacagtgccttcattatcattaacactcccaatgcgagcaccaaactatagcacacatccagaaatgagaagaacacaactgtagctaatcattcaatctgttaaactctaaaccctaatttcatcttgtttcctcatcgctaactccaatgtcaagaccatcaacattcaccggccaaaacgaaaaacaagaaagttccatagaacaaaatcaagcaaaaattacagctaaagcgacatcaataccttgagatcaagcagcgaagaataggactggccacgaagaagcttgaaagcgcgaaggagaataccaataccaactcgtacaccataggatagaaggaagctctggcaaagattaccaatggcgttggcgacacaagactcatcgctggcatgatgacaaggcggttgttgcggggatccacaagcggcggccctccgctggcggcgctgaagttcctcgatggcctcgcgaagtcggtcttcggcttcccggag

SEQ ID NO: 37172 - DNA, 3892 bp, Cannabis sativa
cactttttgttgtaggattaattgttgatgatccccgagtcttaatcaactattttattgtatttatgcttgcttgttttaaacttcgtgctgatcgtgcctccagcttctcagagtcatcaacctataggcaaatgatgtctcaacagaaaaatacatttatttggagagatctctcttttgaaactaagagcatgtggaccttcctggactacctgaggctttacttctattgccatctattagatcttgttcttattttggtattgattactggaacccttgaatatgacatcctgcaccttggttatcttgcatttgctcttgttttcttccgaatgaggcttgaaatattaaagaagagaaacaagatgttcaaattcttgcgtatatataactttgctgttattgttctttcacttgcatatcagtctccatttataggggaattcagtggtgcagggaagtgtgaaactggtgattacatatacgaaatgattgggctctataaatatgcttatggctttcggattactgcaagatcagctcttgttgaaattattatatttatgctggtatctcttcaatcgtatatgttctcctccccagagtttgattacgtgtctcgatatctggaagcagagcaaattggtgccattgtgcatgagcaagaaaagaaagcagcatggaaaactgcacagttatgtcatattcgtgaagctgaggagatgaaacaccagcgtaatctgcaagtggaaaagataaaatctgagatgctcaatctgcaagtccaacttcatagcacgaacacaacggcaaatggttgtacttctcctaaaagtgaaggcctgagaaggaggtcaacttctcttacttttgaaaaggatgcggagacccctattagagagaggattgccttgaaaaagcagcagacaattgaaaaggatttggtatacccgtttgaatttcaagaatctcctgttgctcaggacatggaaatttcaacagaagatgagtctatgaaacattcagtagagcctcctcattgtgaaatttctgaagttgaagaaaatttcactggtaagcctttttcggatgtagaatacaaagacaaaagtagaaatcaggcaaaggaaaacccactagtatcagcagtacaacttatcggtgatggagtttcccaagtacaatcaataggaaatcaggcagtcaataaccttgcaaatttcttgaatatcacacaggaagaatctgatctgaatggccattcgtcttctgaggatggattatatgatgaaatggagagccagaaaacaaagtatatgtctttgggccgttcatcttcccttcagtctgatacaagttctgatgccacaagtcttcaattgggaaggatctttcgatacatctggtcccaaatgcgatccaataatgacatagtgtgttattgttgctttttaattgtcttcttgtggaacttcagtttgctttctatggtgtatctggcagctctgttcttgtatgcattatgtgtgaatactggtccaagttatatcttctggagaattatgctaatatacacagaaatttatattttgcttcagtacttgtaccagattataattcagcactgtgggtttaagtttgatttgggccttctgcgtgaattgggatttcctgaacataaaatcatgccgtccttcgttatcagttcgctgcctctctttcttgtttacttgtttaccctaatacagagttctatcactgtaaaagacggtgaatggatgtcattttcacactttaagagtactgtttctggaaaaaatgtttctataacttctcgttggactgacagggcaatggaggtcatgctcatggggaaaaatagcctgaaattaatattaaggagcatgtataattactgggcatctctaacgcatggtgcagaatcacctccttactttgtccaggtgtctatggatgtgcacttatggccagaagatggtattcagccagaaagaattgaatctgggattaatcaattgcttagaaccatccataatgagaaatgtaaggaagaaaatcgtaatctttgccctttcgctagtagagttcatgtgcaaagcattgaaagaagtcaagaaaatccaaacgtggccttggttgttcttgaagtggtatatgcctctcctttgacagagtgtgcttcagcagaatggtacaaatcacttactccggcagctgatgtggcaaaggagattcttgaagcacagagtactgggcttcttacagaaatgggattcccattttctatagtctctgtaatcggaggaggccaaagagaaattgatctgtatgcctatgtatttggtgcagatctgagcgtattcttcttagtggccatcttataccaatccgttataaagaacaacagtgaatttctcgatgtgtatcagcttgaagatcagtttcctaaagagtttgtatttgtcttgatggttagttgaattttcctcttatctattatacttacggaaaaatacgttggagccaaatttagaacttatattcatataaacttgaccaattctgcagctgaaaatttgttcttttatgtacattaaatctctgatcgaatgggttcttctttgatatctttttccaatttctctcatttaagtttaaagctgaattccttgaagtttgcattgagtataagaggctagaataatgctacgcacattaaacataaactctaagtctcatcattaccaccaaacactcatctctctggcttgtttagtgttattgtagtgtgtaaatgttatgttaccataaagtagtatgtagagtgaatgacatgttaagattcttgtatgcaaattatacaagggcattacaatttctatttatttattttcatgcagataatcttcttcttgattgtgcttgatcgcataatctacctctgctcatttgccactgcaaaagttattttctatcttttcaacctcatcctcttcacgtattcagttacagagtatgcctggaacatggagtcttcagaacatgcaggtggatttgcacttcgtgctatatatctcgcaaaagctgtttctttagcattgcaagctgtccaaattcgatatggaattcctcacaaaagcactctgtatcagcagtttttgactagtgaaatttcacaaatcaattacttgggttatcggctatatcgtgctcttcccttcctctatgaactgcggtgtgtgcttgactggtcttgcacaacgacatctttgactatgtatgactggctgaaagtaagtacatgaaattttcaacttttgtattctcttgattgctggtagtggtactatactgtatttttatgatcttagcattagagctactccatcttgatactctgaaacatactggcatgtataaataatacattaatttctgaggcctttctaattgtagtctgtacttgcctttgcacctagcaccctatggtctgtggtatttacttttatcaggctagtagtttttttcatgccaccaaagataggtttacttttctggccattatttattcctgcccttatttgttgtggttactcattacactttttagtaaagttagtagttttttttttttttttcggaaactgactcattgtttaattagctggaggacatacacgcaagcttgtaccttgtcaaatgtgatgcagtcttgaatagagcacagcacaaacatggagaaaagcaaaccaaaatgaccaaatgttgcaatgggatatgcctgtttttcatcttaatgtgtgttatctgggctcccatgctggtatgtaatttctgatatggactagtgactgaagaactttat

SEQ ID NO: 37173 - DNA, 7077 bp, Cannabis sativa
gttttcaaaaaataaggccaaacacgccaaattgttttcaaaaaataattttctgtttttaaaaacaaaaaatagttttttagttatgatgccaaacatgcacttaggttcttgggttttctcttgagttttttctccttgaaaaaattatggaaataaaattaaatgtaagaggatttgaagagtagaggggactttatacaggattttttgtaattaatttctctccaaaaaaattaaataggaaaaagcatttcctataaaatcgctatggcaaagtgagaatatcaaaaagtgcatttatgagggagtatttccgtcagcacgatccctcataaagcgtgatttgaaagtgtcataaataatgatagacatgagagcccgactgatgggtgacccgttaactctccacagaatagatgccaaagtcgatcacgtgggactcacgcgtgtcaacatccaggcaaataccaaaagttcacattcggacaggtgttcgcacgaggacttgggggtaaatattatcccaatttttgtccacttgatgtggcaattacatgtgattttattcagatgaagcttggcataacgtggagctttcggacaagatcatgccaggaagttcttgcaaaaggctaatatcgataaaatgtatgtaaccttccaggaagcacgtggatgatttaataatttgacagtcagggagagagaagatcaacataccctgcaagattgcatcttgttaaaaagacaagtctcaaagagagcttggctgggctgttaacacaccggctaggggaaatgaacctaaaaagtccgggcaggactaaacgcgcttcgatttcttcctcaacaaactccacgaatatgttcaacaacatcctacaaatacaagtttgactcttcagccaagaagtatatgagtttcaaacaaattgtaactgcatcctagaatatagggatgttttctttctattgctacctttaaggaactaattgtaacaatctccccttataaatagttgatgaattcacagggagaaaatacatgaaatcattatcttgactttaagagcacttttgtgaataatattctttgtaagcatctagagagttgtagctagaattcactttgtcttctttagtgatctgcacgacattatcttaatatttatacaactaaaataggagtaggttattaccaatatttaaggggctaaacctctacaatttctggtattctttatatttacttattatttctaactctttattagtgattaattagcatttattagactccaagtcagttggcaaattctccagtcaatagatcactcaaatgtcaattttgctccaagtattctctccaaaagggtcaaaaacagggtaggtaccttgtcctcaagctttataaccttgaaagtatcagaaccacatcctagaagctccaaaataagtacccaacgcccaggttaacatatggcctgatgctttgggttccgcttatccgattctgattccatctcgaccatttgtctagtttttcacaatcacttagagccatgaagtcagaagagtcaaattcacaacttcatattttcacttttctgacaagggatttactcaaaaagcgggtagtttcaagtctcccatttccacggaataacaacatctccaagaactggtcaccagcttcgcaagaacacaaaaataggctaagtgatgttcaaatatcacttaggcatcaaaaaatacatccctcatatgttttcccactcacccaacatctaggttgacatcacatgtcaacctggacgctaggccgagaacaaccttcagtaaaatgaccataactcactcaatattaatcgttttgacacaattcaacttgagttttagagctatttaaaaactctatcaagtcatatctcccacttcaaatgaaaatatgaagctattgactcaaattttacccccaagggagttacaaatttaagctacaacttacccagagtgggtcccgttgttgtaacttaaactccaaaaattgacgatcaaactcagaagttaatttttaccgtttgataataatctacgatccaaaatagcctaaatatattcttgcaatttctttggataatgttattcctatttaataggacctctttcacctataaaaggagagttagtttagtttatttttcaagttcagaaaagtagccataaggttagagcatccaaacttagctatttttctgtaatccatctcgtgagaattaaaactcgaagtagacgtagctccattactaccgcgagagagggagtgaactactataaattgttgagtctctctattcatacttaacatatatctcattcttacaaatctagtgagtgagtgtgacttagaagtctctgtctaaatttttcagtcaacatggttaaatagatataatcatatagaacatttattttttcttatctctttctaataagtgatctaatttattaatatactattcaacaatctaattatctacaaccaatatatattataagttatttcttgtcacttcataacttgataaaaactatacatctgagtacatacaaatatatttgattacttctataataattgtattttagacttcatcaagaaaattttcaaataatctttttatgattctttataactttgaggaatatagttatattaaattatattgggtcacttactaattttactataatattagtaatttattattcacttcttaaaatatataaaaatgagttaagagtaactatatatgtacatattttataccaattatagtttgaataccatttgttatctatatttctaaaaagaagacacgtgttataaccgaaaggtaatcgccatctaaaaatgggcctaagccttcacgcttatagaagtccaaaccaaacttggaatgggcctaagcctaactaaggctaaaggttttgcctccaaaacttaacatttttccagagcttagaaggcgcctaatcttttgggacacaaaaggaacaacgatctcctaatgaaaataagagtatatatggaagcaagttgcacaggatgactctcggaagcctaccataatcagggtccagatgtctaccatgaatgggaagcagatgtctcccctataatgacatgtccatcgctctaatacatgattgaatattgtcccatatgtcagatcatggtagtacgtgcactacatatatctcttttgtccaatgactcctttgacacctttgtctatcaggcatagtctccgtgcaacacatgccttacactaagcgatctccttgccagtacgaaatcatcactccatgagttgaatatctttagtgggcctcatactcatgtgtttatgtattttactttaatagtgggattatttttataaataaaacctgcatgggtcacgggtatgccgggacccaaactctagcctatagaaacttcactatcccttcatgcaaggtggacaaaattttagccaaggctctgatggtttaactttaagcttttgcttttccaagagaaacctagaaaactactttatagcaagggttcatgttccttaatgtaaaactcatttgtaatacatttaaagcctaaaaggccattacactaactcgtggactaggaatattaaatttccgaactacgtaaaaaacctccatcttatttatttaatcactatttaatttcctaaagctcttatttaattagtttcaaaaaatatcagtaaatttttttagagcttttattgagagctgaaggaagcttaaagctaaagagaatttacaacaatagtggatacacgtaaaacaatggtagaaaaaactcctcgaacggatcctaatgtcgtcataggtaatgttaacccactccctccagcgcatgcccaactgaaccatgtgagggatggtgaagcatccgaagcttgcggaagagtggataaactcgcctagcataaggaacaatatatcaatgagaaccctagcaatgaaaaagaggatgaagaatatgatggagaaataatgacaactactacaaggatggatactattacgaaccatatctagacctacttcgagtgtccaatgaattactcataactcagcaaaagttagcataacaagaaaagttctctcgaaagatggagaaaatgatggctcacctctagactaagctcgatgacctagatgaagactctaaggaagatggttcagagggacttattgatggagaaaatagagtaaacccgaccaactttggaacctcagttccttcgaaggacaagaggaagccaaaggtggatgagcctcagacaaaaactgcctcattacctcttaggaaaaatgtgaacgtggccaaccagcccttatggacgtagaagaccaccaacgcctctccaggcttggacgtccttctgctccactaggcaaggttgtgccacacaaaaggcgtagtactaaagtatcaaagcctaaggatgaaaaagccaccctattgattttgttaactaggacgatggggtggaagaaatactctctaaagatagttggtctaccatagatctctgaaggtgtcttgatgccaatatgagaaagccaaaggagaaaaggtgacacgccaagggaatggcctaagaaatcatttaaacgataaggttcgcaaatgcaaccaatcaaatacaaccagatgatgcaagtggcatgagtaagtgatgacgccaagtgcctttgtttctcactaatattgaccaagtttgcagaatactagtggaaaagattgtctcacaaatcagtccatagttggaaggagttacagtcaacctttcagaaatagtttatagtttctagggattatgacatggaggtcggattggtgaccaacctcaaacaacagcaaggtgaaagcttgaagaacttcatctagcggatgatggaggtggttgcgaagacgaaggtcagtgatgatatgaaattggtagctctctagtccagactaactataggctccttttgtggtcatctttatgtttctatggtgagtgatcttttacttgataatgggaattgaaagtgtggtcctattgatgatttgttctctggtgatgaagctagtcagatattggttgttcctcggtccactaatcataaggattgcttgatttggcattataatttttctggtgactatactgtgaaaagtggctattggaatgctatcagattattgggtagggggcaatgtgattcttctcaagttttggcttcatggtggaattatttatggagccttgccattctacctaagattaaggtgtttatttggaaagcctacttggattggttttttacaaaccataatctttctctccatcatatgcccatggtctctctttgtcctatttttgatattataattgaaacctcgttacatgctctttggagatgttttagcttgaattctatcataaagttcttggagtttatgattctttcatcttctttcctatgactaacctgaatttttcccttagagaacatgaggtggtttcggtgaaagataatatggaacaactccttgttcttctctgacgtatttggttttgtcgaaaccagtgagttcacaataagaaattgttggacattgaaagggtgttggggtggtctattgcctttactcaaaaatttcaggcggccaatatgatgggtacgaaacctcattctttttacagtttcctcccttggttgttacctcccatggggcgtgtgaagcttaacactaatgcaggttttttgtgtggaagattggaagatgggatttggggtagtgatccatgaccattgtggtttctgtttggctttcgcggcttctctggtctaaggatccctttctcctactattgttgaggcattggctattctccatggtctttgtctctattttacacttgagtacaaagaggtggaagttgaaattgattgtcaaaaacgtgtggctctcttactttaatagagaagccttaagttttgctgaatctattttggtgctttatgatatttataatatttatttgcatgtttctattattaagtttatgttttgtaatggttcaacaaattatttagctcataatcttgctaaactgactttgtcgctagatgaggcaaagagtgtagtaactagggttaccgattttataaggcattggactttaattgacattttagtcttagtgaaagttccattcaatttcaattcataaaaaaaaaaaaaaaggttaaaaaatagattagtaaaagatttcatatttgttttatgagggacagataactttacataatgatgatttcaaaccaacaaaaacttctatttttttttaataatgatgatatattactttgttattggaaaaaatatagaaactttatttaagcgaaataagtaactataaaaacattaagaatatgaaatagataagatttaattaaatatttaaagcaatatatataaatttatatagacttattaaaaactaatgccatgtttatttaaagggaataagaatcaatgatatggtattgattctcatacaattatttactaagtattagaaagggagaaagtagtgcgccccacacaaattaaggaaaaataaaagaaaatgttctccccctatttttataagtaatatatttttctttcttagaaaaataaaaaagacaaatatgttctttaaaaaatctataaacagaaaataattacatgttttaataatgatgtttagtaaacaacatgataaatattattttaaattatttttttattttaaactaatttatttctctcatttattattctgattttagttacaatttgataaatgcgccataagaacaaaactttacattacaatttttaaatattatatatttatcattttaaaatattgtctagaacctaaatttgttagatcttaattttttgattgacaatagataaaaaaaaaaaaaaaa

SEQ ID NO: 37174 - DNA, 1923 bp, Cannabis sativa
  modified_base (1752)..(1757): a, c, t, g, unknown or other
tttgtcactgtagtataggtgtcggttttatgaaccgacactaaaagtattagtctcagtttaaaactgacaccaaaagtgtgttttgtagtagtgttatttgaaaaagataataataataaaaataaataacgcttgagtttatcctaatcctcctccaaacaagcaatttacactcaacaaacacgcataccagccaagcctctgtataggtaccaaactttttataaagccaaaataattctatccttttggtttaactttctttcatttacaagacataatctaacattaagattctctttcactatttcatctatacaatgagaacctaaacatttcttttcaaaaatatataaatttcgattgatccaaaaatgccatatacaactcctgcaagaactgcataaaatatatccattatcaaccgattaggtctcttggtattcaaccaatgggataaatcctcaaattgatctgaccaaagatggaaaccaagccacttactgattttgagcaataccctctacgagaaagggcaactaaatgttcatgacttttaagtttctcctcactattgagcaattagcaacatcaacatacacatgcttcttatctaaattatctcgagtaggaagatttgcatgaattacctaccacgaaataaatctatgacttggagctgataaagaatagcatacaaccttcttaaacgccacccgagcatcatctttaatcaaatagtcataagctttactcacttgaaacttccctttactacccgctttctcaatgttacttcttgagaacatatgccaatatccacttgaaagtagggtcatctgtatttgaacaaatggatgtacattcacgggtggatatgagttatcgttaaattcttacgacgattactttagatatttaccttatggaaagaaatttaaaatgtttgagaaatttcatgaatttctagctgttatacccaaaattcagctggcagacacgtgtcaagataaagagaatgtgaatcggtgtcgtatctttttatggaataactcattaattgagtaagtactagagtatatttgcaacccgttgactgtaaagtcttatgcgaggaatcaatgtacgaactagtacttagagtattaacgagaaaccatatgtggccgaaaaagaatagcgaggcaccagagaagaataacacatacctcggctcacaaataagcagactaactataaaagtcaaaccacctcggagtaccataatacgagacgaccatctcgctaggagaaaacttcctatagttacatccaactaacggaagtgagactcacaaccctagcaagtcagcagatttccttatatccccgatcaccgtttattgtcaatctcgaatagaataatggttccagctcgccattgggatcactataatcaagtttctgtcgaaacacatccagaatcaacaattaaagacgtgtttaatacacaatatttctgacctagtaaaaccaggaaaatcacagctgtatgactttcaaaatcattaaccgcgtttacattttgtaatatgtaatcaaatcccatgatttaaggcataatgactgtaataatattttggtcagctttgtaattaactaccactatgcaattataaatagtggcagataagatcaaaaaggggggacaaaaaaaaactcttatgcgagaggccctgaaaaaatatactcagaaatctgaataagatnnnnnngtggactatgcagaattttaattgcaaaaccacgtaaaaaaccctgtgtcaatatgttatttttctattgttactatattttctgtgtcgttgaatcatattcgtgaggctcaaatttggttaatgaaaatctgcgttaacactatcaatggtgaaaaaccattaa

SEQ ID NO: 37175 - DNA, 1684 bp, Cannabis sativa
taataataatataaatattgaaatgtattaaaagcttttagatgaactgccacctacttgatagctcaaacatgtggtgtgctggtatagcttttggcttgtaggaccatagaccacacctaaagccaccccattaggggctctgcttctaaaatatccagtggttgcacctctttctggaccccacccccttcacctttttatatattatttcttaaaaagaaaaaaaaaatattaggtcttcttttttatcataattcccaactttgttagctcatcattctttgaaactctatgtaaaagttgaaaaggtaaaatgtaaaatatataatatatatgaaaatatccaataagaatttacctatgttgaccattcacctttttcttctctttcttttccttttctatgtgctcacatcacatatagaaaagttatttttatttattattatttatttctagattaaatatttatttcactaattcattaaatcaccaaaaaaaaaaaaaaaatccatgagaatcattcttaactactaagaaaatatgtggaattcaaagaaatgcatgtattagacttttgttcttatttatactaacaagaataaataattatatggtcacatgattagaatcaaaacaaatctatcaacatgtttaaattaacaactttctaaatgacccttttaaaacaatgaattaaaaaaaaggaaagtgaacaatcatggtttagaactgtgtagtgtaatccaatttgtactgaattattatgcaattgaaattaattaaagaagaaaaaggtaagaactatgttatatttatttatttatataagaaaagtaaaagtttttataactcataagatgatatatagattactaaaaagtgacttttgaaaggttaaaagttaagagttaatggaaagcaacctttttgagagagtgagagaaaggtaatgaaaaaagagtaatgaggccaaagaagaagaggttggaaaatcattatcacaaaaccaaaaggataattggctcaaaaagaaccaaccgtgcaagttttgtttgtgtgagaaaaaataataattagaaaaacataaataaataaataaataattattaattttttaaaaaaaaaaaaattaaaaaacaaaaaaagagagtgtcgctgtcgcacgcacgaggggtgcgcacaaaaaaccatcgaaatgcaaagtggatgtggatctagcacacgtgcacacctttgacgaatgagaacacggcaaattttatttattattatttttattataaaaagttatgtattttgactgaaatacccctgcagtaacttttaattcacatatcacaaaatttattgaaataattaaataattaaataaaatactaatttttgtaaaaattttctaattttatatttaaagtattttttttaatatttttatgatattatatgaaaatataagaaaataaaaaaaaaatatatgaaagtaacacgaaacaacattaaaataataacaaaataacagaaaaataatataaaattaacaacaaaataataataatacattataaaaaaaaccgtattttaagtaaataaagtctaaaaaaccataaaaatgttaaaaattcagtacaaaccgtattttgtaatatttttttttttgttatttttagagtaatttgcg

SEQ ID NO: 37176 - DNA, 2925 bp, Cannabis sativa
aattgccccatgaaaacttcaataactttctgaagatcctgttccaaatatttttgcatcagttatagaaaattaacagaaagcatccacaataatagaacagagccccagtcattgaaactttattgatgagttattcatgggtacaaaattaatttatcttttagcaacattataaagtaataaatgatctgttcttgtttctaagttaattcctcactctcagcactcaggaaagagattatcaagaaaggttaacaatgtaactctaaccaacatagtataccacaagagaatttctttccttgaatagcaaagcatctagaatataagattaaaagcatagaaaaacatctaacctgttgtgaaattgtatgaatgactggatgcttacttctcaaaactttcccacatcctttagggttccaaacagtgactcctccccacatcttcagaacagttatcattgggatataaaaaattggataagttcaaatagaaaattcagttaagaatgcttggaaaatagataactgtgacatgttaactaaccggggaaatgaaaccatttgtcttagaaatctctccattttcaagctgtaggagaagggggcactcctttgccgaaggaacatatctggcaacaagtacagaaaataattattggggctgtgagttataaatagaattctctctaacaacaatagagtcagcattacctataaaatagagaatttttcttaaactagggttaagacatgcaccccaacacaaacatattcaatgtaatagggaaaaaattgtaaagtagtttctctcaatagatgtataactctaagtccaaacaacctgtagacaatgatatagcactgaattttgaaaaggatttacatgctgaaaagtgcatactgcagaatgtttgcaatatcatatttatcttagtatgtatactgcttcaactcaattaaatcataatccataaccttacagtaaacatttatataagtaaaataattagaagaatgatatgagttgaagaatatacaccacaaagtgtaatatctttgatctcccaccagctgcaatggaagtatccaagtgccactcatttgaattcacctgtacaataattagttaggttcaaagattttgaataaaaaaaattgaaataatcaaagtttaagtacacctaaatgaatacaagcatggacattatatattatgcacactaattttagatataaccatctaaggaatcaaacgaaaattagctagtataatgcttcctatcaaatcatgaaaagccacaagactcagcatacaaagaaaggaagatccttggtactaaaaatgaagctgctccacttgtcatcccagtaagaaaatgaggactttggtgtgtggtataaaacctgatacacagtaaagaacagtgcaatcagactacataattaaaatgacaatctatatgaaaatcaaccaaaactgaaaacaaatcaattgaagaatattacttgactttctacgcttatgttggcaataggtcttagagcatcgattacaggggccaagagaatttcttctacacttcgaaaatccctgcaggtacaataaaacccaacaagagaaatttgaagatcactaccagtactttctaactaggtgttcaaccatactagacatttcccataccttatcagtatagttaagagatatttcaccatatcttagaccaagaaaatataactactatagatacattgattatagatatgacaaataaggaaagcctcaacgtgtcaacataactgttagatatacttactaatttactgcatgttttcatcatcatcaccagttatttcataataatttttcaatcataacaccatgaaattccaataatataaaaatgaaagaactccataccaatcatagactccatctcttggatcagaatttagcaaattgaaggaaagcacaatctttccatcagcaccaacaggcataaactccccatgaatcgaaccttcttcttttccaccattaacaaacactttaacaaaaatctccgccactcgagacaatgccgccgtctcagaaaccttcccggaaatccaagcgtgcctatactttccgatgacagctctaacatcctcatctctattcaccaacaccacagtatagacattcccgcctcgggcaagctcggaacaaccgcccaaagcagactctaacgactcatcaacagcctcatcatcaccaccaccaaaatcaacgttacttaaggcaccgcacctccatggacacgatgatttactggttggtgattggatacagtgggaatcagagtcaataaccaccgagacagtatagttagtgccacacgtaccacattctggagttcctgaacccaatttgtacattcgatcgagaagtgaggcctccaggtcctcagaagatttgaattcgaaaccgatgaagatagcctgaaagtgacagggaaattgtaatggagtggaatctagctgagccgagaggtggtcgatttcgcggaacggtagaggtgcacggtagatttccactgatttccatagcaatgggaaacctgtaacgcaaaaaaggaaatgaattagagatcaaaagcaataatagaaagagacgaggagaaagaataaggattttaggacctagtacgaaggagaagagcactgaaatggtgaggactaggcgcttaaggccaggcttagtctttcgcattgattttggatcgaaggtcgattgtggatcatgttgttcagatacttctgatttggtaatttcagagatttccgccattgatgaaaggcaaagctccgattcactgaaatttctgttcgggttttatttctttttattttttttttaatttcgaaaacagattat

SEQ ID NO: 37177 - DNA, 3231 bp, Cannabis sativa
tgttgtcggtagtctctctttttaccttttcggcttcgcttttgctttcggttcagacttcaccaccaaccctttcattggctcaacttatttcgctctcaacaacgtacccaactcctcttacgattacagcttcttccttttccaatgggcattcgccattgctgtggccggtatcacaagtggctccattgctgagagaacccaattcagtgcttaccttgtcttctctttctttctctctggctttgtctacccagttgtagtacactggctctggtcaacccacggctggctcagcccgagttccaccacaggcttactttttggttccggtgcaatcgattttgctggaagtggtgtcgttcatttggtcggtggagtcgcgggtctatggggttcccttattgaaggcccgcgggtaggtagattcgacgcttttggtcaccccgtaccaatgagaggtcataacgccacacttgtggttttgggtacctttttgttgtggtttgggtggttcgggttcaaccctggttcatttgaaaagattttagtggcttatccaaccactactgaccaaggtaactggaccggaattggccgtgcagcggttgtgacgaccctttctggttcgaccgccgggattgttactctgttcgggcggcggttgttggtgggtcactggaatactttagatgtttgcaatggagtgcttggtggctttgtcgccataacatctggctgcgcagtggtggaaccatgggccggtgtggtttgtgggttttttgcagcttgggttttaattgggctcaacattctggccctgaagttgcaatatgacgatccattagaagcggcccaattacatggagggtgtggtgcttggggattgatattcactgggctgtttgcaaaggaggagtttgtcattcaagcttacgattcgggaaagagtggtgtggtcaggtcctatggtgtcctgatgggtggaggatggggtctgtttggagctcaagttgtcgagctttttgcgattgtgggctgggttagtgtgaccatgggaccacttttctatattctgcataagcttagacttttgaggatcactgtggatgaagaagttgctggcttagatatctccagccatggaggctatgcctatactcaaacagaagaaagcaatggtcgcttctacacagattatgtacgcatgcagaatgaacaatcttgaccctgtatttattgatttgtgtacatataattagcttctactatcatattacaactcaatttgttactgatggaaggccgaaggagttgagctacttatcaatgatagtacgcctcaatgtgaaactaatatatgtgcacttaccttggaaggcaaggtaccaggtacctaacagaaaaacatgtaccttaacaaaattcaatggtgatttgataatagcaagtgcatgcatgtatactaaagaaaaaaactgagacaaggagatatagcagagtagaaagttgaagcttgaactatatttcatcgccatatttaggttaaatatgaaaccataaaccagcacccggaccaataaaaaaaatggccataataaggcattatatcctaattcttaggacatttacataaccaaggccagcagaaaatgcagttcaaaatgtctcgaaggaatttacaagttacaaccatgattgttatgtacagagtatgtaggcaacatgaggctcaccgaacatgagcatcgtagggaatatatataggatctggaacaacaagtggcagtctatcaatgtacataaataaccttttgcggtcctccctcaaaatcgttgataaatcaatagcatctgacttttctgtgaagacccaaagatctcctgaatctactctcttgaggctgtccctgcagaaggggcaagattgggaccgtccacgcctaaaagtaacataaaaattatcatttagtctcattacatataagaaagaaagaaagaaaaacagcagaagaaactaaacatgcatgtgtcaacaacaagcaacactttttgctgagagtgagggggtaagcaatgaagtaataatgctttgtgcaggtactgccatctttattcatgggaaatacattacagttacacatatctactttggtaaattgtgttgccacagaagttatattatttagggaaaaagaaaaaatttcaaagctacgaatatgtatttatagattttgtaaagttcccttagtgtcagctaagataattaacaaaatgattttgttaacatattcaggagggctcaacccttacttcattgcacccataaaagtgagcccatggtgcattatgctttttctgtgttcttagtttgtaaaaaacaaacgatacttgaaagaagtcatggaaaagcaagaacttaccaatcacgatagcattttaaacacattgaatggctgcagttgggcaatacaaattttttgttcagctccatgcaaatcccacattcttcttctctctctttgtcagcctcagacagcttacccttctccaactcatctcttcttttgtatctaacattgcatacctctttctgtttcctgtcctccaaatcagtaatgcccttctgaagttgcaacagagaaggaaatataatagctgcccacagaagcaaaaatgacaactcgcatgaatactcaatccttgaaattgtaacaatgttatgatcatataccctaactttcaaacatgtatgacctcactcaccataaaaatccttgatgcttgctttcctttcataaacagacatggtagtcttgccatctgcaaaggtctaaaccaatccaccacattgccaaacccaaacatataagtaagtcaccataaaattgctacattgatttctttttgggatgagttgggatgctaagcccacaaacaaattggcaaatataagtggaaataaaattcacaaacgaattggagaaacaataaggtcaaacattcatatacatgaaaaataaattaccatataaatatgtattctaagcaagcccagcattccagcaagttgacaatcagtccattgcacgagaaaaagaaagaggtgtgcgaccgaactgtaagataatctcatctgaaggcgtgctccatctttatctctcggataatctaaagccctggagtaaagatgagtgaaaaatcaatctaaacatctgtaattgttga

SEQ ID NO: 37178 - DNA, 3957 bp, Cannabis sativa
gacactttaatacccttttgatacccataacataattggtcacttaattttgtatcacactttataatagcatatacattatacatatgtgcccacttagcattttttaatccaacaccttgaaccctttcccaagtgcaaaattacatttgataatacttttataaacaagagctcatatcccggaattcattctattgcacactaggacactctctaatttggtcaaatttcattaaccttgaagaatttccggattgtgatcatcttatataggtatagggtataggtataaatgtataaggtatactaactgaatgagaatcaaaataagcaaaaagaaagagaggatcacaatccaaattaatatgtatagatcaataaagtgttaagacatacaattgcttagatttctccttttttttccctatgatcattcaataacgttaaactaatagtataagtattaggacaaggactaggagggctggaggggagcactcctttcatttgatatcttcatatatattccaatgattagaacctttggagttggattaggactacaatattaatcatccccagataataacattatgaaacaaatcttcatcgagataatgtcctttgtttcacctttgttttcctctaagagcagcaatgcgtgcagcaaattcctcatagtcaggaggcagtttaggatggacatgagcggttgaactcatcatatcaggttggaacgaggttgctcgggcgggccccatgtatgcctccccaggagatgaaggctcagcggggagagatgatacccggcctggtggcatggccaactctggccttttgttcatgttagattcttttgaagtttcgtgacccggtggtggtttcaagtttcttctcctaactgatcttggtttcggcttatcttccacaacagctgtgtttacatggggactacttgcttcttcttgctgaactgtattgttcagctttgttgttggttcatctgatttcggtttaagataaggaggacgagctaatctgtaaaagaaaggcttctttccatctgtgtcatcttcagaaacacttcctgctgagcttgaagaagttttcctctcatcttgggaaaaatctgtaaatgtgtcttcttcactactgctctgcacattgctatggcgagatttaaagctgagttcacttcttttgggaaaagcttcttcctttctctggtttgatccatgatattcattgacattgctccttgtctgtataagggttgaagcattgataaaagggctaacttttagacacattggctttgtgtttaagcattgtttcaaaagcttagaatgttatcaattgagggacttactttgatgggtggaggaggaggagtatacagtttctgctccaaagattttgaatcccattcaatagaaaactcccctgctatatcatgcaataactgaagctttgtctctttggtgaaagttggctttaacttctccacaaactaagcaaaaaaaagagaatattaaaatgagttttaagtcaaaagagcaagtctttttaacagaattgcttatttttcaagtaaacatataaagttcacactacctctttactttggtaagactcaatggaatttccatatcgttcagtgaacaaatttctaaggtcacgtagttctggcaaatcagcaaatcttgctgcagcatagataagagttgacactgcttctttacattcttcagggcattccctatacagattttaacagttagaatttacttaatttggaaaacatttagtaatgtttagattgtcacatacatacctctgctttagcatgagagaaagattagttgaaatgcttccacaaaaaatctcaatcaattcgtaggcagaggtcaaacattgctccaccaaaagcccttcagcctggttttgaccaattaaaatttacatcagctaacaagtcattcttaataaaataagctaattttgtatatagaaaaaacagataatgtgataacaaggcataaccatgaggagtgtcgggaaacagtctcgatgttaagacaataagataaaatgataaaaaagaacaaaacggcgtcgtgccaactcgtaaaaagacatctttgtttatgtgattgactatttcaattgactcccaacaacgaagagaggcctacgaaactctacatgtggatcatgtccacgatcttaagaaaattttcattttggttaaatcagaagagtttttcatgaaaagttcaaagataagaatttaaaaaacttaaggcaatcttcatttctacaattgaaagaaagaaaaaacagagtaatcttaagtatcaattgactcttatccaaaaaaaactaagagagctttcaatgaaaacttaccctgttatatgcattgatatcaaggccgctcttaagaagatcagaaatatcattctttaagaatttctgaacagcatttctcttcttctttatggtctccagacgtgtcttaatgagctttgtattcgttttgctacaattcagaacacccagaaattgaattatcaatatatatatacacaaaaacagagagcacatatatttatatatatggggttcgaggccaaaccatttggtgtaaaacttgggcttcaataacccgtcaagcattttgttctctgcaaaattctgactttaccagaaaacttaattgaaatatgttttagaatgaaagatggcacctttactttatgcagaatggtaaagagaataaagattgaatatttgtataaataaatttctttaaactactatggtaacgaaaagaatgactgtaagagcaaaaacaggaattgggtcacgtcaagaatcagcattgaagaaaacccagaacgaaagaaaaatttacttctcttggagagaaccaattaagaagttggaatgggaaaaaaaatgggtgaagcttctcaatataaaaagaagctcagaagctcacatagaagaagacgaagacgaaggtcaaaatgcgttgaagagggtttatagcagaagaaatagctgagccagaaggaagaaatggcgtagagaaagaaagagaggaagctagagagtcaaataagagagaatgtagaagaatgattctgtagagagatgaatatatattaagttaaattgtaattataataataattattattattaatttattattatccaaaaataataaaaataaaaagacttagcgaaagaaaagaaaaaaaaaatggctgaaatagtaagtgagagaatgatagcgaatagagagagagagagaaagaattgccacgttagaatccttctccaatgccaaggtgtaatatggctgttaagtaactatgtaataatttttatctctaaattatttgtatagagtatgacaaagaatctctaatgctaaaattttaaaagatgtttgataaagtagatatattatgtagcaaaatattaagatgttatattattggaaagaaaaaaatatcattgtacaaatttacatgaatgttatattgtagcattaatattattcattatcttttaatgaaaaattgaaactaaaaagttattgtagtaaagattaggatatatactaaataataatgtgtgagatcataattatagtatttttaaagaatattatatattagagtactattttttaaaaataagagtgtcaaaaatgatgtggaaaagagataaaataaaatattatatttttaaataatgtgtaaatttttatcatgctttaaggatactactattagagatgttctaactgttataaggtgtcatttttaataattttgatgctaagtatctaaaaaagaaaatcatactatatcaaaaagagcattataaatttgaaacatgaattcaatcttatcgatggatactaattggatagtgaat

SEQ ID NO: 37179 - DNA, 2075 bp, Cannabis sativa
aaacaccctaagttttttaagttcaacaaaaaaaattgaagattatttgttacaaaatgtgaaatttaagggttcagcccaaataattataattatcttccaagatattaggatagcatgacaaacttaacgtacgccatataattagctaagcgcgagagcactactgtaccgtaccaaactccattgtactctaatggaggaaacccctcaactcacttaatcccttttctttagctaactttctcatcaactgaacaacatcatctccatcatcaacaatggcatcatcacttgtatctctatcactttcactcccctcctcctcatctctttctcacaccagactcaacaacactacaataaggtgctcatcttcgaattccaacctaagcgagaatcaacaacaacaagtgaatttgcaggcgatgaatcctccgccgccgccgccgccgaggcctcgccggataatcctagttcgccatggagagagcgaagggaacctcgacgagagcgtttatacaagaatcgcagaccccaaaatctcgctaacaaagaaaggaattgctcaagctgaggagtctgggattgaaattaggaaaatgatcgagagagacggaatccctaattggaaggtttacttctacgtttcgccttacagaagaacccgccaaactctccgtgggttgggtcgagctttcgatcgatccagaatagctgggtttagggaagagcctcgtcttcgagaacaagatttcggtaaataattaataaatcttttcaaatttgaaaccgaataaaaggctaatgaaattttgtgttatggaaaagggaattttcaggatagagagaagatgaggcacgagaagacactccgtacactatatggccgattcttctttcgattccctaatggagaatcagctgctgatgtttatgataggattactggtacgcattaattgttacttatttatctttttttaataatcatcatgagttttagtctaaattaatttcagtgacatgcatattaaactattattttgagtagaacttgactgtgttttaaggtgcattcattgtcaacacttttattctcatactcttttataaacaattaaaattaaagataaggtatattttgtgtttcattaaccaattatttatatttttgcccataaattttcgacactatccgattgtgccttaatatataatggttattaaaaatttttcttaaaatataacaattatataattttacttttatttctattagtttatgtttcttttaccgttaataattaacagttttactcttgagtttttaacaatactaaaatttgcctgcttttattttaaaaattataattttctattaatttaaaaaaaaaataaaaaagatattaaaacttaattattaaattaattaaaagaataaagaaacaaaaattaattttacattaaaaaaatgaaaattattctttaaaaatcatattaattttttttattaaaaaacgcatatcttaaaaaaaaaaaaaacaaaaattattaaaaatccaataaatatttcaaacaaactaagattttctgaagaaaaatcatgtttatttatatttacaaactgatatcataaaaaacaaataaaacttattaaggatgcgttcggtgatacttttttaattagttttttattttttgagttagaaaattaaaaatgttttccaaactcgtgttctataaaactgtttaaataaaataaaaataactttcaaaaaaattttgaacagtgttttttttcttaatctatattttggactctgactacaatctaaaccttgggacccggaccccaactcggacccaaaccccgaccatgttcctgaactccagacccaaacctggacccaaacccgaactctaacctgaacctcgaatcaggacccggacccaaactctaatcagaaccctaaactctaatccgaacctggacctgagaccaaaccctgatccggatctggaccggacaagtaccctagacagaacaggcccagactagatccggactgaga

SEQ ID NO: 37180 - DNA, 2825 bp, Cannabis sativa
aaaaaaagaaaccgatctaatcaaatcacacaaacaaaaaaaagaaaatcgaaaaagagagcccattttgatgattaaaaaacaaaaaactcacctgcaaaaactgagcataattcctaagaaaaagagggtgaaatggacactgctcaaccattctcttgtagtaatcttctttatcacttgtttcatcaaaatccaccattgatgatagaccaaggccctcaccattaatacccaatcccgaagcaataaacaaaggactggtattaacttcttcttcttctcctaaaacctctggttcttcttccccttcttcctccttaatcaaacccattttagttttcccaaaactgaaatctccatcttcaatggtttctccaatagtcacagtcctctgcaactgcaacgcttctttatccgaacccacatcctccaaatcctgaaattcatcgttgaaaatcgaaaacgagggctccgtacgaagcattgaccagaaattttgaaacccaaatttcgtttccttttctgagcttcgaatttcgttcgaaatctgatcaatgagttcgtgtcgcgacaatagtctctccaagttcccctcggactgagctcgacgaatgtaggaactttgaccggaaacgttcgattcccgatcggagggtccgaacccagatgaggaattgtggattggtgatgaattacatgaaaaagatttcaacttgtggggatgaccgccatggatgaaggttataaagtttgcatttttaataatgggtttgttcttcttattaatattaatattattattgttattattattattataattattatgaatggaatccaagtctctattatttgggctctctgatgagcaagacaagaagagaagagtttctattggggttgatgagcttctcacaagaatcattttttttaatataaaaaattatttttggtaaaaaaaatttaaataatattactaattatgtcaactaaaaaatagggttgaacttgaagaaagcaaaattttgcattgagattaagaaattcaaaatcagaaaaaacaagtctttatggttttcatggtgttgggagaaggaatcacaagtaaagtttggcccaaaaaaatttggtttaatgtgctcacatggttttaggttaatttattgtttttatttatgcaatgcattaaattagtgtttgtgtgtttaagggatgaagctattattaggattttaaatggaccaaaccaacaataagagcaagatgcatgtgattttgagtagtcttttcctattaaggtgggaaatcaaacactatttttggatcacaagaaaagtggagaggagaggttttgtattttgtaagcaaaaaattcagaacactaatctattaaatccaatttctatttattttatcacttggattataatagagtaaaaccttcctttagtgttattcattattagaataattcatttagtaaattctttgtttagttttgttctatattagaatagttcatatagtaaaatctttgtttagtgtggttctatatattagaataattcatatagtaaaacctttgtttagtgttgtatccatatagtaaaatctttgtttagtggaattctatattagaatcatttatatagtcaaatctttgtttagtgtaattataatagaataatagttcatatagtaaaacctttgtttagtgtttctactttctatattagaattaaaaatatatagccaaaacaattttagaatctcatatattgaagacatttataaacaaaaataaattcttcattataataagtgaatattttttttctctcaaaaaagtaaaataaagtaataagttacaatttttaaattttattttatgaaaattgcatccacctacatattttactctaccttaaaatttgtaagataaattaatggttaatgttgttatgaaactttttaatttgtgaaaatatatgtatcaactcactcaccaaatatggtaattggataaatattacatttagtatgatttaaaaaaataaaaaaaaaaacctcaccaaatgtagatttccttttttttttgctaagttgatgttcataacaaaaaaattactcccaaccttattagtatggattgacttaaaagtttggtttaattttctatatagggtcgaaagagtaaatgtcaatcaaatactataattggcatgcatgttgttttttctttctcaagtaaagacacccttgccataagtgagttgagggagaggcctaggtataaggaaaagatcttaaaaaggcaattactttcacataatatataacgtatatgctaattagaatcgtgaatttttataaataccctttttaatgtttatctacaattttatagtctaaaattaatatttacaaaaatacactgtaaaattttaaaattacaaaaatatatttcgttcagcaaaaagtaaaaaaacaacaggaaatcaactgtaacgtctctgctttaagcatccattgggccttcccacatagactcatgactcttatacattggtacgccactttggcggcttcttggactgatgactagccctacaaaccaacacagcattttcagcgtgttttgtcctcactcgcatgcttcatgaaaactttccaagaggtcactcatcttgaaattaccccaggtcaagcactctaaactatggaaatctttatgatgggataccaaaaaataagatgcaccttgttgatatagatagtaccaattaatccatttaggccatcttcaactgtgtagtcccata

SEQ ID NO: 37181 - DNA, 4255 bp, Cannabis sativa
gtttgattggttagataatgccagttatttactttttatgccatatttatcataatcttaataatttttcccatattttttaaaatagctcatatttatttgcaatttaaatttaaatatttatgatttaaatgtcaaaataatttcatggtttagttttggtggcttgcgagttcgaaaaggcccactgaaagactaatggaccctcatccagactaccgttattataaaaggctccaaaaccctagccacttctgtgttggactagcagacggcgtcttcagacttcagcagcttcgattaatccaaccctagagctacaatggtaaatataatatctcccctctctccgtgcttgaccttatttcattttgttagaatttgggactgatttttttcgatttggctatggtaaacagggtatcgatctagttgcaggaggtaagtccaagaagaccaaaaggaccgcacccaaatccgacgatgtttatctgaaacttcttgtcaaggtccttttaccctacctcttcccatttttcttttatattagactgatttaaatccttgtggtacatgtttattttttctttttaacttttttatttttaggtatagacgccatttggtatatatgggtgtgtttgtatgtgcatagaaattataatctctctgaagaacgtaagaaactaaatgtgattttctgactgcgttgtagttctatctttacatttctcctattcatagaggaaaaaaagtgataatattaggcgagcttgattatttaactggtttgtaaatcttagttgttaatttatatatgttactaattcggcaaatgggttgtgaatgctaattttacaagtctggttttttgcgaatagcaatgatatagatatgtatcgatcttagggtatagtcttatgaaatgggaatgtatctttccagattttttttttctgaaatgcttaattctttgaactcatttctgacagttttactcggctataatattattttattctacttaattttcaaacatatatatatatatatatattttaacagaagtagatttatggaaatgtcggtggtactttaattaaaccctgttaatactgatcactgtatgatgatttttatctcatatatcttgagggaatcggcactttttatagtttgacatttgccatcactctggtttacatatttttatttatggatgtaaatgggttttgtttttttaatggctaaggaaaaacattcttatttatggttgttttctatttaacttgtagtgtgttttattctaaagatgttctgttcatcattgtatcatctcctttttcttttatattgttttacgatgataaaattttacgtatatgaactgactagattttttttcctatattagctgtatcgctttcttgtgcgaaggactggaagtaagttcaatgctgttattctcaagcgtctttttatgagcaaggttaacaaggcgccactttcgctctctaggctgatccgttacatgcaagggaaggtggtaactctgctctcatctgctttgtactagatgatctgtgttacttgagaaatttgcttttatttatttatgctatggtctttaatcagctattcctcaacattatgtaggactccaaggttgctgtgcttgtcggcacagtgactgatgatatcagggttcatgatgtccctgccatgaaagttacagctttaaggtttactgagacagcaagggccagaattgagaaggctggaggggagtgcctcacatttgatcagcttgctttgagagcacctcttggccagaacacggtactttaccactttctaaatcactttgtcttcaatataattgccaaatgttgctgtttctatcaacagtcactcttcaatataattgccaaatgttgctgttgctagttttcttttttcggttagatcaattaacattgcactagaatgatctgtttaatctattaccattctgtaataagaatctttttcggtgatatctccataggttcttctcagaggtccaaagaactcgcgtgaagcagtgaagcactttggtccagctccgggtgtgcctcacagtcacaccaaaccctatgttcgttccaagggaagaaagtttgagaaggctaggggaaagagaaacagcaggggatttagagtttaagctcagttcagtaattaaaagtcaacttttgtcatttctgactgacagttcaattttgctttgtgttaggatctttcttggttatgtgtgttccattacatgtattttcaatattggttttatgcttgagaatcggtactctagttagtttgattccatccttccattttaaaaaatggcatttcatacattgagttaattttcaattattacatacatcagtagctacgttattgagttaattacaactttatttatttgttattgttagctagaaattttatctcgatcgatagaaattttagaaagattaaataaacaatatgaaacgaaacgaaatttcattgcatattgcgtatagcaaacggatttcatgcattatgtcatgacagggttccatttgtcgttaatgtgaaataagttattaattattgctgcgttatttatgtgtttaatatatgaacttatcttataaatggttagggatgttgatgccattttttgtcaatttactattaattcaagaaaacaagagatgaaaataataaatgaacatttttgtagttaaatttacatattgagtaattattatttttgaattttggttgtgtttttaatttgatagagttttcataaattaaaattgcctaacccctaattataggaattggatgataattacccaatcctattttagttgatgggtggttaataccatttcatattcaattgaacatttgaataaatataaataaatgtttatatttaaaatataaaaaagtggcttttgacttggtcaggccatgttgtttatgagcaaatacatagctgagtatgtaatacgacgagatgcatagtcgagtgtgtaatacaaggagttacattgttgagcatgtattacgaggagatgcattgctgagtatgtaatacgcagggatgcattactcactgtgtaatacgaggagatgcaagatctttgtattacgactaggtaaaagttcactgtattacaagatcattatattacgatcatgtacaagatccttgtattatgaccaggtacaagatccttgtattatgatcgggtacaagattcttgtattacgactagctacaagatccttgtattacgagatgttgattgtttattgaaaaacatctcgacaacgctgaaatacctcacttcataaaccttgggatccttatttagatgatgttgcctcataggttaaatccagagtttattcgacctaactgtcccataatatattttttgcgagaattattattaaccccacatgacatacaattcgatatgattattaaataataaatagtccaaaaaataggtataatttccccctaagtcactttttgtggtttgcacaaagctggcttattatacgtagccttcctatttcttttggtaccagcccaggtagctcgttttataatatatgagttgggtgttacttgttcctgaacacttaaagattgtcacatttattgagcaaaaacgtttaagcaatgaagcttttatcttgtgtatttctcgtgattgatgcatggtggagtaagtattacaactagatgcattgggagtatgtactacgaccagattcatgtgagtatgtactacgactaaatgcatgtactacgactagatgtattaggagtatgtactacgaccaaatgtattgggagtatattttacgaccagatgcattgagtatatgtaatacgactagatgcattaggagtatgtattactactaaatgcatgacagagtgtgtactaccactagatgcattgggagtatgtactacgatcaaatgtgttgggagtaggctcgaccttgggctaaggcgagctaggtccatgcatagggcccactcaaacccaaggcctaaaaaattttatgtagtacgtttttttgcattgaaaaaaaatggtatttttgatattttctttgtaaaaagaggcccaataacactcacattttactttagataaaacacacactgaacaaatttcttgggcccattatt

SEQ ID NO: 37182 - DNA, 3596 bp, Cannabis sativa
tattaataaagcattgttattcgacaccagtgttatcgaacactttctagatgtgtcgtattatgattgactagagatagtgcctaaaaaattattacattaaactatattaaatttaatacttagttgaaccaatattagtaatattaacacataaaaagatgctaggccccactggtaccttttaacatttctcttattattattaatatttataaaaagaaattttacacaaattacctaaaatcatactttttttttttaatatttttacaaaatttatgaatttttagagaaaaatatataacattatttattatattttcgcaacatgtaaacaactgtctgtaaaaaaaaatttaaaattgttgattcttttataaaattcttttaaattaattaattatataattataattttgataggttattgaagacttaagctatgtagttcttctaagaaagaagttgagttacattgaaagcattccaggagtacttcttcctcatccatcatcaccatcatcatcatcatcctcaccatataatcataattacggaattacccctgataataacaataacaatgcatggcctaatactaataattataatttactaccccaaagtactcatcatcaatcctactatgatcatcatcatcatcatcatcatcatcaatcctattataatcaactacctttgatgaagaacaacaacaatatgataactccatccatgagcagccttgaggcacttctctccaagcttccctcggtggtgccgcccccggcgccacctcatatggcggcgcattcagccgggtgcttctctaatgatcttcttcaaaggagtactaatttggagtttgttgctaagaatgaagttgatcatgatgatgataataataataataataataataatgaccaagatcaacaacaatatcatttccatcatcacaacaatttatatagtcagaagtagtgattaataattaaataattatattaattattattagcagtttgatgattatttctaacgttgttgggaaattaattaattagcttaatttccttatctaatactatatatatatagattaattagtttcttttctctagatctctttatattatataatttagatttatatatatacaattatatatattgtgttagaagggtcttcttcttcttattattattattattccttagtacttgttattattgttatgctatcctgactatttataaatggatctcaggctcagttgctataaaaactgacacatatatactacatactatatctttgtatgtatgtaaatatacatatatacatgcatgcagggttgaaaagatccaatggaacttgacatatatatatatatatatatatacacacttgcactattaatgtttataataattctagtgaactttttcgttagtttaattccttaattatctattaatcacttgattttatactatcaaaatatagtggaaagaaattaaagaaaaagaattattttctagccaagagcaataattgggagtatgaactaactaatgatcgaacgaactcatgaatagcagaaggacagaattgttgttggcttaattatattaattttttcgacaaaaaatcatagattatatataaaataatgtgaatgtatatatagacatctgtttttagtcttttaataaaataaaatagcagtagagagataatttatcaataaacaaaagatgatgtatagagatagatttgataggcctcattttcaagcaaacagctactttatcacacaaaagtcttttttaagttaattttaggtaaacccaagaaaactaggtaacactcctggctaccacattcttagatatagatacatatattgtatatatacattgatctttatactgtgtagtacacttagttagtccacaggcatagactgatttcaagaaaatatattactttacttttactctttttcgggacttgtgtgttaagtagttagttatactagtaagaatatagtcaaacaattctcaaaatcttatgaaaatacacttggggataagaacctgcattatctcaaaatacaagtttttcgatatttgtaaaaacttattgatttcgtcaaaagaaagtacttaaatatcattgtgcaaataattttaaattctaaagttgattacatatttgaccattattattatttggttggttatagtagtcgatattctacaagaaaatcatgttaaaaaggaaaatttgaatttattaaacttgatttgcttgatgttttcttagtacatacctaatacaaacaaagttaacaatcacaaaaataaaattggtatggaaaaaataaatgagaggttttataatggcaaagctatgtggaagaaaaagaagataacttgctctctatttttaattgggcagagtagtatttagacaacctcagaaataaatattggaaattaaatagcaattacacagtacagacataagaaaaagtttacaatcactgttctgaaagaagaaaaatttgaagagaaacaacctcgttagtttcaccttttggatgtgtatttgaattcattcatatacctcttttgagttaaaatcttagtggaaaagatcagtttcttccttgaagtgtttgagtaagccttcaatgctttttacagagtgatctgatttatccctcactcgtacactcacctgaaacaatgtcgatccgatttgagtgagtaaatatcagaagaaaatgatagggaaatgaggtgaaagaagaatttacaatcataattagaattagaattttaatctagaactacaagcctcttaaacacaaaaatggaaaaaccttcaagaaacttggtccgaaacttggttcaaattctatctagatatgcaccaaaacaacttaaacaaatgttagcaatactctcatgtgtcaatgctggatgtgtggattttacgataaagggcttgaagaaagcgaaacggacaaaaagctagaattcaactcagtttgtgttaaaagtataagcaagtaccacaaataatttaaataattaatgagaacagcaataaaaggtacataaacagataatttgagaagaagaaaacctgtccagtgttggcttcctcctcaccgacaaccaatatatagttgtactgcgccaattgggcttctcgtacctgcgataatcaatgtcatcagtaaataaactaaaccaatcagagaaagcagcaaatgacaccactcctggacattgtgtcacattttcatttttcaaagacactcatgaaagaacaatacaaatatatagcacttcctcatcaaccattcagcttcaactcaaatcatttataggtggtaaggcctgatttatgcaacaatgtacaatgcaaggacaatattgtagtaaacacaatccctacatttgacagttgtaaatattgctagtttcaaaatgttttaattgataacgttcactcaaggacacatcacgccactcccatgagcaaaaatagtgtaaatgaacaatttggcattaaa

SEQ ID NO: 37183 - DNA, 4714 bp, Cannabis sativa
gcataacatgggaagaattttagtaccaacatcaacgaatttgatcaatgagtttggggatgctttatcccacctctcaatcaacatcatcccatatctttatcactttcataatcaaaatgaaagaaatatgtagttttatttacattgtttgagttattacaaaatctcatttggagaccaataaaaccaatgagagatttcacttgtgcattagtttgtggaggttacagatatattatatatatatatttggaattttactcctcaaaataagtaaatttccagcctttaaaccaaatctcaaatgcatactacttgatgttgctatttacaacatctttaccatcattgtgtagctctgatcggtccggtgtcttctcatcatcgagtaccaaatcagaagggattatttcatcatcggatgaggatttaacttcgtcaccatcagaacctagatcggaagccaatgcttctgacagctgatgtgtttcggacactagggatggtgaggaagaacgagagttaatgagattagacatgttcttctcgtcttccttcattctttgtgcataagcttcataatcgaaactcactgagtttcgccccccaaatgaagattccaacttatccatatcgaaaagctcttccatgatcttctggctttgagggttgttagagtatacaaacttaactttcttgaatgtctttggctcaataaatggtttcaccatctgcactcaaaaaggtatatatcataactttgtcaacaaaataactttggacacactgagatattcatacaaaccataacaagacactatccctaattatctacttcttcagcattaaatcacagctcaattaatatccctggaaagttattttgtaaagaattgtagaaaagaaactattatgcaatgttataataaaaaaatggacggggcgacgagtgcttggcgaagctattttgccaaaaactccgctcaagtaaatacaaaatgtagataatattagaactaaatacaaagataaaatagcggtgagatatgaaagtgaaataagaaatgagcaccttccagaaggactcgaatatttttggcggattgtagaggattccaaaacccaatctctcggggtagtgattctgcaagacatttgctgtttcccgagttgcctttattgaaatgctagaagtgttccagttttgaaaatcgactaaccataccatctgctcctggtctgactttagattaattattgcattctccatgcaatagactagatacttgatttgtccacttacaacgtttgtgttctaaaagtaagagataaaacaatcataataagctcagagttatagattatggatattcaaaaacaaagaaagagttattctattttagctacctggaaaccgggtctcatgataagaacagcccttccgaatttgtcaaaatagttagctctatagatttttccggtttcagcttcacgagcaatatcttcctgaaaaagagggaagaaactagtttgaataagcagatgatgagtctcaataggcttattattagcctacctatataattatttataacttaaattgctgttatgccttaatattagtctaactagtaaaattgattaggattatagaagctgagttgtctaattcttaacggctgagatggaataagttagctgtgttaatagtcctaaggtgttagttaaagaaacagtcagaggtgagttagtatttttagagtaaaatattgctcttagggagataccaaacagtctcgaaaagtttggaaatttgtaattcttactttgatatcaataaaatgcctgttctctaattgtttcaagaacttaattggatcaatggtgtatcaattgcattagccttgagtttctataaagaagaccaatgatatttcatgaggagatatttagcaataaaaataaagaatatagtatcatacccatcgaatgttttcgggtttgtagtctagcctccatttgatggtttgtttcaacatcttgcctgcctttgctgtattccagctccgtgctctgagatacctcaatatggatgcctctgaacagatatctggaagcttatcagcaatagaacctatcatctttctgacttcattgatctgcagaaactcaagatctaatttttagaaataaaagatgacagtaaataatggggcgattaaaattcgtattattagtttctttcagtttcatagttgcaaagaacagtaagaagctaaacaaaacagggaataactactcttagtggataaaactaaaatgcatgagtttaacaaaactaggaatgaatataaatagacaaataaaactgagaggcgggcggtgtaaacctgttttatttacacagagtgagtttgtgacaaaatttgggtagcattttcacttatttacagtgaagagctcaataatgatctgttaaattatttacattaaacaaagggaatacaaaaggatcaaaatcataagatgtgggactcaaatgtacctttgtctgctgctcttcaggggacaagcatttctccattgagatttgatgacacttttagagagcctttcacgattataatgacactgaaacaaacgatgctatcctgtttcatgaaaagatgttagcataaataaaagaatatgacaccaaggaatgtataagcttgaaatgaacatttatctgtcccttcagaatctgttaagtttgaacagacatgaattctcagtcataacattcaactcatttcaattggagaaagtttcttacaaggcaaaagataataccattaaaaaggtactaccaaattccttcacttaccatccactaaccaagctcatacatcaacctaaacatcaacagctcgtaaagaataaacgattgacaacactatcgtaaacttagctcagatacttatttttttaattaaactaggatcctcgcctaaccctacaatatttggggaccaagaaactataccaattgctatgtaggtactcagtagggactcgaacctcaaaccttgcggaagcaaaccacatgcctgaccatttgagctatcccttttcggtttagctcgaatacttttgtgtgcattgaccatcaacactatgacaaatctgttcctaacaaaatgagccatcttcattacattcctgtttgactaggctagattaggcttctactagttaaaaatggtctgttcaatccaatcaatgatccaaaaattcaacctctttcctatctcattctaaataagataaacagtaaaaatccctaaaaccaaattttaaattgaacacctttccatctcatctcaactcttccattcaaaaaaccgatacgaaatttgtaaacaaacacacatcaataatcaattgcatacaacaacaaagcaatttgcactaataagataagaaaaaacataattgtgtggatttcaggataaaatttcagtgcgcaaaataaactgtaaaaacaaacaagttccatacctggatgagattgaggaggaggttagcagaaaaatcgaagctttttgagagttgcaatggtgaatttgttgaagaaagaaagggtttttggattttgttaagagcgccaagggaagggatttaagcataacaactcgtcacaactcacgagtcatgactcagttagtcttctctacctaactcatctctctatcctattctatgttgttttaccctctattatcatttttaattaattttaattattattaaatactattttattagtttaggaaaaagttgtgtatgtatttatcatatttagaaatcacaagttatctggaccctttttgacccatgtctaattttttttttaccctaattcaattttgccatccctaatttagactttattatagcataaatatttctatgaattttaattattattatgtattttgacactaaattattattattattctctatgtaaacatttataacttgtaatttcttgatcttagctatgatgatgagatttttttttggtgaattataatgatgaggatttgattataataaatttggattggcttccaaacatagcctatttatatatttgttcttggaagggctatgatcacattatcatctcaattattttatgtaataaatatagatagattttttcataaagtgattgtgttttttttttaaaaaataaaatgattgtgtttattatgattgtacaagaaatattagaaggcacttgtggcattagcgctcttcaaatttttatatcgctattaacctaattaaatattagatcttatataaattaatataataaattttatagaatatcgctaaccaatcacaaaacgtcacctctaagtactgatacctaatcctaataacaatattctttgctttgagaaatactaaagaatatcagtggcaccacttcaaaaaaaaaaacatcagtgatgtttagcatcttttaagctgtcatattgctattaatacagttaaatattaagtcttatataattataaataataaattttataaaatatcgttaaataatcacagaataagcaccacctctaggcataacaagatcataaagtacaagatgcagaaattcaatgcgtaatcttagcattacatgtgtattcctgaataatctca

SEQ ID NO: 37184 - DNA, 2815 bp, Cannabis sativa
tacaatacttatattatacaagtactaaatcgtatggcatagaagaatctccatttatttatatattcaccaactagtatagtaactttgaaggtaagaaaaattcgggtataaattttagctaaagaagaaaaaaaaaaacttgtattagaagaaaacatatttgttttgaaccagccacgtcaataaacagtcgtgcgaagctgttaaataacattatcaatggatgatcatcacttccaatttcattttttttcccttcctttcacgtgttcctctttcaaaactatgaccagactactattaacaaaagaatctttgttcttacttgttgggcaaaaaaaaatgacatcaaggaattcctaatcctaacctattttccaaatcgaaagcaatttatcaattaattattcgctcgactgaagaaatgttcaatttgcaagcatccacgggactgttgactatttgtcttggatcctaatttgcacctttttgacccaactgaattagccttccaatcctgtcaaattaatttacaaacattgagaaaccataaacgtgagtgttctatgagaactaagcttagtgtgtaacttcaaaagcaaaaacccgaagctgtaaaggagttaaaagatatatgtccaaattataatgcaattttttaagcaattagttactgcttttctagtcagataaaaacctgagtatagaaaaagattaatgatttccattacagcacacaaaatcacaaataaagcttaccgctgatgattggttcaaagatcttagaactttgattctaccgcctcttccatcagcaccaacagcaatcaaatcaccattactagtgctttgaccttgtcttgtttcattattctggctacgcttgcaccacttacccaagtacctgtttgttccatcaggaccaagcaatcctccagagaaacatacatctcctacattttatacaattgtttatttaccaatgttgttgagcaaaagtaatttaattttaaaaccaaaatgtaaaactttgttcaaagccaaactctttctttacatggtaaaggtttaggaaacattttaatttcaggggagaggagaaaggggtaaggtgataagaaaaaagaaaaagaaaagtggaatcaatccataaatatggaaggcccatctgagcaaaagtaattttaatatttaatatatgtattgatcaatcaaaaccataaaatgcagtagcaaagtacctgaatttgagtgtgatattggggttgaagattcttttctaatgttaagcatgggcttgacttgaggaacatcgtcaaaaagcaccgtcacatcctcatcaatgtcagcagcaaaggtcttggaggtattctctacactagttcttggactcatagtaccacccaggtttctgtgtgcacgcgctgaagcttcctttttcacatcataagttgcactaggcattacctgagtagacttcggtgcaagaatatcctcagttgtttgatcttttgtatcaggatttggactaccatgtatgggcgtaaggaatttcgaaaaattcacacctattactgagcaatcatcttcgtcattatcacaagccatgtgtacatcaatatcattagttgcaacacagttttgtacttttataggatacaataaatcatcttgcactcctcccaactggttcaatttaagtgttgtcgcagaagtttgtttactttggtcttctaatacatcaatgttggctaaggagccagatttactgttggtaccatttttaatgacctcttcgtaacaagctttctttgaagctttcaactccctcagaacttgattatcttttatttcaatagctatctccatttcctttatccttgcctgatgagagtagcaacatggtaaattaggaaaaacttatgaaatgagaatcgctggtaagcttgaagtgtgcttaccttcaatttatctatctttcctttagccttctctagttttttaatagatcgtgactccccccgtccaagaacattgcacttggtcatcaattctttgtaagtcctatgagtatacagacaagttcgatcacaacataagacagaaatatacaaatgtaaatcaagcggtcacccctaataattggcaacaagatattagtttgtaatcagacagctggcctgaatcgacttcaagatatttgcttcaaacataatgtaccaaattactaagggaaaattcttaagtacaaaaatttaatgctctgtgaaattgataacttacttgttacgcatcaccaaagaccttcgtaggatgtctattgtatcttgactattaccaccattaccaaaggaggcaagtttttggacctcatcttcgtctaggtccagatcagaaaccctggattgcaaaagccatgtgactttcttagtaacagactagagcacatgcaaatagagattcataagagaagaattctgaagagatttatgtgccaacaaaggccattcaactttagcttaagtagtaaacaatggggtaagtaggtgaaactacaagtcaagtctcaaataaaaatttgctaggaaaacaaaagggaaatccatcaaatgcacccacaattttaatgctgctagttctttggccaaagccatattcctttcttgcaaccttaagcactctgaagtcgatctaccaagctcctgttatacacagttgacaaaactccatcaaatttttagctcacactaatgagggtatgatcaaattaaaacattaatgaaatgcaattattggttcacctcagttttcc

SEQ ID NO: 37185 - DNA, 5742 bp, Cannabis sativa
  modified_base (1280)..(1289): a, c, t, g, unknown or other
tcacccatgcgcacaaagctgggtgactctaagagcaacaagaaatccaactaagcattattgactggttgagtccaacaaccagtgtgtgagtcttcaccaataatattttggtcataactctctcaatatagctcaaattggattattcaagatgttttaaaaagaggaaagaaagatctagaacttttattgagaaagttgtcattgaaaagtggatcattgagtgttgcttttactgcgtcaattaattaaatgttataagattagttacataataaataaaaactatttattttattaaatattttttcaaaaataaagtgacaccacaccaacctgctcaccagtgtggtggtccggtgtgtgagtcatcacccatgcgcacaaagctcggtgactctaagggcaacaagaaatccaactaagcattattgaatggttgagtccaacaactggtgtgtgagtcctcaccgatagtattttggtcataactctctcaatatagctcaaatcgaattattcaagatgttttaaaaagaggaaagaaagacctagaacttttattaagaaagttgtcattgaaaagtggatcattgagtgttgcttttactgcttcaattaattaaacgttataagactaattacacaataaataaaaactatttattttattaaaaaaaatctgtaaaaaataaagtgaagccacaccaaccttctcaccagtgtggcggtctggtgtgtgagtcatcacccatacgcacaaagctaggtgactctaaggatccaaacccaaatcactagccatcatcttatacacttataacaaagtattcatatctcatgtgggactccttgcactatcacacactttacttctcatatattttttgtacattttaacaaaagttccaacaatctcccacttgaaattttaaaaaaatattttcttaagcaatatcagaaaaactatatataagacaatggttaaacaaaagtgtcgtttggtaacactttattaatcagttttctgtttttaaaattagaaatgtgaaaatatttttcaaaaacatgttctataaaactatttttacttttcaattttttaattgaaatcaaaattttaaaaacaaaaaagtatcacttttattattttttttttaaaaaaaaaattaatcaatgttttagactcccactcagatccaaactcggccctagccctggtgccgaacctagcaccagacccgacttaaataaaataaaaataaactttacagaannnnnnnnnnttttctatttttaaaattaaaaacaaaagtggttatagaacgtattttcttttttcaaaaacaaaattttaaaaacaaaaattctactttatttttgtgattaagaaattagaaaacataatttttaccaaacggcaccaaagatatctttcagtttgaatctttgcatagtaaatacgaattaaattttacaagagtgacttgaagtcttgaaccccttggttgctatattcaattaatgtgtcatcacttctggtctaatccctggcatgtttttcggttcccaagcaaaggtcttccttcttcccctgagaaagctcattatttcttcactttcttgttcatccagtcaggctcttagcaaaactgtcttttctggttctgaaggatcaagtaggatttcttcaagttcatcttctgttatatccctcacattcttctcttcttctccttctaggtgcttgagttatgctagtagagagccctctagttgttatttatatatgttttctcatattttaatcattaattgtttttgtttctatacttattttaattatttttatgtcataaaaaagtaaacttcaaaataattttgatatttataaaatttaagaaattataaacttttcttgctcattttgcaagatgcactaccaaaaatgcctaccaaaatttaagcatttcatgaacaaaaacttcaattttttccaatttgcaagtcacttttcttcagcacatgtcaccaaatgtgctttgaaaaaactgcttgtgcggttgtgccggcacaagaaggcgtttatttcaagtagttgtgccaaaacttggcaagcgcaagtagttttttcaaggcgtatttcgtgacatgtgccggcacaaaaaggcgtcaagaaaggtgtcccttgcaaaaactgtttttttttttaaattgcatccattgttgttcttgttatttatactttgaaacagaaaaagtatatcaggatcttttttagttagaaaaattaaaattaattattagtaatcaagaagtcatcaataaaaataagaaatatttaaataaaaaaaataaaaaaaaaaaaaaaaatcattatttaatttacttcaaaaagaatgaatgaaaaaacattatatatttatctgaaatacatcttaactcaagattgaatattgtgcggtcaatttgaataactttatgagtacaactacaaacaccagaacataaatattatatattgtattcttataataatagaaccgattccaaactccaagcaaatgaattaagaggcggtgattgatgatgatgatgatgatgaagttgcagtgtgatcaatatttgaggtgaaaatagatagaagagccttctgtgtatcttcatcaacatgtccatcatgcttatcaaagaaagaaataacatactccaaagccgaactctcacaaggcaacctaatacaactaataccattattaccacccactgcactaccatccatctctgctgacattctcaccagttccaatatcactatacttcccatatatttcaaagccaactcaaaacgcttctcgtctctgctgtaaacgacaacgtgctcttccttcgctgctgctgctgctgctgctgatgctgccgtcgttatgttttttttcttctttgcagtgaaattcttagtcatggaaacaagccattttggagtcatcattttagcgattagttaataattaatgtgttttagaactcaaattaaaaagattaatttgtaattgtgaaagacttattatttgggggctgagagtactataaaagtataaagtgtaaaagttatgtgctgcactatggtacggtatttatttataggagaggcggttgtgtataccgtgtctttattctaagatattatctttattttttaaaaggtagttactcaaattaacatatactattctatttataataggaatataattggaaaatttaatatactatataaattttaatgcactcatatttttatattaattaattttattactttaataactgttttatactattgtttcatttagtatttactttatttccttttttattttatttttcagtttcatttttacgattaactcttattagatttttttttttttgttttttttttttacaagaattttatttaaaagttgaatcttttgtttattattttttaaagaattttgtttgaagctgactctcttgtttaaaataaaagaaatgggtgttcatctcaatcatctttattttattttttaatctttaaggattttctttaaaagttggatattttgttataagaaaaggaagaggtgttcaatctgagtaattatccccgaatttttcagtgtttgaagtaatattatttttcttattctagtatcaaaacataaattctttcataattagtattcaccctattcaatatcttatttaataatatgtatgcttttatatttgtttatttattggtattaggttactactatcatttaatcaaatagaccaataaagaaaatagaattaaaataagaacttaatctaaaataattaagtgattgtgccaagtagaggacttagacaaggcaaccctatttctccctatctctttcttgtgtgtgctgaagccttatctactgttattcgaaggtttgaggagaaaaaatcgatacatgggtgcaaagtggcaaatggagctcctagtgtatctcatatgctttttgaggtgaccgtttcctatgttgtaaggctactgatggagaggttactcgtattcttcagttgctgagtttgtttgctacaactacgggacaacaagtgaattttgataagtcatctgttttttttcagtacgaatacctccagttccatgagacagttcatctatgctaggttgggtatccatgaagcgactgaacatagtaaatatttgggactcccgagtactgttggaaggaacaaaaatgtggtttttggctacttgaaggataaagtgcagaatcggattcaatcttgggataataaattttttttctcgtgcaggtaaggaagttcttatcaagtcagttgtttaagctctcccgacctacacaatgaatgtttttctcatgccagttggtatttgtcaaggacattgagagatctaaaagaaaattttggtggatgtcaactactaataaaggaatacactagatgagatgggaaaaactcacagttcataacaacaatggttgaatgggagtttgagacttgagggacttcaatttagctcttctagccaagcaaggctggagattccttacttgtggggatagcttgatggggaaaagttttaagcaagatatttctcttcaggttcatttctctctgctactttgggttgtaacccgagttacatttggagaagtgttcttgaggcccaagagttagttcgggcaggtgctagaagactagttggtaatggttctaacactaatattttgtcaaatccttggttaccagatgaattgaatccttatattgaatcttctcatccagctcttgttgggaagaatgttaattcgttgatgaagatcgacgaggaatgggacgaggatatcatttctgatgtgttacgcgagagggatcatgcaatggtgtggaaaactcctctgagtttatgcactggcagagatacttggtactggttgaaagatgattcaggaatgttcacggtcaagagtgggtatgcactgctacaaacaattaaagccagcagtaacacaccagataattctggtttttggtgccagttatggcaactgaagctccctcccaaagtgcaaaatttcttgtggagagtatccacaacagtcttccaacaagatttcaactttcaacaaagcatgtgccaattgatcctaactgcctcttctgccttgcaactcctgagactgctttacatgttctggttcggtgtaattttgctcaaaactactggagcagggcccaagttccagttgtagcaggtgatgcaatgatctttacaagctggtttgaggtgggattggcatcttggaacgtagcagaatgcttggaggctgctatgatatgttggtcaatttgaaggcatagaaatgatctggtttggaactccaaacaacctgatgttagtgaagttttaatagtggaaaaactaaactatgttgactagtttaatgctcaaaaaaacaatgtcactgctactgataccaatgattcgaatgggataaatcttgagcattggaccccccaaaattctctactattaaagttaatgttgatggtgcgcttttcactagtcagggacgatatggcgtgggtttggttgctcggactgctgctggaatggtgttgcaagctaaaactttaactaagggtggtattttgcagcctcatgttgtc

SEQ ID NO: 37186 - DNA, 2182 bp, Cannabis sativa
tggagctgaagatgtgaaaactgccccttctagtggtagaatggtctttagtgcagctgggaagcagggctcaaaatcaaataaaaccaaattagataagaagggtaattcagatagattttatgatgatagtgatggtgaaaataacttggaagctgaagatgacgagtctaatgggaacaatgaaagtactgatatgcataaagaagtcagtcttgatcctagtgtacttcttgaagtttctggtgctgatcagaatgctctcttcaaggttatacaatcatttcttttcaattctacattttgaagtttcttatatttagtttcacaagcatgaaacgtctatctcttgctgttcacagagctttgatgatgttggaggcccaggtcctaagacaacacatgaagttgctatttttgcatcaggcacatggaaaaaggttttttttttcctctctctttatttttatctaatgattgattgaagggttctgttatccaatagaaactagccaggctaggttcaggcttaatgttagcaagtccaagtagtttatttgcaatgtatgaaacctctgtttgtatgaacaaatagatctaaacggtggggctaaatcaaaatgggaactagaaaaaacagaaatttgaatgtgattttggctggccttgtcatggtaatcgagcatgttgcagaatttcaaatactgccatataaaaagacagttgtcttagtaaaacaaaatcttcgaaaaatgatctgttctgatctgcacaaaaacctgctggaacttataaatgctttctttttcacctgtggctgtattttcttagtggatttcaatgctgactgctttatatgtatcaggtgaaaggcaaaaacaatgatgctagcagcaaaaagtctcttgtttcagtggagccggtttcgcagaaacaagaagtacaggtgtgagatcttcgtatttatttaattatatgtgagttatgtagttgggtgcttctcttacaagttcttccatttctgttctaggaaactgagaaggagttgggtgaggatagtgattcagaaagtgatggccagatggtagatgggattctttcttcaggtccaaaatcttatgaacttccttctcaagctgaacttattcaccaagcctttgcgggagatgacgtggaggatgattttgagaaacataaacagatgattttgaatgaggagaaccctgaaccagaaaaacccgttttactccctggttggggccaatggaccgatgtacagaataaaaaaggtttgccttcttggatgctgaaagaacatgaaactgctaagaggaagagagaagaagctgtaaaaaagaggaaggatgcgcaacttaaacacgttattatctctgagaagttggataaaaaggtaatttaaatggaaaggaaaaagaaaagagaatattatcgggctgtttggctttataacttaaaaactgtttttagtttttaaaaacagaaaatagttttttaaaactaataggggttgtttttatttggaattttgcaggctgagaagctctacacaataagtttacctttcccttacacatcaaaagacgtttatgaacagagcattcgcatgcccatcggtcctgaattcaacccagcaactacagttggagctctcaatcggcctggagtaagtgcctcgctaacagatcggagaatcattgaattctcgttatttatagtttaagcatacacggtttcttacatgggttgcgttgctttctttacaggtgatgaagaagccaggtcaaattatcaatcctattgaatatgaagacgtggatccttatgaaaagggtggtgagcagcagaaacgtagcggacagaagcaaaaacagaccaaaaataaaaaacaaaaacagaagaatagtaagaatactagaagttgttaaaagaggtactttcgttgcttcggaagtaggagaattttggcccgtttaattaatttatttgaaatgatctgtaccatcatattattgagttatagcagattttgatttgctattgatgtatttttctttacgattcttcaaggaagagaaaacactcaagaatatttgtgatatatatcacaaaagtgaatacttgtgattctatcttaagacaaatagcgtctaaaccttctaaa

SEQ ID NO: 37187 - DNA, 3793 bp, Cannabis sativa
aggttgggagagaagtggcacctttttctgcagagattttggacgatgtggtgggcaatgcaagtgagctgaattcagagaagtgggcaacttacagcagcagcgatgcatttaccttagctcaggcttcgaaaaattaggttgtaggggtaagtattgacttcttcgtcttcacttttattgtagtgtgttgttatcttatgttgttttgttgtaccaattggccttgactgcggagaggactttgaaagaagtaggggccttgatcatatagctttaataggcccatgccaaaaatgaatccttggatactgacaacagggctttacactctagtctagaggtggctaagtcttgggtcactgctgaaatggacagggtcaaggctgattgcaaggctaaggttgagcgagcagataatgaggccagagccctgtactacaagatgcactaggaatacaaggctaaggctaatcaagacaataaggtagagctagatctacttaagtctcaagtgtcatccctcaagggagagcttctctaagtgataaaggagagagataccaatgattctcaactactgattcaaggtgatgctctcaagaccacactccaagaggtcaacacttggaaaaataaggtttgggagaaagatcaggtgatccaaggcttgttgggcaatgtcgaggatctaaagcgggagatgaggacttgtagaaaatgaaagctttattttcggtcaagtatgatcagcataacataattctacagggtggtcatgcaaccagtaatgctcacaatagaaacataaagaagttgcagagggaggttgctcactaaccaactaatggtataaaagctttcatcgccatgacggccatgtaaacggccaaagagactactgagtaatctatttgggattctaccaatgtagaggctaaggctgagaggctccgtcttcaatctatggatatggcttattcaatacttcttcatagtttgtggaaataaaaccccactatcctcaagcatcttagagctgacgaggtagaatttactcggagggtgcatgccatcgataatgacacttatctcaagaaatatgaccttcacagtggtggttgacgagtttgccgaggaatcatctagagacttagaacctgaactttctactcaagttgtggtttcttctaggaatgtcgccaaggacctccaggacctctccaaggataaactcgacagccctctggctctagctcaagatgtacctctagcttagacccaagtccaaatccaagattcatcctcagttccagatcaggcccaagacccatccaaggcttagttttatccttaagctttcctctattacttaaaccttttttgcggagatagttaattaagccttaactgcgaggttgaatgtaataattttacgaaactactcattttatttatgtatgtttatttttcttgacatgcttgtgtttgctttattgttgtgctattacttgttcactaggtcattcaatagattgccttagggttttttgaaacttctggttctaacggccaaagcttgatgttgttaggctttttaactttgaaatcacttgttgaatctaggaagtgtgcaaattgcaaatcccttttcttagatgtcaaccacgtcaaagttctctttggtgacacttgtaaactttggtgagttaatcgtacacagaaagactattagcttattcctgaatagccataagagtcaaagagcttagctctcatctacgtgtttcccaataagctgccttaagcagaatgctatagaaatctttgacatttagatttagtgaggaaggaggtaaatgtttaatagagtctaggaaaagttcctcgagggaaataaggatggacacgtattaacacttaggttgtgcttcttcaatccaaagtaacaaagatggattagcactagataggtttttctcaaatttgttataagagaactgttgaaaacgtgaaggacttcagcaaagcttctttttctcactccttgtaggaaacctatcaatatgttcaacagaccaaggcaactgcaataggattcaggtgatgttcccttttcagggaaagggctaaaaacatattgcatgtgcttttgtggaaaccaagttgaacatgcaatagacttcaagtgggagttgaagatgtattgagattcaagcgatatttccacccaagaataaaatacaagtaaataatgaatacaagtaatgagtgggtaatgtatggttttgagggcatatagctaggtatactacctcccaagtgagctagaaagtttggacgtctctaaattcttggtcacttgtttaaaacatagcttgtgcaggagacaaaaatgtgaattcttgtgtaaatatcttctatttttatttcattatacccaaaggtttatatgaagaaagaagatttacatagaattacatgaaacttagaggaatatcaagatttagataccctctgcctattggtagtaacgaaacaagtgatcagcattccatgcacgagggatctctgatccatccattctcttgagttgaaatgttccatttctgactttatgttgtatctcgtaggatccttcccaattaggtcctaagacccccactcctagttcttgcaaaatcgggaatactcctctcaagacaagatctccaacatcaaatgtacgacttttgactttaaaattaaagtgcctagaaatcttgccttggtacatcttgagttggaattgtgactgttcctggagctcgttaattaaatctagtgattcctagagcaaggtgtgattctgagttggatcataagtgtcttgtttgtgagagggaaccgcaatttctactgggatgaatgcttcacaccaataattcatcgaatacagtgtgttccctattgaagttctctttgtggttctatattcccaaacgaatcgcgaaagctccttcgcccaataggcattacaagcttggagttttttcttcaacgttctctttagaatcttattcacaacttcgacttttccatttgcttatggtctggccatgtttgagaagctcttcacgattccatgttaaacacagaagtcagtgaagtgatcactgtcaaactgcttctcgttatctgagacaatcttgtgtggaagtctaatgtaacgccctgtctaacagggacgccatgtgtatgcaatttaataaaattcttcttttatatactatataattatactaaaagtgtgggtaattaatttttttataattaaaattcgacatataaaactattcgataaaagataagtgatgttaattacggggtccccctgctttcaaaatattcataaactggtttaattgtgtttttacaacataaattttgtaatcccaaaatactttcaaaatagagcatcctgtttactgggccatgccactgcggctgatatgtatattgctgctacgactcatggctgctcaattttagccttccctttaccttcaccataaagcacttgtgagtcatagagactcagcaagaaaagtaaaataaacaataactgataataaccatcaatttaaatatcatatcaacacgtttacacatttacatattatcataatcactggtactttagagagaacccctttttaccactcgttaactacgagctgaatatgttactatggttgcccggtgaagcaaacgataagttagaaacctaaccgcggtttcaagagtaattact

SEQ ID NO: 37188 - DNA, 2825 bp, Cannabis sativa
atctcaaaactaatttacgaagagtagagttacccaaaagctaacaaaatgcacttaaatcatttgctaagagcaatggtgtaatgcttcccgggtgttcttttcaaaattgtctaagaactcagttaattttgccactaactattcaattcttttctatttggcaagtaaaatgacagtgaacacaatgcatgaaagggttaccttaatcaatgcttgtgtctgtcaagtcccatgttggatcacattggctgttaaaaaagtatatacaaacgatctgttttcgtgaagtcgttgcattatagttggagttgagggcgaggctttgacttgattatcgtctcatcgctatgcttaatccattcggaaagtctccatggcttctgccacttccatttgaactgcagaagccactgatgatgacttctcttccacctccagagtttcccagcttgtgcaacggttgctaatttcttcatcgaaagttgtcccattggcaccatctgcgctaacaaaaatgtttaccttcttaacagcacaaacacaaaatatggaggcagtaggaataaaacaaaggaattacctttcgtgtctggtttgcaaaagccaccgagtctttaaccgtcccattaactaccccgggagtgaatttgagctgctttggtgccggaagggaaattggagacaagggaccacccatatcttctgccaagtgtttcaacgaagaacgagaatttccctgtggaaccaactgaaaaaacttagtatgctcgatttgagaataatacattattatgcagcaaaaatatgaaactcgggtattgaaaagatggtcttaccgaatctgatttaaccaatgcagtagcagcagcttgctcctttgctcttacctcccgtacgagctcctttcgctgagtttcacttatttgcaacaaggttactagctcattcagcttatcttccatgtcctcaatttctaagttcttctcccatagttgacacctgttgacatgaaggtatatatcataagactagccttgaatttgtcaacatagttttgagccaaaaattatgatatttaccttgcttccgcggttgtgttaaacatgtactgaagcaagttcttagcatctcccatcgaacgcaactggttccaccgtccacgaccaatcatggaacgctctctttcctctgcctccgaaagctgtgatgccattgcgatgagtgcatttgaagacatgctcagcatgttctcaacagattctcttctcgcctttcttgaatccggtgacatggacaaaacccttttcaacaacagaaaaaataaatacatattagtcctaaataatccattagaacatgtccaacttcaaaaatcaatttctatttcatacctagaatatccattgtttcctttcgggggactattcccttcgaaagagaactgatccacttgcttcagtaaagccaactctttcgccaatgcagctcgtctgaaacataatattatatttatgatagtaattaatatgggagctaatctatgaatgaatcttactattactttagcattggggagacaattaagttagtatgagtacataaatacttacacttgggtttgcttctcgtattcaaaacgaacttcgtgcactttaacactgacctccaattcatgatcaagccatctctgcaaggacttttcattgctctacatatgacatgaaaactcgcatcaaattttccgatatataagccataataataacaaatcaagaaatctatcttgttaatgtatattcaaaaccgttataaacaaaactactactgatttcctctcagaacagaaaaggtttcagtaaagtttgtatcttgatttcactacactcgttagttagttagtcataagttttccctttcccgccctatacataaaggcagctcttgttttttgtactatgtagaaatgagtttaaagaaattgtcgaaaacagacattgaagcaaatcaattggaaaattcctggggtgttccagagagagttcttggagactaggttgtaatgggttgccattgctacatagtcagaggattagggagaaatctcggaaccttagatgtacgaccaacatttggcgttgtctttgttttagttttcattttagtcgtgtgtgctccttgtgattatgtgtgtaggagctttggaaaaagtgtttgcataagttcatttccccacagtttcgaatctcgatagatgttaagaacagatctttacctgggtaaccgatgtatgtccattcgaatttgctgcaataaaaaacactaaattaggaaaaacagaatttcgaaagagaaaaaatgcttccaagtgaaatatcaacctgcattgtcgcgcactgtagactttcgggattccaataattcctttagccgtttagtagcaactgcagcctcttctgtctttctttggagaaccttcaagaatttatataaaagtcattagcaagttcttaaaaagtacataagaaaaacacctttgtgtatagagaatacataccattttctgacgctggttcaaagcttcaagcttgtgcctctcgtactcatttctccgtccttccttctttagctgcatattacaaaatcatagttaaatgtatttttcctaagcatcttcatctttagctttgttcccattatttcaggatagatgatagagaaattgaaagttaaaaacctgcagcaattccttttcgcgagacgctttccattgtcggaattgttctgcctcttgctttatcttatgctgcaattgaacctacaaa

SEQ ID NO: 37189 - DNA, 7390 bp, Cannabis sativa
ctctctctctctctcttaaataaactattgatatttttctaaagattttgtatagtattctcctgttttttttctttgtaaaccacagcattacacaatttttgtaaacattattgctaaattgctgcagggaaagttgattgaaattcagtttagtacacttgggaaaatttgtggtgccaacatccaagcatgtaagcattttttgcaagtctccttgttttttataacatagcaatttttccccatctattatactgacttgatcttcacaatttcatgggcatgtcaactccatacattttattgtggatagtctttttagagaaggtaattttgtaattcacctgaacttcgctgttaatttaaagttatacttgtagactccatttgtaatctttttttttttggtgctggaacagtcaagagttgttgagctggtcaatggtgaaaggtcattccatgtattttaccaactttgtgctgccgcgccaacagatcttaaaggtagtaatttatttacactataagctttggaaattcagtgaaacaaagtatctgaatcggatggacccctttaagttttgtaacaatataacttgtttaaatgattagcagtacttgcattaatttttccattcaactggtagataatgttttatattatttctaatatagtggaatcatctggcatttgttttatttctttgcagagagactgaaccttagaatggctagtgagtacaaataccttaatcaaagtgattgcttgaccattgatggtgtcaatgaagctgagaaatttcatgatctcatggtgagaaggaaattgttgtttatagcaccattcatgtggtcattccaccttttttacttcccacttttgctgccaatatcataaaaattgatctttttttgtttcttttttttttttgggtggtatcttttctcttaccagaaagcactaaacattcttcaaatttgcgaagaagatcaagaatgcttattttcaatgcttgctgctgtattatggctgggaaacatatcattccaaatgaatgaaaatgtgaaccaactggaggtcttatctgatgaaggtaacccatgttcacttgtatttcttctcttttaaatgtataatgaagaccatacctatgtttgcatatttagttttcaaattccatgtttgaagtgtaaaataatatgatggcagatggctatctcttaacaaacatgttaagaaatgaaacgtcatgtgcaacattttggttgttggattaatccaagtgattcaagatgcagatactcttaaatttgtttctttcataattaccgaagatattttgttcacatcaatgttgttgaattgttatttcagtgcatcactgttctgaataaccatgtggtgcctgtgtctatgtgctggccagttacatatatttcctttctgcgctagggaatgaggaaatgaaaagtttttctgcacgtgagtaacctttattattttctctctttttcagctctcatcaatgcctccaatctgatgggatgcagtacccaggagttgaaattatcattatccacccacaaaactgaagctggcaataatagcattgccaacagattgaccttgcagcaggtccacttgctattatatctctttgaagagaatgcaatccatcagtgaaatatgaccttacacattttttttttcattatccaggcaattgacagaagagacgctttggcaaaattcatctatacatgcttgtttgagtggcttgtagaacagattaacaagtcacttcaagtgggcaaacaacaaattgggaaatcgattagtattcttgacatatatgggtttgaatcttctcaggtataatatttttactcttttttctttgacatttttcgataaaattagttctttgttttgtgatcatataaaatctttggtcttttttttcagaaaaatagctttgaacaaatgtgtattaattatgcaaatgagaggctgcaacaacatttgaaccggcatttacttaaacttgaacaggaggtgagcatatctgaatgtttggcttcaaaaaagctttgaatttgatgatacttaggaacttcttcattatagtggtacttgccatataattaaatccatctcatttgatttcaagttgcatcactggatttacatttggttttgcaaaagtttagtgatcagtgatcataatcatcgtattatgttctgactaatttttttgtttttttactttaggattatgagttggatggtattgattggaagaaagtagattttgaagacaatgaagagtgcttagaactctttgagaaggtatttctatgatcaaagccttctgtgcctttaggttgtaattgtttttcttacataactaaagtagtcaaatatttgttgtgttttggatgtgcagaaaccttcagggctaatatctctgttggatgaggaatcgaacttaccgaaagccagtgatctgacctttgccaacaagctcaagcaacatttgaattcaaattcttgctttaaaggagaaagaggccgggcatttagtgtttgtcacaatgctggagaggttggtttttatttttttgaaagaagttaagagacttctcattattttctagaatggatgatatgaagaaatgctcaatgttttcaacaattatactctttccaaggaagattgctaaatttcacagttgagtttagggtttagggtttcaatgctcaaaatattatttgctttttcactaatatttgacgttttcaacttttcatcaggttttgtatgatacaaatggctttctggaaaagaacaaagattgtttgcattctgatttttcccatctcttatcatcatgtcataatgagctcctgcagctgtttacctccaaaatgcaaaatcaatcggctccaactacagcatgccatatcagttcatcagactgtccgagaccgagcattggtacaaagtttaaggtacatatgcctctgaaaaattacagaatgtagcttgagttttagtatgcgaacctagttcaagacttctctatataaatatatatgcttttactgatgtttataaaatacatcaatattaacccaagagggtagtttaaactgtcaagcttattgtttgctcccacaaggtttgaggttcgagtccttgggtactcatgtagcttgctagtttcttggtcctcaaatattgttgggtttaggcggggaatcccagttttaaacttgggcaatctcttatagtttaagcggtttttggatttacaataaaataaataaatgaatcaaagttaacttgagatgttacttagcccatggtcttctgtgtttcctccatctttctgatgacctgctttttgtttcttgtataaaagatatgcatttaagagatgtgacctgcatttcaattttatgtgttacgaatcaagatacttggaatagacattatgttttatgagaataacaagaaacatagctgatatttaggagtaaatatcctttgaaacatgggtgatcatttttcatttattattataaaagttcacatcaatggaggattttggttaatgatcctctgagacaaggatgatattgtttactcttcggtataaagtatttaatgacctcttgcatccttgtagattcaaatgttcaaactaatgcatcagttggagagcaccagacctcattttatttgctgcataaagccaaatcaaaagcagcttcccagcatatatcaggtggaccttgtactacaacagcttaggtgctgtaaggttttggaggttcttaaaatatcaagatctggatatccgtctaggatgcaacttcatgagtttgcaggaaggtgagttgatggtagacctcaggcggttaggcttttgtttttggatagtaatcaagacaatagattagaaatctgttgctttttttaactgtcaattttgaatccataatcttatttattttctttctttgtgttttaggtacggggtcctacttccaaagacctttgcagctcgggatcctttaagtatatctattgctgttctgcaacaatttggtatccctccggagatgtaccaaattggttataccaaagtgtttcttcgaacagggcaggtaagctattgtctttttccttttcatatagttgctgtagtttaatgaaagcagtgttattgacaactacatcttagagtgtttgtgcttttattaatcttcaacatttaagggatctgtgaataaagtttatcatggacatttggattttttgtgcagggaattcataattctattgtgcttgttttttcagattgaaaagttggagcataggagacaacaagttctacaaggaatagttggtgtccagaaatatttccgtggtcgccaggctcgtcatcatttctatgagcttaagaagcaagtcaacccattacattcatgtatgtactcatctttttcggttattttcatttgaacacactggagcagaatcggctttatatgatcctcttgtgtcatgtagtgcacactcatgtgtgccatgctatcaacaaatataaatgttgttagaagtcctgttagtttatttcaaacattcagttcaggacattgtaaaggggcagtcacatgatgcactcgatatagtgctttaaactcaattcttttgggtcatccaatcatgtttaatcctcaagaatgatatttcatttgctatttacaattgtatttgtttattaattttaatcttatcatgcagatgctcctagtgatctttccagagggaaacgtaatattatggtcaagtggcgcacagctagtgctcctaaaacactagatgagctgcaggcagttatatacttacagtctggtaaaattggttttgtattcttttttcttcatttttagtggtgtaatttcataatattattatgaaattgttatttatatttttatgcagtgatccgtggttcactggttcgaaagcaatttatagggacacctgagttgaagaagtcaaaacctgagagtgtgagatatagaaagaaccatggcaggaagatgtctgaagtaaaggtatatagttactaattgcccacaagaagataagaatcttctcaaaatttggtcaacatttgatgatgtgtttttcataatttctaattgttccaatgtgaatgttttgtatgtttttgagtatattttgtgccatatttgttgtcatttagtagctaagaaaacaaatcataacattggaaagctgggttgccttataattgagagactacagttcatatttgtgtgattgtgttcctaagtaaactttgcatttggagaaattcaaaaacagaagatttgcttactttgtgagatcaatgattttaagagttttcagcatgtatggagtaattatagggctcttgtcttattctttttatctatttgcttcggcaggtgtttgctgagcagcaggacatgcaacatgagaaattatactccgtgccttcgactgtaaaagagcttcaacagagagttattaaggcagaagaaactctggagcaaaaggaggaggaaaatgcagcattgcgtgagcaagtacgacagtttgaagcaagatggtcggattacgaggcaaaaatgaaatcgatggaggagatgtggcaaaagcagatggcttctttgcaagtgagttttcatgtgcatgcttctcatcagttttaaaagtgtgcctatctagcatagttaattatgaacaaaaagcctgaaatatagtcgtaaataaaagataacaccatgatgtgagaattaaaaaaaatcaattctttataactaaaatgaaactctgtttttactacaggtgagtttggctgcagcgagaaagagccttgttgttgatactgcagttggtcaacctggaaggcttgatgctgttttctcacctcgttattatgattctgaggatgctacatccatgggttctcgaactcctggtgcaagcacacctctcaaattttctaatagtgttcaggatgtgggatcaggacgagatgcaaatggtactttgaatgaagtcagcaatctggtaaaggaattcgagcagcagaaacagactttcgatgaggaggccaaagctatagttgggatcaaaacagggaagtcagcttcaaatataaattctgatgatgatttaaggaaacttaaactgaggtttgagatgtggaagaaagagtacaagttaagattgcgggaaacaaaagcaaagcttcataagcttggacattcagaagcagagagaagtcgtcggagatggtggggaagaataagcacaaaagcctcctaggaatctggatcatggcaaccatgggaaagtatatggagaattctacacaaaataattggataaagcttttgtgagtttttcccttttgaggagctgctcgcctgcatatttatggtgctgctgtcttaggctggagcagcaatggaagagtgaaattatagatcaacaaggttttgggaactcaagtagaaatattggcaagtttgtgcataacaacgccagatagttgtagtgagttcaaccccaagattagttaatttgtgtataccccctctgttagtgtagataccatttagagctcagaactggatatagagaagaaaagtgttcataatgctcttctttatgtagttcgtgttgtgacatttttacccataagcaaatgttactatttcatgccatatctcattctctttgatcccctactctgctcaaaaagtagaaaatctaattatgcaaaaacaaagttgagttcttacctcatccatttttcttttttatttaatatttttctcacgattaaagaatataaataattattaaaaaatggccggtttataattgaaggaatcttttggtgggtagaaggaataagtacaattttgacttgtttttttttttttttttatgtaccaagtaacaaacatatataatttgatgattggtctattcttttgataattatatctaaaataattggacacgaatttacagcaaggtgtttatatattccgggttatagatctataattttgtaattaaaatacacaattttaactgtattgctaatgtacaaaatacatttttatagaaatagttacgatcaaattaataagtttagttgcacaaattaaatgaagcttcgttcgagtatgatgcacttgttcgaaatgaaacatgggaaatggtttcttctaatcacatttctaatctggtaggttgcaaatgaatttactatataaaggtattttatggtagttctattaattgat

SEQ ID NO: 37190 - DNA, 2572 bp, Cannabis sativa
gaaaaagaattctttagctttcatttctaagtaggaggaggtttgttcacttaatagctttccagggtgcaggcaatatgttggtttttagtcttaacgtgtaaactgattaaatttctctgcaggctctgatcacaatgccttaaaggtattcatctggaggagtttccttccattggttaatgccctacatagtttcaaccgtgaattgcttaaccaggtaaatgcctaaagctcgcctgttgtatttcttgttttggtcctcttttttttttttggtatctaatatctaatacctgcttattccctgcgctgttgtttcttttgcatgaaactttgtcattaggttgtagaaacatttgtttatattgtggttgagacaaacagctggatggttgtacaggcagacttggttccatttttattaagatcactatatcattctttgcatatacttcaaaatgaagaattagaaaacatggagtgggatttgttccctagctatgttttgagttgtttagggctggataaagagcgaatttggcatccgaatcggtcaattccaccgcctatttcatgttacattctttctgtaatgcttgatgctgcactttcaaaccagcaaacagctgtaacgtcagaactaggggtggcaaatgagtgtgttgatgctttacattttgctggtaatttgatttggagtctttgtagtatggctgaacatatgctttcacaaagtttggagcatcgcgcttgcaccattagctttcttctccctattgtttccaaagcatttgcctcttaccactcctttgaagttgtgattcaaggcaagaagcttttgttttcccggtaagatctacttcttttgaacatgtttgttttacatatacatctcttatttatcaggaatatatatgctctataatatagtattttgttgtactaaatatatttgatcggtgtccaggaatgatttctttgtgaaaatttggaaatgctgtagaacactattttctcttggacctatagagagaagagatgcctatagtgtactgtctctgtatttgtctttcttgccttgtacagacaaatgggaagatggtgacatcaggagtgataaagtcgaagtattggatataagagctgaagaagacttttggaatgaaatcaaaagaggcttggtacttgagcagtatctcttaaaattttgcggtaaacatttgaccttatataatggttcacaatcataataaaaaaaaactttcttttctggtgtgactggttaggttgataaagagagctttgtgaggaagcagtcattacatatgctcaagaaagcagtgggaatgaacaatagcagccagtcctccagtgtttcagagattacatcacataacaaacaatcagcaccacagggcatgacaaagagagagctgtgggctgaaatggaagcacagtcattgggtctagggagaattcataattcagttgaaccggatttaaacagtcagcagaagtgggaggcgtttgtcctactatatgaaatgcttgaagagtatggtactcacttggttgaagcagcttggaatcatcaggtctactctaatgttttgattgggtgtcttgtatttatgtattttaaactctagatgagataaggtttgataatagatacaatgaacgaatgccaagtgttttttgggatcaagcagcagcatttctgaaagcccattaatctgtggagattttcattgcattattattcctgaaaaagttcatttatctcatatatatatatattgttttttattgcaggtatccttgttgctccaatcttctacctctcatgtagattttgcaagcactaatggaggaaaaaatgaaaaccatcttgaaatttcaggtgaaatctgtaaatggttagcgattttgtgggaacgaggactccaacatgataatccacaaggtaatgttgacttttaagttcgtctacgcatgcatgttgttattattatgctaaaaaactttttagatgatgtcttttgttgtattcgcatctaatggttatatgcagttaggtgcttgatcatgcagtcaattttaagcattaaatggagggataatggaaattctgcaaactcagtgcctgaaacttttattcttggctcattcctacaagcattgaatgatcctgtgcaccacaaggagtttggtatgccttttaaaatttagtctggcaactcttcaagattatttagttgtgtcgttaataaatagaatagtattttactaaggaaaggatgtcagatatttaatatctctagtgctatgaatattggaacatggttgttcatgtgtctaaacttactttatgtaggtggtagaaatttgagtgctggcaacgatattattataagaattatattttgcatgcactgttattgtataaatgcctgcaattagattgtctataagtaatgcaagtaggatgcacttagttgctgattgttatagtgaatgcacttgtcattaatgttatttcttatgtcttaaaaaagaaaatacttgc

SEQ ID NO: 37191 - DNA, 5597 bp, Cannabis sativa
  modified_base (1018)..(1024): a, c, t, g, unknown or other
  modified_base (3962)..(3964): a, c, t, g, unknown or other
tttattttaaatttttggtttagggaaatttttttttgattttctaagtatagaaaatcaaatttcccatctctaatatcataaagaagtaaatccaaaaaagagttgaaaactagagagttgttgagtttatggattagactctgacaatcaaattcaatttgaatattgtaaatgccaaaagatatgcactagaagaggaaatggcaattcggcccaatgtagaagaggactgccatgagttttccaagcagcagaagcaaattattaatttattatcatatatacaacttaaaaatttattaaaaaaaagttactactatactaatacataaatatattagtatctttgaaattctgaaatcaatttgtcatgatctgtaagctatggttggtttcttttggtggaataattttactatttattatttatattatctttttaagttttttaaattatatatatatatatttaagatatattaatgtaaactaatgaaataataataaatatttcattaataaaatatttattaatttaaatattaaaataataatatttaaatatttaaataaatacttataatcgattgtattgtatatatttatttaaatttaaatatttactttaaaataatatctaataatcgatttaagaaatttttcaaccacttaagagaatatcttaacaacttaaagagaatctctcaaccattttaagagaatatcttaaccatataaaatatttgtaacaacttcttaactttaaatttaaataaatatttatcttttagattaattaattaatccaaaaataaatatggctaggtaaaaatatggttatgtaacagaattcttgatttaacggtatttttaggttttctaatttctacgttaactttaacaaaatatctaaattacttaacagaatattttttttattaattttatataattatatatatatttaaaaaaaattatatagatattttatataaaaaaattaattttattatannnnnnnaatcataaaaattacatctatatataaaatatatatttaaaccttaatttcaccacaaactttttgttttaaaaatgattaataatattattcaagaaaaaattaagttaataaatgatgctgatttgtagtgagatttttatacgtgcattgcatgtaacatcaacctagtattactataggcacttatcactgtgtttttacacagtgactaatgccactattgtcttaaaataataatatttaaatatttgaataaatatctataaccaattctgttatagatatttattttaatttaagtatttactttaaattaatatccaataaccaattgagataattttaattacttgagagaatacctcaaccacttagagagaatctctcaattattttgagggaatatctcgaccatataaaatatttgtaataacttttaactttaaagttaaaaaaatatttatcttttgaattaattaattaatctaaaaataaatccagacccatctattactataggcacctattatcactgtgttcttacacagcgactaacgtcaccattgtcttaatcagacaatggtgatgtttttgtcctaacaatactttgtctctctaatttatttaaataataaatttattacaaaataaataattaccattttacttattcaaaatagattttttcgaatattattattttagctttatccacaccattaataatgttgcgaggtggcgattcgatcaccatagacctgtatactaacttccaataaattagattattcattgaatttcatcaacctaataattttatttattaatttcatgattacttcactaaaaatataaaattaaagtcttagtaattatagaattatatttactaagttcaattgtattgatataatcaattctagtgattagtcctctttgtgtcgattcataattagtttttgtcaaattactactttacctttctaattacttatttatcatttaataccattaattcactagtaaaagtaaaatttatatcaaatttaaatttgtgtataacttttttacttttaaaattaacactcaaagggaatcaacattcagtcatccacgttattagcttctcaaaataaaaattgtaaaaatatcttttctgataaactttaatgagtaattaaaaaaattaataacataaaccaaccctgattactaagaattcaggtcattctactcagggacagaatcattcattaatatggcccccactaataaaaatattattttttaaaaaattaaatgttattttttttttttaaatttgataattatagattaaaatagtagaaaaatccccacaaaattaaataaatatagtaataatgattataatataagtataaatattttttatgataaataagccgctacaaattaaaaattaagtcgtcactgattctactataaatcatcgtatatatattttataataatttggcaactgttacaaaaatatttcttttttattttgaaggaaaaaaaaaaaagaaaactgttacaaagattattaagtgacttttagatgaagatgagattgttataaatttgtccgttgatgggtgattctgattagtgattacaacacattgaaaaacgctcatataattaagacgtctgatttgtttgaagtaacgcatacattctggtagcacctgcccataaataaaaattaacttaaaatttattaaacaaaacttttaaatggaaaacgagacggggaaatgaagatttctttttgtttccgaatgttaagcgggacagaaatagagatagtactctccgtcttcagtgtgacctatttaatatttcatttattttttaataatctttaatatatctttttattttatttgtgtatttttttaatatattagtatttttttttgttgtattttagataataattagtatattaaataataaaataatatattttaatttttatgtaagtccttggcaattctccaatccatgtgcatcactataattagttttgaataatttttaaacttttatgtgtgattattttttattttctaaaggagaatatgatcagaagatagagtttttagcatttttcaaaatagaataatacctacaagtcttttaatgggccccgtttatttaaaaaaaatctgaaaatgaaattattttcaaattctaaatcaatcatctcttaaatttcttgttatagtacataattttttaagtgcagtttggcaaagcatatcacaatcacaaattggtattgtatttatcattatgaaaatcaaccttgccaacctttaagattaggttttgaattttacatggttactattgtcatttaaacatgtattatgtattcatacatataataaggcaggattcataaattttagaatattattatgggataccttacagcactcagcaatgtttagacgtggcatactacaatcagttgatataatttaataacattagatatagtagagagtaccatttttattggtgacagttaaatttttatttatatttaatcttctaagttcaaaatttaagatttcatgtattttttacagttaactattaatatagaaggtttatgtgtatattttttatatatatatatatatatgtcatatttatattattacatctaatattatttatttaaaaaatataaaaattattttaaaatgtataatagactatttatgtgtacacttttgtaaatatatcacatttatattgatacacctaaaattattatttgaaaaatataaaattatttccaaatttataatatttttatttttttagatatttattttttatttttataattttatttaattttaaaataaattttgaaaataatttttaaataatnnnattaggtgtaccaatataaacatatcatgtatactctacacataagcagtccataaacagttaactagatgatatcttaaaacaaaaatttaaatttaaattagagaattaaatataaataaaacaaaaattaaaagagtttagctgctaaaaactttttttattataatattttcatatatatataaaaaaaaagagtgctaaggagacttttttttgcactttttctataaattagtgacgaatgccatcctttgagattagtgtatttatacttaataattagacataacattattacattattacatttatgtcattataataaaattttcctgaatataaatatatatcttaaacaaaattataacactatttaaaaaaaaaaacaaattataacatatgattagaatttatttaacaatttaaataatcatataaatagtaattgtagctattttatttatatgctgttttataatattttttttattattagtttaattcaaaacacatatagcaaaataaatcaatataattataaattggacactaaataaattagaaaagaaaaaaaacaaagaagagaagaatatgaattattcgtatttaaatttataataattggtttgacaaaaaatttatttaattaaacaaagtaaacaggtataaataaaaaaaatataataattagttaaactaaaaaaaattaatgagctaaacggataaaaatagaaaaaaatataataataatattatgacaactattaaacagccaatttataatcttttaattttttttaggaaaaacaatatacatagagtacaataaataaatcaaaatgataaataaattagaaaactaaaaaataaagaaaataagattttaaaaaatgtaataatatttatgtgatgtatatacatataaaaaaagaatataattaaataaaactaatttatttttttctaaacaattgattggataaattattacatcttctccttttatttttttgttaaaatttttttagatcatattacaaaaacatatatatatatatggaggacatgtttatggtaggtacactagtttatcactatgatagaaatgtttttataaccatagataatatatctaatggtgataaattaataggtgtacaacaacaattaatatttggaatgcatcagattatttgtgtaaacttattttttaataatattttaaaaataaataataatgtaataaattaattaatatctatctctttcactcctcttctcgttgccctgtgtggatttcttcgctaagttcgagtttgaacagcttaattgtctagtaatacaaaaaatttatttttaatattcatcaagttccaaaaattatctcaactcattaactaactatatcccctaacctcaaaatcttatccaacactcgttcattggattatttgcttaatgaaaatgtattgggtgtattcattggatgtccatctataaattaaaacaacccaacaacatagataaaagctgcaaaataaaattaagtctggtcttgattatttatttgtttctttgacaaaacaaaaatgggcttgtggctgccccatgctctttaaattgtgggatg

SEQ ID NO: 37192 - DNA, 10033 bp, Cannabis sativa
tgtcgtgtttgacccgtttttattttgtatcaagtcgtgtcgacccgttttcgacccgcatctaattttcccgacccaaacccgtaaaattcgcgtcgtgttcgtgttcattcacccgttttgccacccctaatagatacatccttgctttacctctaagctctacatggcgtttttaataagtgtatgaatgatgttgttgcgtgtacatgtgctaagttcagaagtaggagtttggtgagacatgacttgtcttttatgcgactgatgggacagcacaaagattagccatcaattagcattcatagaaagacgtaatgtcagaatagtatggactaaatcctaatgatatctctatttcgatggcaggtttactttaccacctacgctgaagtagtcacctacagtattattccttgggaatcgtgttgaacacttaggtagttctcggacgctatatgatccggaaggcttgtgtcttcctgaaggacaaagtttgactttgacttcaatgttcttttgggaactagtcgtgcactctcggacgcccctcacgtcttgagaagaattctaaaaatttattatgttaatattgaccagccacatgcttacgtggatcatgtagacatgtggcctattctccacttgccatgtatattggtaagaaatatggataacatttgcctccaagtcccaattcacaattttgtgagtttggacttgcgatgattccgactctttcattacctctagagggtttgtaatgtgatgtcatgcctgtgcagagcacgcctatttgtatggacatgcgacacgccctatagtgaacgacttgcacgtcagcttgctttttgctcctgttttgatgatgccgattcactttcttaaaattaaattcccagataagccataaatatagggtgtcagtcggatactcgagtattccaaacgtcccctcatgaatgtgtttatttacactttcccataaccgtgagattattgtgtgtttcttggaatttgaagggaaccgtaggttcatcaaaaagccatgattgtgagttaatggctctaaatattgcttgctttatcatctctcacactttactttttatcccttctcttcaaagccccaaattggaaaatttcttaaggaaaccagacttcctcatacttttcctttgacgttgtcaagcacaatactaccgtcgctgcctgacagtggcatccacctcacttcgacctcgaattcgtaagtattcacattcttctgtgattgtctgttggttgtttaatatttcttttgtgaaattttttggctctgtgaatgaatttgaaggcgaaaggatttcccttcatattccaggctttgagcatcttttcctctttttttagacattccattattttgttccgaatgcggtgcatttggcgcccgatagtcggcccataaattttccaatgattggtatacggagagggcctcttatcagcagataagggacccccattcctactcgaggatctaattcatcttcttcacacagttggtcctcatttccatctctattgaccactaagactgggtgcttgatagagacattataaaatttcttggcctctttttgatctcctcagatgattcccaccctcgtgaagtgaatagagaattcgaggcataggtgctgaatcgaagttatggccccaaaattcatcaatgttggtcgtcctaacatagaattataagttgtggggtagtctacaacaacaaaggcatagtacttgaaagtactttggggagtgtttcccatgggaatgagagaatccccattgaatccaatgagttgtgagccactaggggctaaatccttgtctgtgaggccaattgtaaggaatacatttttgaacaaagtgttcaccgagctcccgttatcaactaggttacaggccaccaccttgttagctatgagtatctcaatgaccaagggattatggtgggggaaatgcactattttagtatgtttttttagaagatattatgggttgatctatgagcctgggcctataaccaggaaactgacttacttcccttatttcatcatcatgatctaacgcttgagtgtaacattttagctcattgctagttgttcctcctatgtgcccccctaaaaaaataatggctactctcccgttggctttaggaggatgtttgggaggtctgtctagctacacaagatttttcaccataggaggtacttaagctctgggtgcttgtgctaccccttcggatggcacttgaactctaattcgacaaccagttcctaacccattcatagagatgacccaattgtaccgaatttacaaactcatcccttaaggatttacatacattggttttatgctcgatatcattggggtactcacacttcttgttaggatcctttttagatcggtcacaaaatataggtggaggttacgataatgaacattctggtgggttgccagatacacctattcttgagtgtccaccagctcagtatactgggtatactacttctcataactgaatgctttcttcctttttttttgttttcagtcttggtacttcctttagctgaccttttactttacattatctgatgagttcgtgttgcgcttgcagcggggcatgttgtgggagcagagtgttggacaaaggtaccaggagctttgctgccaatcattggtactctgtatttcaagtaggccagagccacaacgggatcttgcaagtaaactggaggtatttgaaactgtatgctaggagcgggaactcctcatgcttgttacgatggcagcgggagtgcttctgccataaactgtactctacaagtgtagtttggacctccggctgggtagtatcctctaaatgcagtgatttgggcctcttcaaggttgatgtatttttgggcttgcttctagaagtctttcaaaatttatgcaccttcttgctaaagctcattccaaaagtgggtacccgtctgagtccctacttgtaatatagccaactactgcccatcatctacctttatcattttggaggcctcttccctaaaccttttgatgaacgtttttaaagtttttatgggaatttttttgatgttatatagggcgttaacttcaagatttatcattctcactatgacaaactgtctatgaaagttggtttgtagcttgttctaacggctcacagagtttggctctagctttttaacccacgcttcagtgaatctccctaaggttagtgggaagcacaagcatttagcgtcattgctaactcttaatactgtcatgaccttgttaaatcatgatacatggtcactggggtcagtatctccagtgaactggatcatttttggcatcttaaatttttttagaagttcggcttctaagacattctttgcacatggctcccaaacctcatggtcggattcatattcgtcacccttttatctttgagatacctttaatatgtctttttaggggatagcaagttcagctaaatatcttttctcaaaatatctttggggtacgggatcatcttttcgagagttaacgtgagtcctgacatccccttactttgcattgattttctcccttaagtccactggggagtcctcctagttgagccacgtcgttcctcccatccttggtgtagtgatacactttggcattccccactatcctggggtttgtgtttccttcgagaaaatttatccccttacgggtgtttcccttatgggagatcaaaacgcaccttttgagggttgcgattttttctgatccccataggtattactgtacagttatcctttgagagaggaggatctttcaaagggtacctgataggactaggtactttttctttctgcctttggttttcttgagggcgtgagggaccttctcttgcatcgctaaatgtgggtggcacaactatgggatctacattgaggcctgtcatggccatgtcttgcttcatggaagctaaggcttcttgcatccacctattcatttctttttattcatctaactcaacatcatgcttagtagcttgttgccttagtgacacaagcttagtgtattcatcctcctcgtagcgtttagggtcgtcttcagcccttgagtactcaggatcattggtgtcaccttcttcgccctctaatcgagaggctacttcttcctttgggcgctcttgataatcaggtgtctagggaggtcattggttgtttcttgtcaataccattgcgacacaaggtttatttttgatgaaagattcctacaactctcaatgaaagtaccaaaatattgattgagattttcgacaacttttaaatcttgtattaaaaaaattaactatgagttgaaaagagtatttttatgcggtttagttgttaattaactatagtccatgagtcacttttattgatgagtaatatttgtattacttgagggtacattctctcttacaatttcagagttctatctttttttctctgtttttcaaatcctcatttcctcttacattctctttgtatttataggccaagagttgggatattcttaggcgacgtgtacatcctccctttacctctaggctctacatggcctttctaataggtgtaagaaatgatgttgttgcatttaaatgtgctaagctttgaagtaggagtttggtgagacatgacttgtcttttacgtggctgatgggacagcacaaggattagttgtcaattagcattcataggaagacgtaatgtcagaatagtatggactaaatcctaatgatatattggtttcgagggtaggtttactttaccgcatgcactgaaatagtcacctacagtgttttgccttgggaatcgtgttaaacagaggcagttctcagacgctatatgatccaagaggcttgtgtcttctcggaggacagagtttgactttaatttcaatattattttgggaactattcgtgcactctcagacgtccctcattcgttgaggagaatactagaaacttattacgttaatattgatcatccacgtgcttacgtggattttgtagacatgtggcctattcttcacttgccacatattttgataaaaaatatggataataattttgaagcaggagaatttataaaaatgttaggataattttataatatactttttaaaatattgggataattctcgtatagttttatctattttgttatttaggattgttttttagtctagtttgtttttatgatcatgtatattgtcatttattggataacttaatagtttatctttacaaaataaggttcaaatattttttttgcacgatgtaattattcatggtaagtaactatttgagctttacttttagaaatttttttgggtatatactaaaaatgtaaaaatattatataattacattaggtcggccctataaacttttatacatcccaacaacaaaaaattataagaatacctcttgctttaaccattcagccgcacaaaccaccatcttcaacaacggtaacttcgaacgatcaaactagcacgccaatcgaaaagaaatccagccagatggagaatcgccataaagactataatcaatccaaccacatacaattttggatttatacaaaagtcgtgcagaaaaactggtttgaaacttatattcaaccttgaattacgatttaaattgtagaaaactaattctcctaattttattttttagattcataaaaagtagatttatcttaaatagatctagagttccgaatcaatccatatcaggtataaattgaaaaaaaatgtatcaatacactagctaatgtttctcccattgtattaacattatttttcaaatttttaatggtgaatttactcatatcaaatcacaaataacaagagaaaattcgaattcatctagagtcatgtacatagaaacattgctctggtatttaatttcctgcacggttgcattgcaattgcattaacattttactaaagctctgaaacttgacatatcaatgattacaaactaataatgatacaatggtttttataatatttgcaggtgtttcatattgacaatccaacacaaaactctttaaaaaaatttggttaattttattaatatattcatttggttgttataaaattagtctacagaatgctaacagttgtttctccacataatattattaagtaacaatagattgtttatcagtgacaaaataataatgacaaattttttcatgatgatgctcattcaaattttctagttgtaattaagttgtatattagtttaataatagttgtgttactataatattattatattaaaagaaggctcaaaattagcaatacacgactcgtacaaagaaaactcaattatggtaagttttgtttgattacatattattagttgttttaaggtttaatattagttttctcatagcaaatataactgttgcattacagttttatgacagttatcccataaatgacttacaatgcttaaattttcaaactcacaggaaaaagacgtaattttatttctcatattttacaatagataatttgatcaagcaatgaattttgtaaattatgaagctacggctcaatacattttaatatattgctaatatgaagagctagtacacaagctgaaacaggtgctggaatgcatccaagaacacacataaatgcaactaaaacaccaagtgaaagaaggataccaaccattgaggataaatgacgactaaaattgaaagaaccttacttcacaaggtatccattgtgtgtgaacatggtcaacagcataataacagccaacacctccttctttgtgatgagcagctcattagtcgcctaacaattattttcaagttgtatgtcatatttaaaatattaatagaaacataaataagtatcaatatcatatttgacacattaatgtgaagtttcaaaactttttttttattacattgactattctgttgaatcttcaaaagttgctcaactgttgattgatcgttgtaaaaaaggtgttatacataacccaataatttaaagatttaaataatttttgcaattatattccctagtttacaaattagataggttgcataaaagttatttcatcgttgaataaaatattatatatatcaatataattcagaaacatgtacaaaaaatataagcatgaaaataaaatacaataccatacaattcaaatccataatcaaggtgaactcttcaacactaaaataaacgcaacgaccagcaatgtttgctcaaaattcctttgaattggactgttacatctcttaagagaataccatgaacaactaaaatgaaataacataaataaaattcacttattttcctgaccaagtagactagcaatctccactactcttaatggagctttaacatcagaatccagatctggaacaatggtcctcttattctaaaaactaagaataccaaagaaaatttgaagtaaaatagaataagcctttatggtattcttgtctgccacattcatctttgcattcctcaatgcattatagagaaagataaggccctcattcacatccagacaaccaaaaactcagtgaataactttttcaaaatttctctggattgccttgttaaacctccctcaacaaaaggctgtgaacaacttggggatgaaatttgtactcaaggacatccaagaaatgacctaattgagtatcacgaaatattttcatcacattccttgaattttttttcttgatgttcttaataacaccacaagtacaataattgacacatttagacctgtaataatcaaaaggatggaatttgaattcccaatcctacatagatatatagaaacacaaaaatagaaaattaaattttataacatacaaagtttcaaaattgtattaaaactataaataaacttaagaaaagaatggaacaactgaaaaatatcaagaaagccagaatacatagtacattggaacagtctataaatatcatcacgaatatcaaccaaaacaataatgaatcacaaacgaaacctaaaaaaattataaagaaaaaaaaaatcacactacaataagcatttaacctacataaatttaaaactacaaaaatcaaaatcggcaagtaccataaactattagaaagagaaacatggttcgaagtggagaagcagaaatgaaacctaaacccaactaatacgaaatagaaataaaactcaaatgaactaagcaacataataaacctaaaataacctaagaaataatatttttcaaaacctagaaccatacgtaaaagcaataaaccctaaaatatgtcaaaattaaaaaaaaaaaaaacgcaatagaaatctcaatcaaattaggagcatgattcttccccttttaaccaacatctataggactgctctcgattttctctcctttaacaatttcaaatttcttcttagcagaagcctttatctgttttagtatggtcaacaaaatcatcatctaactttgtttaccctttcccttttttggagacaggtttcaacctcatttttgaagctttagggcctataattaaaacttttttcgcagaaggagatggaaaagataaagaatgagttatagccattcatatagaaaattgtagagaaaaagagagtaaaaaacgtgggttgattcttcaatagccgttaaagatcgtgaggttttaatttttttgaagatacttctttcaattatgtaggaaagtttatatgtgtagctacaaataaaaaaaataaaaaaaaataaaaaaaaaaagaagaaattgaaataatatacggaaactgcatagaaaagataagctgattgagtgtgatggaagaacaatgacatcaacattaagagaattatgtaaataaaataaaagaattggtataaaattcatcctactcttgagaaggtaagaatgtaataaaagttgggttttgtatttttcatgtaaacattttttattttatttttttttatataaaatatttataattttttaaaaattttcaaattatttttaataaatacaattataaaaaagaaaaataaattagattgaaaattttccttcaatgcccaaatagattgtatgtactataattttctaaattgtttggagtaataggttttgataggatgatgacacgtgccttagccttactctatgaaaaaaataaaaagaagaagaatagcagaatgagaaagtgatggggaacctacacaacaatggaattcatgaattctaatgatgtaaatggctgggcagctagctagctgggtcacttaacatgtgaaaataataataagataaaatataacactcattcattcacccatatggactttatttttaattacacctttattaactatgtcgcacacataattattctcaaattagctttgcaattataatcaaactattgattcccttttttcccatgtaagaataagaaataaccaactactactttcttaaggatattactaacttcattttttattatatactgaaaattgctctatactttcccttaccacataactaagtatatgtctaagtctaaataccttacataaaaagtagcatatagtgtatgtctaaatataaaattttcaatcctaaatatatgttgtaacgcttaaaacttatttaatgtttacgctatgatcttaggactcactttccaatatattatgtattaaaaaaagaaaaataaaattgtcacacattagttaaactcacaattctataacacaaacaataatatgtaaattcattttagaaaaatacaataatatgtaaatttatatcttatccttatttatcatgtttggttaattgcaagttttgctacataatgaaaccaaaagggaaatttgaaattccatgcttacaatactctaaattttttttcctaatttttttttccctaaatgcatagtta

SEQ ID NO: 37193 - DNA, 2215 bp, Cannabis sativa
aaaattacataactttgttttttatgtagtggtacgttaaggtgtttcttaattaaccttaatggaatatatccatcgatcattttatcaatgtggttgaggaatggtctttttccgttttattattaaataataatgatcaacacaactactaattaagaatggccacccacccatgcaaaacacatgttcgacacaaaataataattatatgtggatcatgtctaaaggagttcagagactcttgagctcaaacatatatagagaatgaaaaaaaaatgagtagttgtggagataaaagctcaaattgatcaattgatgaggtcggttgacttttcatattaattcatcaagagttatcacctttagtagctcactacaatatttactcacagcttagaaaacaacccacgaaaaattacacactagttaattatattagtttttaatgttgaccgatcatttttgtagtggtgtgtgtttctcaaataaatttgagtatgttgtggtcgttgaatttgcaatattattgtataacgtacatacaagaatcaagtaatgttgtttgatgcacgagctctcagacagcttttcttgcccattatttcacatgttattttacagtaatataatataacccttccttataaggacctatccaaatccaacattcttaaacacatgcattactattaaaaagtggtactgttactgttaaaaaatggaaaaattgtataatttttaggtttaaaaaaaaaatttaacctgtttctctgatttaacatatgtgatcattttctgttggaagagtaaatcatttcacaatttttaactcaattcatttgactcgatctatgtaagaacacacttttcatatcaataacacagattctatccttttatctccaagaagtgttgtgcttgagttgaaagagaaattaaataatcgattgagagactttaatttgcataacatattttattattttgttttattattttattatttttttttttttttcattctttctaacgaaactctatctaagtgaactaggaagggcaaccacggaaaaaaattacaactcccaacaacaacaaattgcaatggcctgtctaatttaatttacttaaaaattaatgatgaacctatatataaatatatttatatatatatataaattcttaccgacaaaaaaaatgttaggtgaatataattaatgttttgtggaaatattggaaaaatgtgtgtgagatgattctgatgaagtctctataaatagcatgcgaatgtaagcgaacaacacacacccaaaaaaagagaaagaagaagaagaagaagcataactatatatcatttcattacaagcttttgcaggtgagtctaatatatataaaattaattgttttgtttaattatggctgagattaatataattaagtatgattttattaaattttcttgctaattgattttttaatttgtgcatatatatataatgtaacagcagaatggcatcgatgaagaatggttactggttggcatccgcagaccaacgctttccagtttccgcaatacgctatttcactcatctctattatggctttcttcaagttaatggagttacaggcgaggttatcatccccggagaacttgagcaagatatgaacactttcagtgaacaagttcgtcatgaaaagaagaaagctatggtatccattggaggtccgaagccgaataatgatgctactgccattgatccctccattgctatctctcaaatggcaggaaacacagcatcacgcaagagatttattgagacaaccttagcgttggcagaaaactataagtttgatggtgttgagcttgcttggatttatccaaaaaccaaactcgacatgacaaacctccacaatctctttcgtgagtggaaaatagctgcggacctccacaatttcccaaatggcaggaagcttcttctttcagctgcagtgtattgctatcctagtattccaaatgccccaaacgaagaagtcagatacactggggagcttgacacatgtattgacattttcaatataatcttctacaactattctcccgtaactagttaccattcccgattcggacccatcagaccttcccataattataacactcaagatgcgctacaagagtggaggaatgttcggatttcgctgactaaactcgtta

SEQ ID NO: 37194 - DNA, 3539 bp, Cannabis sativa
gcaaaaccagttatgggatagaccatagattttctcagtaatgccttttttggtttaaaaatttgcaaatacattgaaacatattaaagctcttttccatgtgatatgtatgactaatacctgaaattatttgtttattgcattttactttttcctttgtaataacttcatctgcacaacttgtcttatcttatcataataatgtagacaaaaaattataaaatggtatcggttaggtttaaaggtaactaaccaaccttgtaggatttgcttataaaacagtcgggggggaataagggaaacacagaaaacttggctctgctagttaagtgacagtttacattttgatactcatgagggagaaaagccttagattatttggttttgaagtgaatctttattctgatggcaagagtcattctgaagaaaacagaagtttgatgtccatagatgaagttggttctgaagctgagcatactgatgcgaaatcagatggttcggtatgtcaactagaacaaaagaagcatagatgtgagttctgtcatagagagttcatgaactcacaggcactgggaggccaccagaatgcacacaggaaggagaggctaaagaaaaagagaatgttactacaaactaagaaagccaagctttatcctcaaccaaaggaatgtcccactggtttgactttttatcattcaacccaatgctatatagatttttcttcttctaagttagctttttacagagagcctttcattagcttcaactcttcagatcaaaatcaagtctagatatataacacctccggccctgtgttgctagttggtctcatgtttcagttccttgtcgtttacaatagttttcaactttccaaatatcatgtgttatgtaattgatagttactgaaactattatgtttggctgaaataaatgaaaggtagattagtgattgacagtgacattgttgatcactgaactcaaatagtcaaaaaaaaaaattcaatctcagatcttattctcaagcaaagaagatcccaacttctaagtcttcggatgttgtgtctgataagttaaaggacgagaagttgaaccaatatgagaaatcacttagaacagtcgtgtattttagctgttggggttccaacaattgaggccccttttttgtgcaatatattatctcaatttttagtgcaatacatacatggatgaaatcacttgatttcctttcaaagattgagcataattccatttagaagtttactaatcatgacttgaaaaccggttttgggactgtggcttacctagatctatgcacattattaaggggtcaagcagatacctccgggcagagctttctgatagaatgaaacacatctttaatccatgactttggactcctcattgccataactaattggatttctgcttagggggagaattatctcaattcaagcagtatgctcaatttggcgtttggtactgcattttgtgatgtgtttatttgagcattttctcaccaactttgttttggaacgactatatatgaaaatgtcagcttagatttgtgacatggttgagtcatagtagggatttgttattcatcattcaaaatgttacaggttggcgaggctttaccactagccgatgcttctgctgatgccgttgttggaacacttgtattatgctctgttggtgatgttaacttgaccttaaaaggtaataaagcttgtagcacagagtggtttttttttattattttattattattgttattgttaggtaattacatgagttttgaattaataaagtgaaatatttactttctttttagaggtgaagagagttctcaagccaggtggactttatctctttgtggagcacgtagctgcaaaaggttaatagacttgaacttgtaattaactcagctaccacatgcaagcttttattataatcaattgtttttgttttcttcttcaaatgtagaaggaagctcactgagattcatacagagcattcttaaccctttgcaacagactgttactgatgggtgtcacctgacaagggaaactggaaagcacatatcagaagctggattttcaaatctgaagctcagcctcactttcttgtctaatgcctcgctcataaaccctcacatctacggaatagcttacaagtaaatagcaatacctgcaattttcaccaagccatgcccatgtcatgcaattcaaagtaacaattaacacataaaactattatttatactattgggggttcatattaagtttggtcaggttgaagggtttattaattgtaggcctatatattttgaatgtatacaagtaaatttatatattgacaaatttacatcctttcctagcaaagaaaaggttgtggggaaagtgatattatatacatagtaatgattgttgttgattttgtaaagactagtgttgaaaagggtttgttcctttcccttgtatctcttctgtggacagagtaagatgagagaagacaaagccttatgggggttgggtcggggtgtattgatgataacataatgtaatgttcttcaatatgatgggtatgaaactctgttatattcttatttgaatgcccctttttggcagagaatactgttatgcagttttataccccacatatatttgaaacactaatccagtaagactagaagtataatatattattcattattattattatttggcttgtgaaccattatgagaatgcagtagaagacaatttacagatgacaaaatatattattccattattatgttatcgaggtccttctgtgtgttggcacaggacaagagagataccctttcattccaattggaatatttgttaatgatcactttagaaggggcagtgttcagggttggtgggttttgtttttcattgttatttagatattcccagcaacatatttattttgaatatcatataagtttaattaaactcaccttgaccttgggagtgtttttttttctttttttggaataactgaggcaacagatatacacgttgacaatttgacaatgtatgctcaattatactatctacgcaatgtttggtagagaggaaagaaaaattaggggaaagagagaaatatttttcattaagttatttggtattgagttgaaaaatggaaggaaaaaatagttgtatatttatactatttactattttatttatattattaattttattttattttaaataaatgatacttaagtaaattttaagaataattattctttttgcctttgaacttatgacactattaaatgatgtctctataatatacgacttgttaaaaatacctctcaatataatatagttagtgaaatttgcccttcaatatttaaaaaaattattatatgaaaataaatgtcattgataaagaaatatttaggggtgagcaacagtcggttttttacacaaaaaaatccaaaattcggttttcggtttttatggttctaatccgaaaaccgaccgaccattataaaaatataaaa

SEQ ID NO: 37195 - DNA, 2888 bp, Cannabis sativa
aattaccaccttatatccaaacactttaaaatatagtgtaattactagactgtgtaattaccaccttaataattatcctacctagtaattacacagttacttccaaacattgtctaatgtacgcaaaattttcagcttttattaaaaacaaattctattttattaaatatttttctatctatgccatttttaacatctgtacatatattcactatgattacaaaacataaacttaaacaaagtagagtcgtcacaaagcttaagaatatcacgcaacaccaaaccgaacttcgctaaacaactctcttttttagcgagaagcaagaccaccagctggcaatccgtctcaacatatccacctcgacataccccaaccgaagacataactgaatgcaatgcaacacaacaatggctttagcaatagtcgcgaagaaagaaccatttgttggagtcgatgcagatgccattacatggccttcacggtcttggatcacttctccaaaccccacccgcctctccatcggcctcaaaacctgcattagtattaagcttaaaccgtcctacagttggaggaaaccacggggggacactagtagcagcaagggaggacgactcagcttcaaaagcgacaccttctttttgttagcatcccaaaaattacatgtgaaagtcgaggctcatccaacatcaccttcaatatcaagtactttatggttatggacacataagttccttcgataccagatgcgccacaaaaataccaataaaacatcaatttcattctttgtgagatcagcctcatgttccctaaggaaagtgtaaagattggttctaggcaaataagcctcaggttgcacaaactcaattaattccacaataggcctaagatttggacaatcccagcatggaaagaagttttaaaatccttaccacatatggggcacactctatcagtgggaaccttgtgagtagccaagttaaacgacgtgggaaaccaatcaaggcaagctctccaaataaaaaccttaactttcagggaaagagagaggcttcaaagatacttccaccaatatgagagacccgaagaagaatcacatttcccccaacccaaaagtcttatagcattccaataaccactctcaacaaagtattcgccagagaaattgtaatgctaaattaaacaattgggcccatgaagcgaccatggaatagacaaaacttgctcagtttcatcagtagaaaagagatcatcaatcaggtttctaaaccaattactattatcatccttcaaatcactaaccatcacaatgtgagggtgaacatgaaaagagtaggagagagaggcagtaaatttaagaatccaaacatgatctttaatattcatcgtactcccatccccaataaatcagtaactcccatccatcaagagttctttttctcaaaggatgcttttctaaatgcgggaatctttttacgtcttatccacatcattatccaaagaaatctctttaaaattcttacccgaatttttgaatttaaatcacagagtgtgtccaactccttacccttaataatctctacatgaccagaaacatgtgtcgaaataggaaaaaaaatctttcgcaataaaaaatacttaatttcgagtgccattaattggatatcttttattctgatttataattttagtttttcctttaatattccccccggcggaattagggggcattttctgaccattgtggtttccaccaaacccctcggattaagatgaagatctctactccttcccctcttattaactagaccgcagataccacaaaaataacaaaggtcaggtagcttttttatattatatggggaataacaaaggttcacagtcaggttgaagctttcgtcgaatcatcctagtaagaggatgtgtgatattgaggagaacatgaaccttcaaataacgtcccaaaagaatgggttattttttcaacccatcctcaactaacttcgcatcaatgtcctcacaatactcatttttagaatcatcttcaaccgctagagagatacaaaactgagaaatcattcatattgaaaaaaaaacacactagaaattgaaagaataaccagtggaaagacacttttctcactaaagccaaaaccgttatatattagagagaatttttatctaaaccacttggggctagctcaagtggtcataggtgggtgtgtgagtgttggaggtcctgggttcgagtacaaggtaaaacatgttgtaatatataaagtataaacgcttaaatcaaaaaaaaaaaaaaaaaatgaatttttatctacaatgtgaattgttattttttgaagtagtaattatggtaaagtttggtaaacacaaataaatgtaaagccagttcaaaaaaaaaaaaaaaggtaaaattactgtgctttttcatgtgaatttttaatgtacttttcatgtgaatttactgggataacttatttttccctttctgggtatagactgagtcaaagattctaattcttattcgaaaagaaagaaagatatctttcatcctagccttgtgtgttatgtcttggcataggataggactctatacttaactttaagctacatgtgaaagaatcatgcttaaagacactaaacccaaattaagtttgatactgtaaaacgacaccgtcacagtgttttgttcattgggctcaagaagccacgtggcacagagagtataaacttttctggccaaggcaaatcgacaatcatcatggtgtctttctctgccacgtatacaagttaattaataccctatttgaaaatactttattttctacttcgtccttcttctttctttccccatcttccttccctaacgtttcgcctc

SEQ ID NO: 37196 - DNA, 4120 bp, Cannabis sativa
  modified_base (4057)..(4092): a, c, t, g, unknown or other
agaagaatatataatgtatatataaacgcttcagaaaaaactttaatttttcatgtaatgacaattgtagcaggaaacttcattattatactttctagtttctacaataatgggtgagtaacattgttttatactctagagcggtacttcaataacaagaaattaatacagtttaacaagactagtacagtttgaagcattttattaagagtattcaattatttagaatgttaaacaagttgtacattatacaattatttagaaatatatatttatataataaagaaaaaaatttcgcaacagccaaagtttagtctgtaaaaaatggttacaatatactaagtttgtaacattaaactacgtaccaataagaattacatcagtttggtaagaaattggaccctttcttagtatataagacaagctttacagtatttaaatctgattttcgatgttttttttttttaattattattattataaaaaaaaaaagtaattaaacaattgtttgcaaataagtaatttagacatttctgagaatagttttgtatagataggtattggtcagataagtatgagcatgtttttatttatttatttattattttttttatggaaaaagtatgaatgtatttttatgtgcatgaattgaaaaacattactttcttttataaataaaaattaggagtgactggggtgagttgtttcccaattatttatggggctgaggtgtgtttaagaccatggagttatctcacgctttcaactcaagcaaaggaaaaggaagatgaggtggagctttctgacgaagatgtcgcacgtgtgttacgcgttacctcaatccccaacacgtgtacactactgtccctcacataagtaagaaaataaaaaatatcgaaaatattaatgacataaactatagaaaatattttcactttcaaataaagtaagagtaaaacaatgctagctaggctaagtccattccaaacggaggcagggaatttatatatatataagtaggtagtagtggtattttccactttgtttatctacaagcctctctctactactcgatcaactctaactttcttcctctttctctctcactataaactacacctgtctttcattttctctctggacaaaacttttaattaactttaaacagtttttatttatataccgaaggagaaagagctataaaagtagtgggatttccttgtttgagagggtgaatttgaaaggaaagatattaagatgggaagacaaccgtgctgtgacaaagtggggctgaagaaagggccttggacagccgaagaggacaagaagctcatcaacttcatactcacaaatggccaatgctgctggagggctgtacctaagctcgcaggtctctattcattgtagtatatatatatatatatatatatctcttttctttttttcattgacattttagtcacatacacataaataatattggcaattttctggaagttgaaggattccaagttaatgttactcatgtatagcttttcggttcagttttttcccttacactaaattataaacttgttgtttttattgtttttttggtttattaaagtgggaacaaagtgtgcttggaaaagagaaaaaaagttcactgtaaaaatgaaaaatatgcaaaagggagaaggacaaagagaatcaaattaatgattatatgggggcgtgatttttatcattattattttttcaggattactaaggtgtggaaaaagttgtaggctgagatggaccaattatcttcgcccagatttgaagagaggtcttttatctgattacgaagagcaaatggtcattgatcttcatgcccaactaggcaaccggtatatatttttccttttttcttttgtttaattcttcaaggaaatcatattttccaacatcaacttatttcgtccctgaatttcatgctttagctaaagctgaacaaaaaaaataggacgatttccaacccaaacttctaaataatgtattattctattatagggtgaccagctcgtattttttcttttttaattcatcaagattttttctacattaatttttctcccttgattaattaattaatttcaaatggatatattagaccgaccaagtcccattaccatatacatatatatatattacctttttttattatcaagtaataagtaaaataaataaagaataataatttcaggacttttaaaggtaggccggaaagtcaaaaaccttttcacttttttacatctttaattaattaattaattaattactgtttatacatataataattgcagatggtctaagattgcatctcatctccctggaagaacagacaatgagattaaaaaccactggaatactcacatcaaaaagaagttgaagaaaatggggattgatcctctcacccaccagccactttcttctacggtcacagaccaatattctcatgatgatgatcaacagcaacctgaggaaaagcaagacaaaacgacgtcgtcgtcttcaattcactcatcatctaactcagtgacggaaccaaaagatgatgagttagctgagaactacagcccgaccagcacattattcgtggttgatgaagatggaatggagctcatcaatgacggattttgcacagacgaagtcccactcatggagcctcacgagattattaatgtcgtttcatcttcttctgatgcaacgacgacgacgtcgcattcgtattcgtctccttctacttcttcttcctcttcgtctaataacttcctggaagactttcagttcatgccggaattcgaatggccaccatctgagtatgggaataatattaatggagggagtagtagtagtagtagtaatacgactactagcgccccgatgattggattgtgggacgattatttcaacggttgggatttgttgatggatgatgttgacagaaagcagatggttgatccttctctcactcatcaggacccccaaactgttttggatcaggatgactattggccctttgatcttttgtaaaaacaaaattttactgcttctttttccctccgttttggtaattgcggatttgttttgcaataaattaacaggaaaatcccatatgtttatcagcatttcacccacaaaatgattttgtaaatgagaatgagcgacaaaaatatacacaatatatttttctttcagaatatataccatacttttgttggcaaactaaaaaagaattgacacatttttgtgcttttcaacaagtgattcttactcattaagataaaatgattagatgaattttatttattaagtaaataaatatatgtatacttggtatataatttgtgtgcacctataaccttgtcggcttcaaaatgaaagtattaatgtatacattgttataattttttggaaaaatttgtattagaatgttttggtagattttttatttgtgttgggtttttactatcttactctcacatttctcacatttttttaatgatcgtgtacgttttaatttttgtaaatactgtacttgtaaatttttgaaaaattctaaataatttatgttaaccttaaaaattagcaaggcagtgttatgagattagttagcaaatctcggtaagcttgttggcatgcaatcatctcagaaagtagaagcatagatagatctctttctcagttttctaaaacgtcttgaatcacccaatttcgattaatattgaggaaattatgctcaaaatacggaagcaagcgcaacagattgcaagcatcttgacacccacaagttagctcgcgagccagtagacatgcatgctcacgagggccacttggcaagttggcatgcatgacccacgagccactcgacatgcattctcacgagattcgcgccactcggcatgcattctcacgagggtcactcgatatgcatgctacaaaggccactcgacatgcatgccacgccactcggcatgaatggctcaaaagccaatcagcatgcatgacacacatgttggaatttattttaccnnnnnnnnnnnnnnnnnnnnnnnnnnnnnnnnnnnnaccctaaatatgaactttctaacacgat

SEQ ID NO: 37197 - DNA, 5561 bp, Cannabis sativa
ttctctaaaaccaagttaccattatccaagagttgaacaaatggtttttgagcttgtttcgacgagtttgttgaccaaactagtttcctcttattattctgtcttgtaaaaagtacaagattgcctgtgctgtctatagtcaatgagccagatgaatctttgatcggttcacatcggtttgcaacccaaacaacagtttgatcgcctcgaatgttgttataccgaattccaagataacgattctttgatgaactggttgttggagtaaagaatcctaactcaaaccttccttcttttgataccaataaagctgtgttgttatctctcatgaattcggatggtctaatggtattaaccactgcaaaagttgttctaaaaagaagaaggtttaaaacaacaaaggtaactagaaaagaaagaaattccattactaattttctagttcattatggtgccaatatgatccatttccattttatgtgatgatataagtcaagaggcacaaccttatgggagttaatgctattggtgtaagtaattttcagacatattttgaaaaatcttagtcactttatgtggtattgaatactcttttaatcccctccaatacgcaaataatgtgatgcaccttaattatgacaattaagctttcgcggtgcatataataagtacgagagagatgaagtcttatgaatggctaacaatttcttatattgaattgtaccaatagcgatatatatcacctacttatggtgttggacagcttaacttaagtgagacgaaaaaatggagcttgaatggtatatgggtagttttcatacatcttatttgttgaaaagtcttagacaagagacaacttgaatgtttgtggaaaaatccatagtacatggaaggaatgaatgtggtagtgaatgctcttatccccacatttgactcaatagttatcttaacatttaatcaattcaaaacaatgtacactataagcagagctatttcaactaaactaattgcataaccaaatgcatcaagtaaacaaacaagttaaataggcataaaataaaatatggatctgcatactaaacagaaattattagtattcccaattcaactatgttgaaatgagttatgtttcattgtaatttgagtccattaaaataggtgtaagccaagtaattataaccaaacattctcaaaatcaacaaaaccaatgatccgaaaatagtataactgcgaaaaagatctgaagtttgatcccattttttcactcccaactcttccaaggatgatctgaacaaacccttttggtaagtgttcaacacactttagacagactcgcaaaacgttttaaaatgattgacttagtccgcaactaaacccagaaaatttaaccggcccataattttgttccggatatttgtcaaattaacaatgtaaaagtataaaatttgtaaccaaatgtggttattttgcaaatgaattttacttggaaagttattttgctcgttaagttttcttaatgactatattgacaaaatactcattttaccaaacttcacctaaagtttgcctaaaagaagtatatataaatggagagacctcaaattcagtaattcaccactttaccaaaccaaacacaccaattctttcttagtgacttttctttctttcatgaatctgtcaatgggggctggtgagagattttctttctttgcaagacttagacaatttcaaagctatattatgaaccaaccaactcatattccatttattgcccttctttctcttcttcaaggtgtggttttttggtaatttcagtttcaaaatatactatacaaactcacaaagagaatctccaattgtagacctttggttcaaggtcaagggagtcaacttgcacacattgtttactccattacacttattttattgatgaattccatcatatacaaaaaaaagtatgtatatagttttaaattaattaaatgttcaacattactattcaatcaaatatgagtttttctcacaaacaagttgtcttgaaaactaccccaataccattaattccattgccatgtttacttataagtactaatatcatcacaaagtttgatataaaatggggtccttttcttttctggctatatttgttgttgttattttgagactttttctatgtagaacaacttttgctgttgtttattatataaggccttcagattttttgagagataataacacaactttggtatccagagaaggaagatttgaactgggattctttactcctaatacttcatcaaacaatcgttatctcggaatttggtacaaaaatatctcagttcaaactgttgtttgggttgcaaaccgatgtaaaccgatcaatgattcatctggtttcttgactataaacaattcaggaaatcttgtgcttttttcaggacagggtaataataagaataaggtggtttggtctactaactcatcgtcgaaacaagccatgaaaccattggttcaactcttggagaatggtaacttggttatgagagatgagaatgatgagaatatagagaattttttgtgggaaagctttgatcatcctactgatacaatcatgccaggaatgaaattgggatgtgacttgaagagaggtctaaataggcgattatcgtcgtggaagagttgggatgatccttgtaatggagactttacttttggtattgagcttgatgaatcacaaggtacataccctcaactaatcactcgtaaagggtcttcaaaattttatcgaacagggccatggaatgggattggttttagtggaagtcctagcttgacaatggatccacttctcaaacacatgtttgtatacaatgattttgaagtttactacatgtacaacatcaaagataactcagtgatcttaagaattgtcatgaatcaaacaacgagtgttcgcgaaataatgatgtggattgaatcagatagagcatggtggcgttatggctcagttccaagtgaaaagtgtgacaagtatgggatttgtggagctaattcagaatgtgtcgtgacaaataatcaagtttgtcaatgcttaaagggtttctttaagccgaagagtgaagaagagaatcggtctgaaggagggtgtgtgagaaataaacctcttttgagctgtggtgatagagtgaaagatgagttcattagagtttctgggttgaaaatgcctgatactcaatacacttgggtgaataagagtatgaatttagaggaatgcagggcgaaatgcttgagcaattgttcttgtatggcttatacaaactcggatatcagaggaaatggaagtggctgccttgtttggtttggagatttgtatgatattcaaggttttcaatccagtggacaaggtctatacattcgaatttcggcttcagaaacaggtacatgttacatattgaaaatgttgtatcaacaatttccttttataatttgcccaataatgtttgtttgcttttgtttatttaagataattatgaaaaaacaagaaccaatcataaggttaaggtgaagaaaacagtgataattatagcaattatccttgttggattagctggtgggcttattttaattggatgtttcattcattggaggagacacatttatggtaagattaagatactaacaatctctacacttaactcattttatagaaacataaactcaaatgcatttcatggcaattgttcacatgtttttactaagttgcttgatttcatattgcagatagagatgtaattattagtactgtcattaatgacatttctgagagaagttacaaaaaccaagatgaagacttggagcttccatcgttcgatatacatacaattagtactgcaactgataatttttcagaggctaataagcttggagagggtggttttggacctgtatacaaagtaagctcctctctcatttacctactattgaaattgttaagagtattgttaggatcccatattgaccaagtacgggattggttagtagcgtataactacttgggcaccctcctttcttaagctagcttttcggagtaagttctacccaagtgattgtataaagtggtatcagatccatgcactctcaagtgggattgttaagtagtatataactacttggacattttttttaattgtgatattatagggaatgttggaaggagggcaagaaattgctgtgaagaggttatcaatgtggtctggacaaggagttaatgagcttcaaaatgaaattaaactaattgctaagcttcaacatcgtaatcttgtaaaagtatttggttattgcattcatagagaagagaaactattgatttatgagtacatgtccaacagaagccttgactatttcatttttggtaacactctctttctcttgactataaatacatgtgattattaaatttcattcttatggtagaaaccaacacttgcagatgaaagacgagccagatttatagagtggcctcaacgatttcaaattgtgtgtggaattgctaaggggcttctctatcttcatcatgattcgagattgagaattatacatcgagatctcaaagctagtaatgtgctacttgatgaagacatgaaccccaaaatttcagacttcggcctagctagaacttttggtatagaccaaatagaaggaaacacaaacaaagttgtaggaacttagtaagtcatctcgaaaaacctcttttattagtaactttactaacttaaatatataatcatttgtatactaattagtaatgttatgcaaatgtagtggttatatggcgccagaatatgctttccaaggcttattctcaataaaatctgatgtatttagctttggcgtattgattctagaaatagtaagtggaaggaagatcaaaggcttttatgacgaaaatagcggtcttaatctcattggattggtaagtaggtgtacataaaaaaactttattcgatatcttacaatgtcacattaagtgtagattgacaacatttttataatacttgataggcgtggacattgatgaaggaaggaaacgcttttaagtttatcgacgagtgcttgttgagagatccatacgaaaacatggaagaagcattgcgttgcatctatattggtctgttatgtgtgcaacaaaagccgattgataggcctaacatgtcttctgttattctaatgttgagtggtgagaaagggttggctcagcctaaacaaccagcctatttcactaacacaaatttgtgggaaggagatcatcattcgccatctaattctttatcttgtaatacaagtataacaactgtcgaagcaggataaggattttataaaacaaaacttggtttctggtcttttataatttatgatagagaagtagattcaatgtcaaaagtttttaaaaatagcctaagtgtttacaagaaacaatagtagttactcactaacaaacatatatgttaaactctacaacaaccaataaagattattcatggacatatctgattttgtaatac

SEQ ID NO: 37198 - DNA, 4629 bp, Cannabis sativa
  modified_base (4572)..(4587): a, c, t, g, unknown or other
gtttttattgcaatgtaggatctcttcgattttattgcattgtcattagttgaatttgttgaaagtgaagaagatggtattaatacttcacgggatagagacagggatcttggatttactttctcttttcctgtgaaacaatcttcagtttcttctggcatcttaattaaatggacaaaaggatttgttattccagatatggtgagtttcggtatttttgcattgtattgatcatgtccatgccttaagtatcaacaaacccttttacacaaaggggtagtcttatcagaaagcaatctctggaaccaatctgttgatgctttgtagtattgtttttagagtccgaagaaatcatatgattaatcccatttcctctcttgattttgttcattctgcaacatgctgttaggttggaaaggaggtcgcgggatgtctagagcaggcattgagcagacaaggtctaaatatgagggtggtggcactggtatgatactatgatgtaacatcttttcgctatgtaatgaaagcagaagcagttgtaaataagtctacatagattttctaacatgttcttcctatttagcattttcaagtagttgccctttctatggttttttattcttattctcagttcgtgctcgaagatgtcttctagctatgttttgtttttcctaaccttcggttaattatgtatcggttaatgtttatgtttgtttaaataggtcaatgataccgttggaactttagctctaggacattatcatgacgcagacactgttgctgcagtgataatcgggacaggtacaaatgcctgttatttggaacgaacagatgcgatcataaaatgtcaagggctttttacaacttcaggagccatggtatttttctcgtgtttttcttccgaaaaatgatttttactcaagtaccattcactactcacttcccctttaatttttaggttgtaaacatggaatgggggaatttttggtcgtctcatttaccaagaacaacctacgatattgatctagatgctgatagccctaacccaaacgatcaggtaaagatgttatattgctgatacttaataattagtattactatggaaatatcatattgctgataaattctctgcagggctttgaaaaactgatatcgggaatgtatttgggtgacattgtgagaagagtaattcttcgaatgtcacaagaaacggatatttttggatcggtttcttccagattatcagtgcccttcatcttgaggtgagtttccctttttcattgctcatattatagtaactaccaactagaaatcccagaagtggatgtgtccaaaaatggtttctttattccttaatccatctcaaaacataaaacaaaataatgtgttgaacttatttggtgagttgtcatttttatagatattattgtaaagtttgcaaggacaactaagtgatgagatggagttggggtctattcttaaatcattattgcaatactatttgtacatttgatgttataattattaatatagattcaaataggtataaaatattactcttgtgactttacactatgtttggtagaaaggagagatgagatccattgtttggtaggcaagagaagagagttggaaaaattcaatcctttcaaaaaacaaagtaaatatatcaaatactaaaattacccttcaaaaatctttatggtaattttaataattaactttctctccatctttcctgaactctccctcgatcatattttccccgtccatcctactttccgtccttcctatcaaacatattgaaggaaagatctctctccttaggaagtttctaaaagcgttcataaatgtttaaccgagtaacagtcttacttacattctttccacttgtattttcaggacgccgttaatggctgcaatgcatgaagacgactctcccgatttgagagaagtgggaaaaatcttacgagaaatcttagaggtaaatctttttcctttttccatttccctacaatatcgagtaaaataacactgattttctgattatcattcctatttcagattcccgacatcccattaaaggttcgaaagctcgtcgtcaaagtatgcgacgtgattaccagaagggcagcaagactggctgctgctggaatcgcgggcatcttaaaaaagattggtagagacgggagtgggggcctaacaggtggaaggagaagcgataacaaaatgaggagaacggtggtggcggtggaagggagtttatacacaagctatacaatgtttagagagtacttgaatgaagccttgtctgaaatactaggagaagaagttgcccaacatgtgattctcaaagtaacagaagatggatcaggcattggagcagctctccttgctgcaacaaattcacattcatcactacaacaacaacaacaacaacaacaacaacaacctgtggatagagtacagttgctataaatatatatattgttcatataatatatatacatatagcccctgtaaatgtagaaagtatcattctctataatctatatatatagatatagatatataagtatattatatattatctctttgtgtaaaaagaaggtttgtccatatattttttcttacatatctttgatgttagctgtggaattttttttttgttattattattttatttttacaaaaaggtattaatttctagtttggttatgtgttatatgcatatttatttatttatttatttatttgtgaacaaatgtagtgttagaatgaatgagaaaaacaatttcaaagtgagtttggcaaatgtctttttaagtttttatgaatgcttagttacatcttttcacattatatattttgtctaaagagtaaaagtggcatggttattgtaaaactttagacatagtctctagggttcttcttttggtcggagtttcatcgatcgatcgagatgttttgccttttctatgtccgctttgggtgcgttttatcgagggggtctctctcctttattttaggtcttcctttgcttcattgcgtggtttcttaagtggttggcgttttggggctttatggttgttaatttcaggagtgggttttctcgggttcttttggtttctagggtgctcaggtggctcgggctattggtgtgttttggttgtagcgtgtcaaggtggattctcagcttgatagtagtgtcggtgttcacgggactttcagtgttattttgcctcttttcttttcttgttttctatttgagttttagttaggtgttgttttgtttgtgttttatttgtaataatggtgttgtatcatccaattgttgggactggcttttgccaatttttgcttggtctggcctagtcgtgttttaattaagaattttatcttctaaactttgacatttataaaattatttctcataaatttttcatagcgttaaaaatttatccgaactattgagattgtttgattcaatgatttctggtcaattccgtttaattttaataacatgacgattgttgttgtactaaattgtgtctcttaaattttgatatttaccaaagtgtgttctcaaattttgacatatatccaatcgtactccttaaatccaataatctcaatagtagacaacttagcttattatgattatgattcttcaatttgattgagagtgaatctgatttttaatcaaatccaatttttagtatatatgtatttaatctaaaataatatacaaaggaaagagtggttcatgtcatgtgaaagtgatttgtagaatttatagcgtgatagctaccaaatttaactcatatataataaaatcttggaattgtttcaagaaaacacaataataataaaaaaaaataaaaaatattgttgtacggtttttaagattttatttacacaaaatacggctttttatatactttatgttatactcttattattttattgttgattttttgttatttttatattattatttacgttgtttttttttaaaattactttcatatagttcttcttttctttttttttttttgtgtgtgtttttatagaatatggtaaaaatatatataaaaaaaaatgagcgtaaaactgtaaaaaatttacaaaaaatagtagtgtaattttccctaaaattttgataatatctataaaataaaaaagaaaaaaaaatgataattacataaaatactaatctttttaaaaattttatacttttaaatttaaagtttttttatttttttatttttacggtattttataaaaacacaaaaaaaatcaagaaaactacatgaaagtaataaaaatacaaaaacataaaaaataatatacaaataagaaaaaatcaacaacaaaataaaaaaaaacacacaaaataaacattattctatgtaattaaaatctaaaaaaccgtaaaataatattaaaaattctaattagaacgtatttttgtaattttttgtttttaaaattttttttataaattatcccagaagaaaagagttgcattagtgtttaattacgagaaaattacactctataccctttttnnnnnnnnnnnnnnnntttttaccttcttttttaaaatctatcatttttacctctttt

SEQ ID NO: 37199 - DNA, 5031 bp, Cannabis sativa
  modified_base (3957)..(3963): a, c, t, g, unknown or other
gattaataaaaaatgttaataggagggaaagattaagattcacttaaatatttgtgtatatttggttgttatttatttatttattttgtggttatcaaagaaatgaatttttttcttgtaatttaatatctagtaaaggctagttgtgtaatttacttagtggaaagcccaaaactattctcatttttatagaggttatagatactttgtttctttctctttctttcaacaaaaatacactttaattcttacaaaaatatcataaattaaatcaaaattaaatatttacatttataaatatattacaataatttcatgaaaattttaattaaaatctaatttattttatcatttaaaataaataaagtgtattttaactactaatcacaatccacaactatcttatttataatccctagcaattcaagcaaagaaaaataattatcaagttgaataaacaagtcaaaccaaataaaaccatcctattattttaaaaatattagtagagagtctaaaattgctattaatatttttttagttgtaactccaaagtcgtgtgtgtgtgcgcgcaccaaattttttctatttttttcataagtcttaacacaaatagtatcgaaaaatctcaatagtgtaaagttctcaatttcaatgtcctcacatgtattgaatgtattagtatttaaaatgtgacactctttgaagttggaaatgtaaatgagagatgataaatttttaggacaagcaatttaaacaagtattgatcacaagataacatatctaattaatagaattgaaatgacaaataacatttggaattcacatgaaaaatttacaaaataaaaagtcaactagctaactaataataaaaaatacgataacgaacctatatttttagagagacaactgatggtttttttttaattaaaataaactaacatgaaactctttctttgtttatttatttatttataattattattttttttttgtttggaatacgagagaatggacaaaaaaatagaaataattaaaataatgttattcttgttccattttaattaatttatttatttatttgaaaaaatggataaatattacttgaaaatcgaaataaatgatgtttgccttgttcttgtttttattatttttttctatttttttaatgaatttttattttttggacaaaaaacatataaaaatataaatacaaaaaaataaaacaaaaactctttatgacaaaagaaattcattccaatattaaatgtcgtatttgaaatttcataagtttattttgccaattcaaatgatgaataaagttcaaaaaattattttctcaactctcataactcaccaaaaatgaaaaaaattacactcaaattttttcaactatatgtgttgacaacaatttcaccacacatttagaaagtgcataaaagaactttgaaaatcacaacttgataataaaatatagcagcaattgactcaaaacgtaactttacaatcatgcttggataattttgaaaaaattgacttagaaattcactacaagaaaattactctatctcgacagttaaaaacacatatgatagacctatcttggcagttatcaactatcgagatagaggtaatgacctatcttgacaattaagaactgccgagtgaaagtggtgggctttaatttggctgacaagaaaaactcaatgaaaatgtagttttcacttaacttgtaattgattttccaatgctactggcagtttgacacaaacttttgtattttaaaattattttgttttatatatgaatactaatgtatataaaaatatttaaaatatgaagtaattctttaaattaagaaatgatatataaagtattttccatatttttttatttatatagtttattttataaaatatattaccaatttgtatataactttactctttataattatttattattgttaattttatttataaaattatatgaaaaataataaataaaaattattttaaacacttaaaaagaaaaaaaaatattgaattattaatattttacaaaaaaaaaaaataattattattgtaaaagaaaaaaagttgtcacattccattctaatgtcaaccaaacacggtaatgttgctttcctaggtttattattcccttcatcactctccaatcaatgttaaacctattcccataaaatgaaacatgcataccaaacggctctttagttctaactataaatctaactaaaattatacttgaaagaaaaaaaaaaaaaaaacaatagtaactaagaaaatagaatattttcattatgtattaactataattattttaaaactttattcctaaaatcatgacgagcaaacaaactagtgcaacaagtctttagaaagtcagtctctactgctgtatgcaactttggaacattttcaggaatatgtgcttcccttaccttgcttatcttctagaaactgcaattgtctgttagcttttaatggtcattatgaatataattcttaaaatatgaagaaaaaaaataataaagctataaaagatagtttgtagctaacaactgaaatagtgaaacattaactgtctttcccatacctgtgtctcagcatcctatctcattcaactaggaatgtcaatcgggttgggtcgggcctgaccccgccacaaacctggcccggcccgatatcactttagcccgacccgactccttcttttggcctagcgagtcaagcccgacccgagataatcggaccggcttaggccggactagggatggcaattagggccaattttgcgggccgagtcgggcttttatcgagctaccagcccggtccggcccggtatatattatttcgggtcgggttagacccagcctgatttcaaatattaaaaaaaaccctaaattcctaaatgaattttactcttccaccatttccctttttcttcttcttcccaactggcccgaatctggtttaaacccattgtcaatattaaaatcttctatattctgttattcatcttgtgtttgttgttatttgaatcattttacatttcaaggtttagaaaatctcgttgatgacttttcagctatatgtaaatgttcaagagatgtggctcgtttgcatttgcaactagaagcagcaagacttgcttcatctgccaaacagtatcatctgattcatgtgctttttgtgaccgagtgctttccaatcccgaatctgtttacttgtaaagatctcatcacacaagaaaggaatgcctagctgtatgaaccaaatcgtaataaattgaggaataaggttcaactcccagttgggtcatgtgaacttccagttcctcttaatgctaaaggttaaaccatttactcttattgtaaatttgtttctttgctatttgcttttagaaaactaaccaagtagttgtaagcagaaaataggcctttgtaaaaagcttatttttcttgaactaaacacaaataacttaagtggatccattcaagttaatcaatttcattaaccttctccagttaagttcatgcaaagagaatatttgacccaaattcagtgtagaattcaatctactgtgctacagttagaaaaataaacataattaataagcaaataaaacgagttacagagtacatagagtttaaaatagggttcaaatttcatctcaaaaaaaatatttgaggacaaattgtgtagtaaacttgaagatgaatgagctaaggatgaagtagttatgttgcttgcccaaaatcataaagatggcaaaaaaaagtgaatttcaatggtcttatgtttaaatgacagtttagacttaaatttatgtttgaagttatatatgtactagtttgattacttaaagttaattattgtatactgaaatgtgtttatttttttataggctttggcgttttgcaagtgtttgaaaagaatnnnnnnnaagtggaaatttcaatctcgattcataggaggtatatatatatatataaattttttataattgctttattctattacatataattcatagaagagcttgaatatcttttatattcatccatagcgaagtaggttttacgaaatttgtgtgctgcggtgatataaggatgaaaaattttgagttatctaattatttatagttgaaattgacagatggttagattaataaaataggaaaaatgttgtccattttccgtagatatgtttataatatttttaaagcaattgcatggattaattgatagatatgagaatatggtgttaatgtaggttaaaataaaaggtctagttaaattgattctaattttgaggatgatattgactttgtgccatcaactgcaaatgaagtacaatctgttagtaatacagtagaagaagctcatactacagggacacagggaaaaagaacctctcgtgcatgggatcatttcacacggcaaaatattgatggaaaaattaaagcaatttgcaattattgcgagagtaagctggtgggagaaagatctaaagggactaggcatttaaattctcacttagagaggtgtccagtaagaaaggcccaacttgccgccaatcctagtgcaactgcaagcccttcagttactttcaattttgatcttgatttaataaggatcaaattggctcaaatgattgttgagcatgaatatcttttgtctatggttgagcatagcaggctaatagaatattcaagcactttgtgtcccatgtttcaaatagtgttaaggaatacggttaggtctgacattatgaaaatgtataaaactgagaaagaaatgtgcatgcaaattttagaaaaaagttatagtagaatagtcataactagtgacatgtggactggaaatcattagaagaggggatatatggctgtaacagctcattttattgatgtttcttagaaattacacagtcagatattgagttttaagtatgttccgtgtcctcatgatgctccagcactacttgaggccctaagatcttgtcttaatga

SEQ ID NO: 37200 - DNA, 2378 bp, Cannabis sativa
caacttcatttaactagatttttaatcttaggttgaagcaaaaaaggcagttcctagggatgatcagaacatcctgaacagaagtaacagcagcattcatgggtcacctggacctactcgtacaaaaaagatatttgtaggaggtttagcatcgacagtaactgaaagtgactttaagaagtattttgatcagtttgggataattacagatgttgtagtgatgtatgaccataacacacagaggcctagaggatttggtttcattacttatgattcagaggatgcagtagataaagtgttgtacaaaaccttccacgaacttaatggcaagatggttgaggttaagcgagctgtcccaaaggagttatccccaggaccaattcggggccagttaggtggttttagccagggtggtattggtagagttagtagcttgcttaatggatactctcaggggtataatctcaactcagttggagggtatggtagatttagtccagttactgttggtcggagtggattttcaccattcaataatggttatgcaatgggaatgaatcttgagacagggttgaatccaagctatggaattaatgcaaaccatggctctaacctcaactatggacgggtattgagcccctcatatggtggaaccccaaaccgatacagtagcgccgctggttatggtgggatcaatgaaggaagtagctctattctaagcacaacaagtcggaatttgtggggcaatggcaatctcaactatgctgcaaactcaaattcaaatgcttttctaggttctggtggtgggaacacaggagttaactcttttggcagcattggaccgctttggggctcctcacctaatgcaaaccaaggtggaggtgctggttcaacctatagtactagcaacctcagttatggtgggagagatgccggttttgttgggtctggaagtttaggctttggaagaaatgcaaatgtagcagcagcatcatcatatgccacaaatggtggttatgatggcactcatgcagacatatatgatggtggctcactttatggggatgccacttggagatcctcaccatcagagcttgaagggtctggctcgtttggatttggactaggaaatggatcttcagatgtcatgagtaaaaattctggttatattgggggttatggtgttaccaatagacaatctgcaagaggtaacattatcttctctctctgctgatttctgaattcaaatctcatcttcatgtgaaagctttttattatatatgctatgtacccacattattagcattagaaacttgactgaagtagagttccaaacttaggtttatgacatttataatgtcactaacagtaaaactgtattctcctacgtgcatggactataaactccataatacactttaaactttaaagcaagtcaataggcttgaagaattgattcaattagttgttgcaacttaacattatttattactacggactacttcaattgctttgaaatctacctaaattgtttggtaccaaacaattagctgcagatttataacttgtactgtaaaccaagaccaatcttttacaagcacataaatacatagaatatgtatcctgtttttgaagtcatgaattgcatcctataaattaaggagtctttgaatgctggctatgaattacacctcattttaacatttatgaaatctttatcatgtcatgctccatcctatttttaattactttgatcctaattcagacaaatcagatttgattaatgtagcctttgtagtaacaaggttctttcatcattacttgtttcaggaattgctacctaggaagtttatggaatgattggttagaagtttttgtagatgaagtgtcttttgtaagcaggtggagagctgcttagtttatactaaaacatgattagagctaattaattcacctgtttcagagattacagagagaaatttacttaagggatttctctgaagatttgagattgagtttgatatgaggtgttcgtctcttgggatttcgtttgagatgatgtataatcagattgcggagtatacacagaacagaattttttgtatcatgtgtctctggttagagagatccatacacataaaagggaagttgttttatttctttcttcttttttccatatttctctgctgtaacattcagcaaatttgtttgttcttgtcagtcagtcagtcaggtatgttattttttttttcttcttaattttgttcttcctgtctttcggggcagattttatgaaatgtaatgtctgattgttttattactagtgtgatacgcttaaagaaaaccaactcactcttagttaaattcatttttaatat

SEQ ID NO: 37201 - DNA, 4859 bp, Cannabis sativa
tctttactactctaaaatttaagttggtatcagagctacaaggccctcgccatggctacacctgaaaaccctactggaaacaactcccctgctcctgctgcaagcacaggaaatgcttctgcagtatacggcacaaacacggatgcctctgcctctcgagtcaaccaacctctcattaccaccctaaatcaacccttctcactaaaactagatcgaaacaactataccctgtggaagaccatggtctccaccattgtccgaggtcatagactccatggtcaccttgtcaaagaccaaacctgtccccttgagttcattacagtcgagacggctgcagaaggagaagtgacgaagagtgaagttcagacaaaccctgagttcgaaaactggatcatcaacgatcagttgctcatgggatggttgtacagttcaatgatcgaaggcatagcaactgaagtaatgggatccacttcagctgctgaactgtggtatgctctagaaagcttatatggagcctactctaagtccaagatggatgatacaaggactttgatccaaactgtcaggaagggatcaacaccaatgggagaatacctcagacaaaagaagaactgggcagatgtcttagcccttgccggagatccatatcctgaaactcaccttgttgctaatgttctttcaggtttagatgctgaatatctgtcaatcgttgtccaaatcgaggccagaaccagtacaacttggcaagagctgcaagatatcttgcttagcttcgatagcaagattgagaggcttcaaactctcttgactggaaccaaagcaggacacacacctcctcaagctaacatggcctccaaaggaaactctggaaacactcctactgctggaagaggccgtggtggctatcactctcagaatcaaagctatggaggtggtggtaggttctcgggaaatcgtggaaacactggaagaactagaggacgaggaagatctagtggaccacgacccacttgccaagtctgtggaaaatacgggcactccgcggctgtttgctacaacagatttgacgaaaacttcatgggaactgatccaaatactcaaggaaacaacaaaccaggcaacaacaacaaccacaatgcgttccttgcaactcctgaaatcgtggacagtgatgcttggtttgcggatagtggtgcaagcaatcacatcacctccgaggcttcaaatctgaaccaaaaacaagactatggtggtaaggattctgtcactgtgggcaatggtaacaagctcaaaattgctcatgttggtagtggttatttacatactaaatctggtgatgttttactgctgaaagaaatgctacatgtcccacaaattgccaaaaaacttaattagtgcctctaaacttacccaagataatgatatactaaatgagttttattccaatcattgtttggtgaaggacaagcaaacaaggagggttcttcttcaaggagtgcttagagatgggctatatcaactaattcaaccacaaggtcaatcgaatgtgttaggtttcaccaaatccaagtctgctagtagtgtgtctaatttgtgtcttctgtctaatgtaacagatgtggctgagaaacatgttgatcagtcacaatctgataagtctttcctttccaaaattgatgtttggcataggaggttaggccatccatcatctcgagttttaaatcaagtcttagagtcaactaatgtaaaactttctaagaatgaaatgcaaagtttctgtgatgcttgccaatttggaaaagctcactctctgccatataaattgtctcaaaatcgtgctaaatctgtcttggatctcatacacactgatttgtggggtccggctcccatttcttctaatgttaatcacagattttacattcattttttagatgatcacagccgtttcacatggttgtatcctctaaaattcaagtctgatgcacttgatgcctttgttcactttaaagctttggttgaaaataaattcgaaaggaaaattaagagtctaaggtctgatagtggtggtgaatatcagccctttgtctctttggttcgctctcaaggcattgagttgaatcatccttgtcctcacacttctccccaaaatgggagagctgagagaaagcatcgccatattgttgaaatggttcttaccctcttggctcaagcgggaatgcccttaaaatactggtgtgatgcttttgctacagccgtgtatctaattaatagattacctacagctgtacttggtaacaaatcaccatatgaagtcatatatggaaaacaacctgattacaacttcttaaaaacctttggttcatcgtgtttcccttgcataaggccataccggtcacataaatttcaattccattccttgaagtgtgtcaatttgggatatagtgattctcacaaaggatacaaatgtttaagctcaaatggcaggatttacatctctagaaatgttgtttttaatgaattagaatttccctttcacacaggttttcttaacaactacaaaactccacaatctgtagttgttcacagttcaacatggtctgtcttaccctttttgtctcctcaaacagctccaactccatcatcttctcaccattctgccaactcgacagcactccctgatatggactctccttctgctcatggttctccccaggtatcaactcactcctctcactcttatcattctccaaatgttgtgtctccttacagttcaggtcatgaagaaaacactcttcctgctaccaatgagctacttgattttgcctctggccatgaccaagaccaacccgatacctcaccaccatatacatcactagacaaacctttgcccatctctcaccccatgattactagagccaaatcaggaattttcaagcctaaaacatttctcagcagcactaaaatgccagatttaaccgaacctcaaaatcttgaagaagcattttgacatcctggctggtctgcagctatggacagtgaaatagctgctttaaaagccaataatacatggattcttgtccctccttctctgttacaaaatcttgttggcaataagtgggtatatcgaattaaatggaatgctgatggtagttttcagcgatttaaagctcgcttggttgctaaggggtttcatcaaagacccggcattgattatggtgaaacttttagccctgtaattaaggcatctactgtccgaatagtgctaactcttgctacttcacgaggttgggatattcgacagttagacataaataatgcctttcttaacggagtcctcgaggaggatgttttcatggtgcaaccaccaggctttgaggaaccagggaaggaaaactatgtgtgtaagttgaacaagtcactttacggtttaaaacaagctccccgagcttggtttgataaactcaaacagaccctgctaagttggcaatttcagaactctaaagccgacacctctttgtttttctacaagtctgaacagattatcattttagttcttatatatgtggatgatatcattgtgacaggaaataattcaaacaaaatgaagagctttattgacaatctaaacaagcattttactctgaaggaccttggtccattacatcattttctcggcatagaggtttttcgagacaacacagggctctatcttacacaaacaaaatacatagaggacatcttgaggagaaccaacatgaccacattgaagccgtgtcctaccccaatcacggctgggaaaccaatgtcagttaatgatggtgaagctatgcataaccccacggcttacaggagtacagtaggtgcattgcagtatctttgtcacacaagacccgatattgcctacgccgtaaacaagctaagccaattcttacaaacccctacaagcacacattggagtggtgtgaagagagtactgagatatttacaaggaacaaaaacacaaggtcttcatattagctgctgcaacaaactgaacataagtggtttctctgatgctgattgggcctcgtgtcctgatgatcgtagatcagttgccggttactgtgtataccttggagaaacacttgtatcttggtccttgaaaaaacaagccgtcgtctcaagatcgagtactgagtcagagtatcgtgcacttgcacatgttgcatctgaaatttcctggattgaatcacttctacaagaacttggagtgccactactgcttccctcaataacctggtgtgacaacttgagtgccagtgcattagcatctaatcccgtctttcatgcacgcacaaaacatatagaaatcgatgtccattatgttcgtgataaagtgctgaagaaagaacttgaggttcgttacattccatctcatgaccaagtggctgattgtcttactaaaggcctgtcacactcacgattcagatttcttgttgacaaacttggcgtgagaacatctcccttcagtttgagggacggtgttaagaaataagaatatggcagttgtgaatctctacaccagcagtgtgcctacgccagcagtgtgcaccagcagcaagaagtcgtgtgcaccagcagcagggaatcctttctcaattgtggtcctgcatcaatttcacaaataccgttagacctttttctatgtaatgattagattttattgttaggatattccctttgctgtacaattcaaatgtaacagctgtacaatggtcattggccaagtgtaaaaatctttccctataaatcaagtactctggctcacaaaatctttgagcagcgtttttcacatttctttactactctaaaatttaagt

SEQ ID NO: 37202 - DNA, 4376 bp, Cannabis sativa
atatattaaactctataattttgaagaagctgtcatcaagagaagaaaaaaaaggatgaattcatttgaatattgtgaataacataaacatttgataataagctaaattaactagaggattggatcttaacttctcaaagtcaaatatgttgatatcatacttgtattgaaggacacaatcaggcaaaaggctaaacaataatatcataattaataaataggccaaacaataatatgtagtgaaacacaaaataatagcaggaataccttgtaacgattgatcatatccttcaaaatcttgttcagagcatgtcccatgtgaaggtccccattggcatatggaggaccatcatgaagaataaaattttcctgaacatgcaaaaaaagtcagaaaaaaggtcaagtaacaaaacgttaatagaaccaaggtaaacttaaaaactcacccctgaattcttatcaacaactctcttgaacacctgattgtcatcccaaattttctgaatttcaggctccctaaccaaagagtttgctctcatgccaaaagttgtcttaggcagatcaactgtgtgcttgtattttccatcttcctgctttgcgcctagacaatcaaattaacccagacatgaaaattagtgcatgctcattcttcacaataaatttttcagtaaaagtttcctgtgggacacatttaaaattttaagaaccatcttctaaacaatgcctccaaagcatgaatatttagtaaaagcaaataagtgcacaacaaagagacaccttcagccgctttctttgcagccataacaggtcccctagccctccgctttgatgaaggaaaatcttcagaggaataagtagaatagtttgttgtattaaaaagggtaaatactttggttgaagagcttcctttgagatgaaacaagctggcagaagtcctcctaaaagatgggctggttctttgtgacaaaacctgaaatgtacacagcacagttcatcagtagccattcgccactttagaaacaaaggaagtcatagagttttttacaaaaaaaagtgtcagattcaaatcgttgactaattaccaacataacattaaaactaaataaataaataacaataataataataattgcatttatagaagcaaaagttttaagggaaaaaaagaagaagcaaaatttaattgaaatggttcacatgttcttatacctttgtaaaaactccactaccccctgagacacaatggaaggttccatgtatcaagagaaaaatttgaagagctctacatggctctaacaaaaacttcatttctacgaagtgcacaaatcaactttttgcatgcaattactatcaagccttaaccccataatagagttttggtaattggattaacgttatgtttatgattgaaatctattaaaaaaactttttgcatgcaatttgaattttttgaaaattgtacttttagtttcaatgaagcttatgcctgtaataatatataatactgatttttgtagaattctaaattatttatcatctataaaagacgatgaagttgacatttggcaacttacaaatcaaaagaaaaacacacgttacaacttataaatcctaggcattacctaattccttcaatgaattaatttgagcaatttgtgtagcaaaagagaatctaagagcatcaacaatgcaagccactctaaaagtggctaaagaactccatatcacctaaaaatactccaatgctaaagcaacactaaaaatagctactatggtcccacactctaatttttaccaatagttatcaatttgtatacactaaagtattaattttttctttaaaaaaaaaaatagaaactccgatgcttggcagcagctaccttagctgccttcaattttccctccaatgctaaagcacctttaaaaggtggctcttcatctgacaacacctgcttggcactacactaatttacagcgttggagttggcctaagagtttgcaacttgaatccttaccaaaaaaaaaaaaaaaaattgcatgttgaattttttagatgaaactcatgtaagatcacttattcttctgtctctaattataccatttattctatttttcaaattaatagtttcattattttatttgagttttactgatttgtacatttcattttgctcgttataaaattcagacttgtcctccaagtcataactttcacctcctagtactacgactaggagattaaagtaatggtatctgttgctctaactgctctaatcaggaaagacatcacaatttgaatttcaatactacaaaaaaatggaatgaagacttacagattttttattattgttttgaacaaaggacttacagattacacaaacattttcaacggactccaataaaaattattcgggaaaacaaaaaacgaaaaactacatatgtaaatgtgaaggaggacatcatattgtgaagttcaactaattgaaaacgcctcaaaaaaactcttgtccacattctaatattctgaaaaataaaataaagataaaaaggaccatagttacgactacacagtagcgctaagctcttagcatttttatttttttacacaaaataataatccttctttggcatttcatcaagcactttgttagcaaaagtaaaagctcgccagaactcagaaatacataagataaagccatcaatccgattaaaatttcaaacctacaagtttcaatttacttctccatcataaaataaattctcaatcaacactcaaaagtatacaaaacaaacgagttcaacacacgacatcgctcagttaccgaagaaaagtttattaatcgacatttgagcttatcaatcataaactaaagcttaataataaaacattcctcgagactttctcatgagccgaaaccgtgaaacgaagaacgaatttaggaagtaagtgagtgagtgaagttatcgtacccgagaaggagaggcatagaggaccgccattgaagcctccctaggtttgaaggcgggagaggtagtagcgaaggatttgaaaaatgacatgtttggtttatgaagtcattggtggtggaggttcgccagagcccgagagcagagggagagagggagggaaatggataaatagaataaatttacgaaaacagaagaatcaaatggttccaaatctcacacatacgttagattaccctctttttataactattttaaacaaaagggaaatttaatatatttattggattaaaattatttttaacttatttgagtaaaatagcctaatattttataaaactcaattttacttcttttattttagacacatgaccctccctcttcttcccttctctctccctctctaaactcacctaaggaatctacccataacatatgataccacccacaacctcggttctttctctccacgaccaccgcaaccacaaatctaacaactcatagacctaatgaccatcgcggacccaacaattcatggatccaacgacttctccttcaacaacgatttctccatcgtcaatgttatcaaatgaatgaattgtatgattaatgtcagttaactgtgagttgatgttagatttgaaaatgatcggatctaaatttcgggcagaaaactaatttttttgccaggctcgatggtggtctgatgtctttccgttgttaaaatgagtaaaagttgaagatgaaagtcctatgctggcccgatgctacctataaatatagaatatggtctgatagtagtagtttgatagtggtccaatagtggcttgatgtcttcctaacgagcttaataaattaaacttaacatctataaatatagaacataatccgatggtggtctgttgctaccattttttatgtataaaaatatgaagaaaaaaaataggtagcatggggccacaatcggacccccatcaaatcaccatcggtatggataggaataaggagtatggatggggaagttagaaaaaaaaaatggagaaagatattataggtattaatatacagtgtgtctatttttttaattttggtacacttgtgtttaaaaattttaatatgcaccaaatgtatgcatacagggcattacgtatgttcataaaatactcaattcagtggctaccaacaacccacaacatgtcatccagaggaatatagggcattaggtatgttcataaaatactcaatccaatccaatcttcacaatctaatccaattcaaactgcataaatgcggatatgtgtggaaattcttataaatacgaattggattggattagaaaatttaaaattcggttgattgacatataaaagtaactaatacaattcaatttaatctaatacatatgatac

SEQ ID NO: 37203 - DNA, 3687 bp, Cannabis sativa
cacttttacatctaaatacactgtatattttaaaatatagtgtaattactaattataatagactatgtaataatgtaatttatatcatagtaagcctttataaataacttttgtgatgtatattatgtaaaaaaaagttatttaaaataaaaaaatttaatagttagcccccccaatgattcagtcctggctccgcctctgtttgtgattaaaaaattaaaaaacaaaagtgttaccaaacgctacctaattttttttattttttactttttctaatttaaaaaaattaaaaaattaattttttttttttcttcttcttcttcttcttcttcttctccttctccttcttcctcttcttcttctacagaactcctccctcccaggccctctttctctctctcccgtctcaccaccggagattttcatgatatgtaaaaaaagcattatgttcatagtcattggtttcttttcgagctataatcctttaatatttatttttattaattattaaacatatgttttttagcaaccggtaccatataatctaattatattcaaggccagcatcaagctaaaaaagagcagtatcgatactaaaatattaatagtgttactgcaagagtcaaggaatgatctaataaaagtctactcatttaagtgaatatgatcaggtgaggtcatgtgatcaaccagcaaaaaacattttaatgtatgtgtacacacaagatatcgtacatatcaatttgtatatatacaaaagaagagaaagtatgtgatgtatccatgagcatgcttccaaaacctaatatgtggacctgtcttcatcccaacattttatttttttttaatgatggtttcggtttagctatagtagtaaggtttagaaagttttgaaattccttttcataaaaaaaaaaagtttgaaatatatccttttttataatattaaatattgatagagcctgtcttattatctgtttatacgcatgtaaaattattattttaaactattcaaaaaatttaataatttaccaaatattcaattataactatacaataaatacctttttgaaacaaaatttgaataaaaaaatatctatgtattgtaggtacatgttgtttagatacatcatggttaattaatctttccaataaattaaaaaaaaatagttaattaagttttattggtattcaaatattaagaaacaaaatatattatatgtttataaaattcaaagtaattagcatatggaaattcatcaggaaaaaaaaaaaaaaaaccattgtcctgtacatgtttttatataaatattaagcttttggtagtcttgggtcttggccatattgggaggagaagaataaatcatgattttccaagtgactaacagaccaagtttctcccaccaactacatttcatatatgtatatgatcagcatctcatttatatataatatatatatatatgttgtcatatcatagtctaaattatttgtttgatccatatatctctcaatcattttaaaactgacctatattgcatatttatgcaaggggtattgaccccacactaatcagattcaccctttaataatgccttgatattctagtacactaaaaagatgatgactatttgaaccatatgaattcagaataaaacttacgttctcaaaaatactcttctagaactcaaaacacaaaattataatcttaaacttacactcatacatatatacaataataatttttctaggagaaacttggcctcattaaaactttcaagagcaaaagtcaatgtaaaggcttaatataaaaagagtatatcaagaagatatccttcatgagagatatcaacctaaattaattaagtttatatatgcaatcaagatgatccatggaaaggacaaatttagctaaatagtgagtagcactacttgtattccttgcacaaaaattacaagcaatgtaaataaactcattaccaagaacaattatatccctaacctaaatataaaagaaatagagtaagagaaaagtaataactgtgtctcattcaattaataaagctctgaaaacaaaagccatatatataggcagtacaagagttggttaagaagattaaacaacacaacaacctaactgaaagagatatcatctcaacaaaaaataaaataaacttataactatttgtaatagtcccctcaagatagagtatagatgttaattacacttattttggatacaatattgaaaaaatgagtagaaagtaaagccttagtaaaaaatacaatattgaaaaaatgagtagaaagtaaagccttagtaaaaatattaactaggttctattgggaaggaacatggagtagttggaaagagtcttaccggaccttttcccgtatataatgacaattgattttatccacgtctttagtgcgttcgtgataaaatggattttcactaatgtggatagcggtattgttgtcacaatacattttagcatgtatgatgtgagagacaccaaggtctttgagaagagcaaagatccaggttgaagccttgcatgataagcttgtgtatattcacaggtgatagtgtcgccagccaaatcatcgaacttccattgactgtaggagagctgcccttatcaacgacatagatgcaaaaaaaaattagttgttgatcttccatcagtgtacaatgtattgacggattggcccgcattaattggactaagagcagtaagctcgatcaaatatttatccctaaagtttccaacacaaatgggagtaggagtagttcgaggcaaccaattgttggctcgcgagtgttatcgcatagaactacagaaaaggagagccaattatcaattgatgataatcataacagaagaaggtgagaatgaagaggaggacctagattccagaatcgaagacaaaaataacctgctcaaaccgattgaagagctggaagaggttattttagatccaaataatctcgcaaaatgtgtatacattgggaaaattttggatgaaaaactaaaatagcaattaattgattttttaaaggcaaaccaagatcaatttctgtagagccactcagatatgataaggataaaccctaaagtaatttgtcatcatttaaacatcaaccctagctacccggcgaaaaaacaaaattggcgaccgttagatttcgagagacaaggggcacttaaagaagaggttgacaaattgttaactaatgacttcatacgagagacctttatccctcgtggatctcaaatccagtttttgtcccaaaaccaaacggcacgtggaggacttgtatcggttttttagacttgaataaagcatgtcctaaagattgtttctcactactcaggatcgacctgttagtgaatgcaacagcaaaacacgagctgatgacttttatggatgcatattctggatataactagataagaaaagtacatggtaattgtccacattgcattagcagttgtatttaaatcaatcccaaaaataataactatcaacctatattccaataaataggggaagatttcatgggaaaaggggatgataaaatttgagagaaaagactattattcaaaatcagattttatattttgtactctaaaaatatccttaattataaggattgtggagtatatgaattttaactaaaaa

SEQ ID NO: 37204 - DNA, 6621 bp, Cannabis sativa
aatgtattccatttatcaatatatatttcagaaaaaatggcaatgaaagtttttttttttttattaaacgtgcccaaaccagcacaaagaaaacaaacagagttcaaaagaactaaacagaacactacaaaagactaaaaaaaacaaacaaccgaagctaaaacaaactgaaaaaaaaaaactacaaacagccatccgtcctcacattcgacaggaaactgtcaaaattgggcaatccaactctaccacagattgaagttcggattactcattgcgccacatcatgggccacaccatttagttttctaggaatccaattgatctcccataaatcaagcttagaagttagaccttggaatttggcaacgagctgctgaacattatggttcagtgttgatatgctttgactgttgctcttaactgcctctatcgccccaacagaatcactctggaagatcaccattttgagcccaagttgaaccgcagcttctgcacccgaacatagagaggatatttcccctgccaatgaatccctataaaagagtttcgtcgtaaaaacattagttatagtaccctgatcatcacggaacacagcagcccctgctgagactcggatgccgatagccacatcagtgttgcgcattctccaattggaaggtgggggcaaccattccgtttgcagagaatgttgagcatcctgttttccatccaactcagctagtctgcgattgatgttgtgtacaacgatgttgagcggtattgtggtattcatatgcacaacagaatttcttaaattccataatctttccatgattatagccgccccttccaggatagtgtcaaaattgatagcctgaggtctattatccttcttcttgaaccatctaatccattggtcccagtccgtgacatggatcagattagttctgatattccagttgcttccaaaccaaacggctctggtcactgaacactcccaaagcaggtgaaaggagtcttctattgccgttgagcaaagggggcagaatggatccgagataccaaaggctttgagaattttgtttcttgtgagaagacagtcggcaagcactctccaccacatcatttttgctctgttatgcattttggcaccccagatcagaagccacttctcattgtcgattgaatttggctcgatattcttggtaatcctataggcagacttgacgctgaattgcccattcgcttcaggcagccaaagccacgaatccttctcagggatatttggcaaagtgatgttaaggattctaatggcgtcttcctgcttaaaccattgtcttatcaaatcttcattccaaccattatctctaatgaagtttctgaccatgctaattccttccgttgcatctttcataggttcaggttgtaaatctcctcctggaacccaagggtggaaccaaattgaagtttcctccccatttccgatccttctacagattcctttgtggataaactgtcttgcattgagaatttcttcccacattcttgagtctgcaggttgtgcttcaatatccaagaaatctttgtttctcaaatatttggcattcacaatcttaacccagagactgttgtcctccaccatcagcttccaagcccacttcattaaaaatgccatattggtgtctttggtagtcctaaagcccaagcctccatggatctttggcttgcatagtctttcccaagtaattgtatgcatcaccctcttgtcttctgtatctccccaccagaagtcccttaaggttttgtctattttgttagcagtagagacggggatagcatcagatgaagctaggtagtttgccaaggaggatccaacggatttgattaagcatgctctgcccgcattggaaagaagttttgtcttccaacctttgactcgtcccagaactttctcaacaagtggagaatactcttctgatcttcttgcgttcttgaataaggggagtcccaaatagtttgcatcaggagacattcttttcatgcctaagagctgggttatcgcttgaatttttcctcggcaaacccctttcgagaagtggatggaagacttctgagcatttatggattggccggaccatagacagtatttggtaagacactccttaaacactcttgcctccttgagtgtagcttggccgaataaaataatgtcatttgcgaacattaaatggttcactgcagttccatttcttcccatcttgaaacctttgagtgcacccgatttttccttgctgaatatgagtcttgaaagcgtctccgcagctatgatgaataacgtgggggataaagggtcgccttgccgtaaaccccattcaggtttgactttcccttcaattgagccattgagaagtaacttgatttccttggtggatatacaagcccttatccaacttgtaaagcaattggagaaccccatttgataaagaacggcaataatgaaatcccaatcaagattgtcataagccttctccatatctatcttaatcatcatgaagcccctctttccttttttcctcttcattgagtgaaccacctctctagcgatcaaagtgttctcggttatgcatcttcctttgacaaaagcagtttgtgttggcgatatcagttttggaagaattcccctcatccttgtagcaatgatctttgatattattttataggccacattgcatagagcgatcggtcggtagtcttttgtataaacaggggtgtcgttcttcggaatgaggacaattgcggtatcgtttatgaaatgaggaagctcagagtgggtgaagaagtgaattaccatttcgtggaggtcactgctgattgtatcccaatgatgagcataaaagcttgccgggagtccatccgggcctggcgctttgtccttccccatttcagctatcgccaccatcacttcctctgggtttcgaatagcatttagcatcaaattctcctcaggggtaatggcagtggggaaaagatcgataaggtgtggggtacaacagtttggatctttcttaaaaagatcctgaaagttttttaaaaaacattcagcaattttcttctgatcttgaatccaatttcctttttcagcatccttgatgcattgtatgaagtttttcctgcgtctgattattgtagaagtcatgaaaaattttgaacatctatctccctccttcagccattgaatcctcgacttctgcctccagtggatttcttctcgaagcagagcttcacttaattgttgttgtgccccttcaattgtattcagatcgtccggattagattgctcaacgtcttgcaaataagaagtttcctcctgaatttgaacattaatcttccgaaatcggttcttgttccaatggctgagtttttgacgagtattcttcactttttggtggaagttaatcattgggttgttgtggagtctcttagcccaagcttccttaaccacccagtagcacctttggtctcttgcccacatattctcatatcgaaatggatggtgcttacctttgtatcctccactggtatcgaggagaataggacggtgatctgatgtggatgccgacagatgattaagaatcgcatcaggaaataaaattctccactccatagaagccaagctacgatctagtctggcccttttctgtctcagacctacactggcttgtttgttgctctctgaccaagtgaacggagggcctatgaaacccagatcaataagtccagctctgtccaccatacgccggaaatcgaaggcatatcttgctgaattaccttgtttggtgtagtttatgcattctgaatcaaggagtgtgccattcatatccccaatgaggagtagtgggttggaggaggataaggccaagtcgccaatttctttccaaaaattctccttatccttctcatgcggagggccatatatcccaattaaatgccaactcactcctggggggtccgaagatatactacccatgattccatacttattattaaaattgatgttgcatttgacgcctttcatccaacagagtcccaacccacccgacaaaccaacatgagggacgtagatgacttcctcgaaatgaagtcttctgcagattgcttcaaacttttgtaatggtattcttgcttcagataacagtagcatctcgggtttatggcgacggattaaagccgccaactgtcgaactgtcgtggcgctcccgagaccacgacagttccaagctaagactttcatggcgactgtggagacatttttgggcaagtctccgaggccccaaagcaaaaatccacaccatagttctgagttggtagtgcattcgttcgatcgtcatcttcctctagttcttgtattcggcaggcggttggtactgaatgggttttctcaactaccacaaagtggttgtcaaggtcaattttcagatcaatggttttgccctcccagtggtgtttgattgtagaagtgtagctatttttcgttttagacgggtttgtccatttgaactgcttcgaatttgccgatagacctgagtgatttttgggtggtcttcctcttcgtttcaaaggttgtgcattatcagtgctagcctgaatattctttttcggtcttcctctgcgtttgggagtggctccttcaatgtcgtgcccagtaacaaacgggacaggaggaggagcatgccgtgtttcattcgcatatggtggcacatcagttacagaatttggagtttcaataccttggatagaacaaggaggcccacctgaattgggttctatctttgcaaactcataattcatttgcattttggattttggagttgggctgaacatgaaaccatcagaagcctttctcttacgtgggccatttaaatgttcatccactctaaaatcctcaatggtatgtagtaggttaaaaagagttggttccctatggaacttgtccacagtaagagagcccataaacaattcacgggcctttggttgggcccagcactctttagaaggccaattgatatattgtgtttgggagcccaaaggagaggccctatatgaaggacttgaataacttccttcatatgagtcaaactgggacttatccttgctggtgcgatagtgactcttcgtttctggagtgttatggtttgaaacctccccaggcgcaggcaggtcttcttgaggggggttatgcagaggctttttccctttgtatttcgtggtttctcctgaagaggtaactttttttgcttcattttgaatcttgtggccgttatgctgtgaaccttgggcgttacagactgtggagttgctccgtgtgctggtgtccttggaattggacggttgggctgcatcaattaagtcctgtatgactacctttttgttgttattaccataaggggcaaattctccaatacccggtagataaaccagtggtagttgggtaataacctgcgccggttcccctccgtcgtgagcttcctcttcttcgtcggagacgattctgcgtttagtaggaagctgaattctgctttccctcatctcatcgttttcaccatttctaatagctttctggacccgtagttgattgcgtagcactgggtcttttcctatttgtttttggagcacctagtcttgaaaccatttggcaaggggggtagagaacgtggacttatgctgagaatcattctttagccaagtcccgtatagagggtagaaattccccacactatccttgaccacagtaggtggtttaaaacatgtgctttgatcatgggtaagaatgccacacttgaaatagagcttgggaagtttgtcgtatcagtattgcaaccataaatcctttagtttttgttttctgagaaagaaaccagaaaataatggcttgtttagatcaatggttgctctaaatcttagagtgctcattccaacagcgtcttccactccattcggaagttcataaacgggtgatgccttagcagcaatctccttcagattggataagttccaatagaatggaggaatactgtcaatagagacccaaataggagttttgtcgaatcgtatctctgatggggtaagccatgcaggccatggcattaagaccatcagcgcgccacaaacgaaccaaggtcgccgtgcaagtacgttcaatgcatcttcccgcctggcaaacgtgaattgtataatgccaccatctatttccttccatctccatcccttaatggcattccatgacaatttaagggaaccttgaatggcagctttgcccagtttgtacctgctaataatcttgcctaggaggactttatttgattcttgtggttcatctacttctcctggattcaggctgaacgttatatcctccgaggataactgaatagtgtcttcaaagataccactgattccggtgggatccatagggccgagggagttgttgacgttagaataagagcaatttgacaattctctatatcttctaggaagagagctcaatacagagcatggtaagaataatggcaatgaaagttagatgatcataagagagacggagtagtgatgatatttttttaaaactaaaaataatattatataaaa

SEQ ID NO: 37205 - DNA, 5313 bp, Cannabis sativa
  modified_base (5217)..(5219): a, c, t, g, unknown or other
  modified_base (5261)..(5261): a, c, t, g, unknown or other
tttttttacagattcatcaattgttacagtattttttaaatttcaatttaatttattattcaaactaaatatatatttttaagactaaccataaaatatatatctataataatttaattaattaaaaatgatagttcaaaataatttaaaaaataagactcctacaatattaatttttttttttatgttattaggagtaaaaaataaaattttagtagaatagttagttatattattaaaatatatatatataaatattttaaatttttttgaatttgatataattttactacttatcattaaacaaaatacaatcgcacgtgaagcgcgatttgtttcttagataatttattaaaaaaatatatatttttatttatacaaagatgttttatttgactaatgatttagacaacctcgaattacaaatcataaagaatttgttagaattatattaattattattatattattttttaataaaataaaatatttatttatattataatacaaataatatgtagattttactaaaatgaaaaacaagtttgtcgtggctataatgcagtgcacatatgctatgacattatagcgaaattaatattttagtgttaattatgttgagtagtgatatgaatacttaatgttaataaaatcataatttttcgttcattttcataatttagtgtcttaaatttgtaactagatttaatttttgaatttattaataaaagatatacttcatatttttgttcagactcaatgatttaaaatttaagtcttacattattacgtgtcatatttatgactttaacagagtctatactgacagacaaaaattacagctttacaaatattagtacattatgttgctaaaaaatttattagcttacaaactcaaaacttttagtacttgtgtcgcaataattcttaaaataaaaaattaaatattgtttggatgattatatttgcacctaatttatttttaaacattgacgaagataaattatacctatttaccgagatttatggaaaccaattttaataagaattaataaataaaattaagtagtggatagtgagatagagatttttacgtggtttaggtattagtgagccctattttacgagtcaattgtatttggctaaatagatagccttgatgtattacaatgttctttgcaagctgaagcactttagcttcttgctatagtatttacacaatgatctttcaacacttttcatgagggtataatgtagtatttataggctaggatctagaaaaggatatacctatgacccgctaggatttgcatgtgagcttagtccaataatgaggtatatacataacatacactgattttgggcccacggactgagacccaacctgtaatgaccacttagttttattttgagaatgagcagataattagagtttatttatgaaatagacttattattattattttgaaagttatggagatatattttaattctcggtgtgctaattatgataattatgaattttatatctttcatatttttatgctcgataacagtagaatgcaacgtttggcctatagagtcagtagataagattttgtctcttagttttagcgggacattgttgttggacatttagaatgttagattatttttggggttatggtttaagaccattttatccttatgtatgttggtcaccttatatttagcaagagggtagttatgtcattttaccctacttttgtctcttatggttagtggattattactaatccttttattttaattttatgctgaaaagtgagttaccttattgataacacttacaagataaaacacaaactaagaaaaaatcaaacctaatcctttctctctctcccttttgctcggccacacctagaacccaagagaaaccaacattttgcttcttcaatttagatcagttcttgaggttttatgttgatgtagttcaagtggtaagatctttggtccatttcttttaagtttattcaagaaaatttaggttttcgtgcataaattttgagttagggctgttgtacaaattgcttaggtttaattctgtgtttttgaagtttttgtatgctagattgagtgattttaaattttgcttgttatggagcttaggtaaggtttgagcttttgagctcaaacttttccctttaatggaagatttcattttaggggctttataattgtttttattgcttgaaatatatttgttgtggcctaattaggtggtttgaagagtttgatacgatttgtggtaaaattgagttgttagtgaagtttttagggttttctacaagaaaccaattaactggttgggcagccttgtagaatcgattaactgtttccccaggcaaaaccctaaaaaccaattatctattttggaaatctggcttactggttatagtagttttggaatcctagtttttttgtgttttaggatatttagtatattttcacactatccatcgatagggaaacttttaattttgattttatgttcccgaaaagtaatttagcgtatcacttatcaattttgacaaatgttgtgacttaggggcctataaatcatcgagcagcaatttctattcaagttgatcaacacacctgaattcagaatcaaggtaagattagtataataatatgcatatatgattacatatttagcgtgaatatttatgaatgcctgttagataacatatcaataatagcagtattagtgtacatagagttacaatgaataccaacaaatatatgtttggcaattgattgatgctattacatcagtacgattagattactgagtataggctgatattgtggtcaatagtattgtcgtacgaacgttttagactcagtactcgtgggatgcgggataatattatgattgggtgcatgagggccttataattcgatttaagcttatgttatgattatacttttcttacggagtctatcgactcaaagttactgtttacatgtgtaggtaggggcaaggctaaggctgagtaacattgagtgcaggcagataaagattgtacatattttagaactggagtgttcgatcttcggggtagcaggctttattttgacagttgtaaggcgaaaacttttgttgtgatatgttttgtaaaatagttgtaattgtttaaagacgggatcccgaattatgtaaagtttatttatgtaagtttaaagttaataatgaaaagtgttaatcaaacacaattttcaataaactcgttggttagcaacagatcgaacagttagtatttaaatcacgataacacgcctaatctagtagggtgttacacaacctatggggcgaaggtgatccttacgcttggggaccacgagatattgactgatggcatgcatgcgtcttctttgtgtactgttgtgtcagaatagtggtcgtcaaataaaatggggggtttcctattggtggtgtacacacacttagggtctaacataagagacaatccctaatttagtgtcaaagggctgccatgtcatcctggactaggtttccgggatgcctcttggaatacccctccaaatgtatcccagatgctcatctgaaaggtctcagctgcttctttttattcgtgcaagatgcccttctggatattcagagagatctggtctcagatgtaaatatcttaagcctcggatgggcatgaggcccattcttctgtgtaggttgtgcccgttttcttggtagggattttgatagagtcttagatggtgaattttgaattggaaatgccacgtgacctcttacaaaaatacgaataaaaatacttatgatcaacacaaaaatctatttaaacacatattttattatgatgaaagactatatatactataataatatttatatataatttttttttcatcaatttactttgttaattttttttgggattttttttttatattttaaagtaattttttttttgtattctcacgaatattcatatagcaactcacataacaaccaatggagcaacctaaatcccaattaaaaaccacatagtaatctacatagaaattaccagagcaacccaaacaataaattttaaaaaaaggttagaaaataatatataggataatttcccattgttgttcttctactccaatctctaaggtcctctctagcgcatactatatttggtgctaaaattcactttatcattttaaatgtttagctatagtacacaccaaatattatattatatttaataaattttaaatatatagatatattaggaaaattttatggtgctcttcctaaaagaaaagtattgatacatcctcgatctgtttcaacataaaagagattttttacatttttttttcatactgttataagacatcttggaaaattttaaaaaattcaaaaaaaaaattaacacgacaaaaataaagttcaaacattatcttgcatgcgtgtctattttattttatacctgtgtgaaatataataataataaaaaaaattatattttcttataaaataatataataataaaaaatattttttatggggtaattgacggctaaatcttcttatattttaattttatacactaaatttactaattttttgtgacaatactacctaatttgatttttttttttgcaaatttaaagggtcaattaaattacacagttaaatactaactggattgttactgtgtatatatgtatatacgggacatgtttttattagtttcgatattttaatatcacgtgcacaataataatcacagttggtatttaacaattgaattcaaatttgtagagaagagtaaagttaagagggtattacaataaaaaaaataataagaggttaattaaatttataaaaattaaagataagtgaattttaccgctaattattttttttatgtgtaaattttagtattgtgattagaataaaagagattataatatcatatttagtattagtgcaatactaatactaaatttagtgtctaacactatgtttggtgagatagatgtagaggataaaagatggagagttgaaggaggatagagaatataagggagggagagtatggtagttatcctttcaagttgtttggaaagaaagatggagaggttattactatatacttataaaattattttaagctaatagtaattttttcccccgaactnnnacatgtactaaatcatgccccttgaatttttttggccgttanaaattccccctaaactattaagattgttagatttaagaacttttgtctaatt

SEQ ID NO: 37206 - DNA, 2857 bp, Cannabis sativa
attgtgtaattaatcaagctagtgggcattcgttattaattaatcttttatttttaatcaataatataggtacatagatgatgtttatgatcgattttggtcaccagtccaaacagaggtgtggaagccattaaatgtttctctcagggatgagaataacgctatgtccatgaacttatatgaaccaccgtcggctgtgatgagcactgcatatacaagaaataatagttatagttacatgggaatgaattggatagatttaaatacttcttccagatatttcttctttatgcactttgcagaactaaagaagctcaaaaataaccaaacaagagagttcgatatcttcatcaatggaaacttgtggtttggaccactagctccactctacttgaggcaaaccacaatctacagttctaccacgggcatcagccctgacactgaaggaaatattcagattttcattaacaaaaccgcaaattcaactctaccaccacttataaatgccatggagatttatgttctcaacgagctatcactgaaagaaacagatcaaacagatggtaatctaattattgacaaccgaaatataatgtacaattttatctctattattacaattaatcacttcacttttaacgttattgttaatttctttttttctgttgtgcatgtacaaatatcatcagttgatgctatcttgaacattaagagagtgtatggagtgaagaagaattggcaaggagatccttgtgctcctgtgacttacgtgtgggatggtcttaattgtacctatgcaaatagttcccatagaattacgtcactgtatgtctctgtttgactttgaggattttctttttttacacacatatatacatatatacattttttaggctagctctgtatcttatatctttatttgtttcaaataaaatcgatcagggatttgtcttcaagtggattagtgggggaaatttctccttacattgccaatttgaggatgttacaaagcttgtaagtatcatcatatcatatgacaatgttttttggagatttctttttttttactacagacccctttcttaactctttgctttttgtaataaattttggataatttattttcaatggagttataggtagagatgctatatatagtgagcttactttttttatttttatttttgacaaaattaactattatatatgatcaatctactactcattacagggatctatcaaacaacagcctaactgggatggtacctgaatatattggtcaactttcattcttaagggttttgtaagttaaatagatatttgtaattgattaattaaatatcttagtgacagaattattgacttaatatatatgtttgtatgcactctgtcacttttcagaaacttgaaaggaaacaacctcaagggtccgcttccagctttgcttcttgaaagagctaataatggcagtctatcattaaggtttgactttatatgttaaaacttttatatatgatatagtcatgctcattttaataaaattatgtattcatttcttttataaaaagggcttctttatttccttcaaataataaccgtaacaactaaggttaaggacttattttgatgcagtgctgaagccaatgtgatggtgaataaaaattcaacttcacccacgaatgaaacttcatcatcatcttcacttggttactggtgcaaaaacaacaagtttgttgttcccttgttttcaacaattggtctactatattttgtattatagcccattattggtatgtactagtactgcttggtatattgtgtgtctgattttggtcatgatgcacccaccatcaatacccttgttttccttatcaactcaaaagacccaacaaagacagtagtgtcatgcgtcgtcaagaaacactagttatctggtcttccttttacccaataaattttatgattatatataattagaaatatttgtgacaaaaataatactatttaaaaaagaaaaaatattcgcacactgttctttaattttaggattaatttatataagctagctattttacatatatttttcttataatttttataagttagaatatattttattaatttctttaaattatttgggtagtgcaacaacaacattatatcaccatcggtatttttgcaaaaaaaaaaaaatactaaacactatatttaattaactttgggtatttttttttgtaaaaaaaaatattttaaatgttgcactctaaagagcaactttgacgcaaatgtctcttataactaaatgagaaatatgaagtatataaatattgagcgtaaacaaacaatgtgatttaatttgccttctcttatttggtgcttcacaaactgatccttttcaagcagacatgattaaggtactatttcttacttacacatttcattttagtgttagatgcatttttgtcaaattaatgctagctggttgataatgagaagttataatttgttaattataattgttgactgatttgtttaatctctttttttcaccagataaacttgttaaggagaatatatatgtaggatggcaattggatttctctttcactgtttcttaactgatgttatcaacggattatcatacaggagtggttgataaaaaaaatgaaaaaagaaaaaaaacattaagagggagtagggacaagaaatagttgttatggatcttaatagctggaaatgtacataaatagttcaaacagaaaaaattaacattttagttcttttcagtttgtgcatatattggtatgtttatcaagaagttggggagattagtactaacttcttaaaagtttgtcta

SEQ ID NO: 37207 - DNA, 8514 bp, Cannabis sativa
tctctctctctctctctccattatctctctagggttttgctaccatgcaatcactaccatcacaagccatgcgccctttctctctcacacagtctcttccttctcactctcgttacttccgtttcatccctaactgcttccctattttccaccaattcaagtctcaccccaaatttctcagtatttcccccaaagctcctttattgactgtccgaaactgctcttccatttccgctaagccatcttcggagctccgcaagaaacgcgccaactctgagcccgacgagaagcttcgagccctccgtcaactcttctccaagtccggcatcgacgcctatatcgtcccatctcaggatgcgcatcaggtatggttttatggagttttgttttagtattctcaggatgctgtcctttgagatgtcttaattaattcttcaattgagttattatagtgttatatatccatagcaagaggttcttaaaagtgttttcttttgtaattagtttctatttttttttctaagtagagggaaagtgcccaaaagtataattttttgtagttatgttgaacactgaacaaaatgatagtgtttttttctgattagaaaagaaaatgttcttgtgtactcttttaagatagagctttataataatgcttatagcatgtcataaatgaattttctggagcagaagaagaaagggttatactaatttattttgtgttccattatttggtcccagagcgagtttattgctgaatgttatatgaggagggcctacctatctggctttacgggtagtgctggaactgctgttgtaacaaaggataaagcagctctatggacagacggacgctattttcttcaggtttgctgatttaaattttaatattatatatggtgagaaaatgaaactcttttttgttacatttaatgttatgtactttttattttattttatggttaatctggagaaaccttttgttctctactgtgtagatttattaatgcttcttcttttcgttattaggctgaaaagcaattaggttctagttggattctaatgcgagctggtaatcttggagttcctaccactagtgaatggcttaatgatgtattagctcctggtgggagagttggcattgaccctgtgagcaatacttaaatcacttataatgcgttcacagcttttgttgctcaatggctctcagaatagctgctcacacttgtttttatcaaagtagttcttttaataattggagtatatttgattgttgaattcctttttacctggctgtttcatgatgtcactctttattgatattgtgaagggagcagttccttttttcttgggatgcagcagaggaactgaggcaggccatttccaaaaagaatcatgaattggttttcctatatgataccaacctagtggatgaaatatggaaagaagctagaccaaagcctccgaacaaactgattcgtgtgcatgacttaaaatatgctggattagatgtggcatcaaaattgtcttctttgaggacggaacttgccgatgctggatcatctgcaattgttatatccatgcttgatgaaattgcctggttgttgaacttggtacttcctatgaaaacctcatgctttattatatttattagaatttattaaatgatcttttttcttttcttttctttgtttttttttttgagaaattattaaatgatcttttgcttctttgttttattgtcttaccccacatggttaatggattttctaaattttatttgtagagaggaagtgatgtcccacattcacctgttatgtatgcatacttgatagtggagatcgagaaggcaaaattatttgtagataattctaaagtcaccccagatgtgatgaagcacctgaaggatgctgggattgagttgaggccatacgagtccattctctctgaagtagaaaggtgagcctatggtgtatacattttttgcatgggtaacatgtcttttaagaagagattgatctgcaatttcttatgaagaaaaatagtctttttttttttctaacaacacaaagcttcgatgggtttcacaatttggcttgtatactgatctttacgtctgtgtaatgcccatgccatttcaaactcagtcaaatgagattgtgtaaactttttcatgttctagcttggcagcacacggagctacattatggttggatagatcttctgtcaatgctgctattgttgacacctacaattcagcctgtgaaagatattatgagcacctagagaaattagataagactcagatgaatgatgacctcaatggttggtcagctgcccctgctggaatttatgaaatgtctcctgtctcttatgcaaaagcaattaaaaatgatgccgaattagaaggaatgagaaactgtcatttaaggtaaatgttccttccagcaaactttaaatccttgatattcatttcggttctttgccattatttatttggtctttaatatatcaacgataacaacgaagtacagcctcagtgtcagatattccttaaatttaaacttggagctatatttgctcatataattctattagacaatattaacttctgcaattataagatgagattagtgactgacaccttggagaaactttaaaagattttgtaaacttgacaatatacttgcatgtgttttctgtgtttggtttaaatgtttttgttccttaatatgctacaacttcatgttgttaggaacataagactatgatatctttgttaggaggcataagactgataactttgcagggatgcagctgccctagcacaattttgggcctggttggaagaggaaattcacaaggatgtgaaattaacagaggtggaagttgcagacaagcttcttgaatttcgttcgaagcagagtggcttcatggacacaagctttgacactataagtggtatgtcaacatctgtattgttgattatatctcagaatgtgttgcccgttaatgtagtggctctcttgaacttggaagtaatacatttttgtctatgatatgctgtctctttctctttctctgtctgtctttatctcttattctggaatgcaaacattgaggtcccaatttgctcaatctccctggcctcctctcttttatccctgtttacatttctgaaatacatttgtgaggaaatcattaatattctttttaggtataatgctgattctatattggaaaagggtgtttttcctccttttaactgcttatatttttaataatgtttcaggttctggtgcaaatggtgcaattatacattacaaaccagagccagaaagttgtagtatcgtggaagcaaataaactcttcctattagacagcggtgctcaatatgttgatggaactacagacataacaaggaccgtccatttcactgagcccacagcacgagaaaaagattgcttcacacgagttttaaaggtatccactaatctgtttgattacagtgatatttaattcatttcatgcacgcttgccatcattgtataattatatattcattgctattttgtccactgattttctaatggaaaaaaaggggaacagaaaacaagtggctaattgccaatggtcttttttttttaataatatatacatacatataaatgaatgtatctgtgtatccaattgcagggtcatatagctattgatcaagcagtattccctgaaaatacccctggttttgtgttggatgcatttgctcgttcatccctttggaagactggacttgattatcgacatggtattacttcacttctcttgcatgccatgaaaattttggggttgcaatatatttatgatttattattagttatgctgaaggttatttcattttactgtcaatgtttaaggaactggccatggcgtaggagctgcgttaaatgttcatgagggccctcaaagtattagttttcgatatggaaatctgactcctctacagaaaggcatgattgttagcaatgaacctggctattatgaagatcatgcctttggaattcgaattgaagtacaatgtctaaaatttggcctcttttgcgcacaatgatagccttactctcttgtagctccatattgatttgtgttttgtgctcatgtacagaatctgctctctgtgaaagaggttgatacaccaaatcgttttggaggtattgaatatctggggtttgaaaaactcacatttactcctatccaggtacgatagatatctaaagcatcatcttgctgattattttttctttccattattcaattctttaataattttgttatcgtagtatttctgaaatatagtcttcgtacaaaactattttgatggtttcaccatgcaggctaaattgattgacttgactttgctttctgcggaggagataacttggcttaatgattaccattctcaggtttgggaaaaggttaggataagaccagatcccattatcaatccttcattttttgttctttacttattattgatacatatatgtaatattgttttgttcctactttctacactaatcatcctaatctctagataaaaacataaataaagtctgcaagtaaacggtagaatcactattagcacttatcagaagggatttaatcttctttgtactgttcttggctctggtgtttcttacccaataagagatgaagcattattaaagagagaatcactaaaaagaatcgctaggatacaaaagcaagaaagttacatcaatgagaatttcttaattatttcagttttcactcctagaatcaaaagctaatataaggtctgataggtctccccattgctggagggttccgcacatcagtggctctggaacaacactcgaccagtcatcaagcagtgattattctctatccctgtgtatgtgctgttaaatcttggattctgttcttatattcatatcattcatacaaacgaaaatgcttttatttaactatgggcaatgagaacctgtcaaaggaaaaaaaaaaaaaaactatgggcgatgaggagaaaaggaatattgtagcttgtacagtacagtatgttgtagaaatttatggtgtgagagggtcgattagtccattcttttaaagttataacttataagaaccacttatatatatgtacctaaggagctctcatttgctttttttttttgtgtgtgaacttagctaatgatttatttgtgtattgaattttgaatagtttgaaaaggtataattatggaatatggaatgcgtctaaagaaatatatataaaacgagatcttttccttttttaaaaacagtaaggatattgttttcgtaagttattttgaaaatcgacactgagattcccaaataaaaaaagaaaacgaaaacattgcagcattcttaaacggtaacaggacactttgcttttatacgtcgtaacgatcttggaacataaaatcgaattctcttttcaacctgaaaaatatattttatatatggaatagcaatggcaacaatataaacaatcggcatgtgcaattctcatgttgtttcttcttcttcttcacattaaactttgttacttgtatgcttaactgtatttaattccatgaaaagccaacaaaaatcatttcctactaaaactatagaacttaagggagctcgagtttatatcttgacataagaatctttctcctataatgcacttttttatttacttctgcatctcacataaatacacagctcttcaaacccatttggtgaataccccaccaaagagcatgtagaactaaattaggggaaactagagccaacagaattacattatatttctgtcaactcattacacattttgcaacgtcggatcagatctagaaagcttgagctcagcacgcatttcacaatgttggatcagatctagaaagctcagaatacatgtctgaaatcgctttagcaaagtataccttagcttgaggtctcttaatctagcaaatcaaatcagcacactaatacccttttgatatgctatgagacaagcatttacttactccctatttcttggcattcaaacaagggattccagaagaagaaagggaatacaacaacaacgtaccttgaatgtgggagtgagaaggccattctcaagagaaagttgtttaggaatcaaagttacagctttggcaaattcaaatcctctcaactgtggtcaatagtagaacattaaactctattgcccaattttgcaatctgaagaactaaacatagtaactaatcacacacattacctgagcttctctgccaatggcgtcattttctgacagaacaattaactttgctgttggattgttgcatagttgtcctatgtgttcatactacacaaaatcagtcatattcaatgagaaatttaaaaatgaaattgcttggtctggcatacctaaagaaggaaaagttcaattataaccatgtttttgtaggtcaaaactcaactaaaatttggacggatagtgttacccaatacgttgcttgttcagtagagatagattgatgtcaaatggagttcccgattggcactcaaaccagaaaaacattaaactatggattacaaagcaacccaacacatattaagatatttcagagctcaaaggaacaaccttgacaccttcagatgcagcccactctttcaagatgtcaggatccactacaactacatctacttggaaagagtttaagctatcacctagaggggtaaattttcgtgagttgcagaaaatacgtaactgcctgtaaagatatgttcattagccaaccccccttaccatatataaaacattgagcggcgaatttgcatttggcatagacattttcaactttctatagagctatatactctctttgcgccaacttaaatatttttttttcctgtgaagaaattcaaaatttagctcagaagagattaaatacacaagtccatttaatgtggttggaaaatctcaggctacttgactagataagaaaaaccttgaacattcttaggattagctttggatgaagttagttaagggttgttttgtttgttacaaattaacattacagctatacatttttgttgcagcactggttagtccttactaaccatttcttgattgaattgagctatataagctcctttttcccatctgtaaaatcagttcaggataataaaatacctaaagctctgattttcttctgtttttctctctattctttctcatatggtatcagaagaactcaggtcctcagcttccatggctcgaccaaccactcgatcccaagatggcactgcaccatcgacgatcgacaacaacacagcagaagtcaattccgactccattcctgctcccccttcctcaacagttcctcgtcgaatccctcctgttcgagttcaatctcagaatgcagatcaaggttttcatgacaactccaccattgctaaagacaactcaactcagactctccactcacgatcggttggtgatgatcattccagcccgttattcctcagcaccggcgaccacccaggtctggttcttgggaccacagtcctcaacggaaccaactatcagccgtggaaaagaggtatcacaatggaattgacggccaagatcaagatcgcgttcatcaacggatctcttcctcgtcccgaacctagtaacacaaatctaaactcttggttaaggtgcaataatatggtaatgtcttggttgattaattctatttcacctgagattgcacaaagtataatgtactttgatttagctactgaaatgtggagcgatcttgctgagcgtttcaatgaaggaaatggccctcgaatttttcaattacaaacacagctcactcggcttcagtagagggtgactgttctgtttctacatatttattttacgaaattgatgaaaaaatccctttgggatgagttgaaagaatttcaacccataaccacttgcacttgtggtgcaatgaaagttttcttggattcttacaaccaaaatcaagtgcttcaattcttgactggtttaaacgaatcctatgcttcagttcgtgctcaaatcttgcttaacgaacctataccaaatctgtcccgagtgtttgcaatgattgttcaagaagaacgtcaaagatcactgggaaattctgattctcttaccttggctgttgcatctagctctaccaatcccccaagaaacaagaaacctagaccttcttgctcaaattgtgggaaactcggtcatcttgttgacaagtgctatttcctccatggatttcctcctggttatggggacaaaagaaagcaagaaaaaggcaaagccaaggccaatgttgtaactgccaacaactagaaaatgacattgatagcagttcgggtcacattgatctatcctctcaatgccaacaattaatttctctgctgagccagcaactaagcaacacaaccaatgcagaaccacctgc

SEQ ID NO: 37208 - DNA, 1676 bp, Cannabis sativa
ggggcatgtttcacttaatgcaatagctaagatgttgcatactaagattatgataaacgccatcttatttgcccaaggaatagaattagggctgatgtttatcactgcaatttggctttaactcggagtaagttagccaaagtatttgtcccaatctttgtatacatacaaatatataataagtattgaactattgtatcctgtaatcaagagctgagttaaaggtgtctgcttggctccctgtgatcatgtagttatttatcattccagttgacattgccagttagtaattctatgattgtttctgagacaccaattcatatcctgcttttgacaatttctttaacttgtttttcagctggtcccaaggataccccaatggatgttgtgatggagaagacttatgatgcaaaaacaggacgaggcatgcctgatctttgaaagaattacattcttatatagttttgtcattgaatggaaccagggtgaagatgttgcagaaaagtggccatctcaaatctcagttgtcgccaagttacaatttcagttcttctaaatttgtactctgcttctttatgcctattatttagtgttaatgttccagacaagtaaataatcagattgccaatttgttctctgaccttttatggttcgatacgctactttcacttgcatatgtgcctttactacgcagtgtgttcagtatattatttatttattcgaccatatgtcatcagaaaagatagcagagtgttgctttgtttgcatttttatgtgtcttgttctatggacctgggttacattttaggtcgatatttctaaatagtaaattctccataaattattagatttaatactaataaattaaattattttaccagttacttatttgttttattatgcttcactgagttatcaatattaaatatatattataaggtttccattttgtagaagcaagcaataaactcttatttgttcaattgacaagactttttattaccaagaataatgtatgtaaacagtactatattatttacaagtgaatatgcatatttttcattttaacacaaattagctaatatatgttaggtagcaaaggaggtatagttgaatatatgttttgttaaaagcaaatggaactatcaggaagtccaatatattacaaaagacacttcctttcaacaatatacttcatgtacacagcaagttatgggctaatttttgattagctacttagctttatttataacatgctctgggctttttattactatttatagccaccaccaatggtaatattgatatttaatcaagcttattttccacattttttttaatattaaaatgttacttttagacttttagacttttagctagcaatgctactatgaaattaagcataccaaaatttgtttttaaagataccaaggcgcatatccttatgattacaatgaatgaaacataactctgtctaacaggaagatttacacaacattatgtggtgagtcgtagcttagtgtacctaagaaaaataaataattaatgtgatcattttccttttaaaagagggaaggaataaacttgaacagactccataaacaaagagcatatgagtgaacaaacttattgatcaacggctaagttattttgaaaagaaaagcataatatgatca

SEQ ID NO: 37209 - DNA, 1671 bp, Cannabis sativa
gtataagattttctcttttaagtttgggaaaactattaccatggaaatgagattactccatatggaagaataatcttaaatcctttaaaaatagtgggttctaaacatttccttcattcataatacaatcgatttagcatattaaaattttggaaatttctgtaatagacccccttaaagggttgttctggtagatcacttatctgtttcgacattaagttggccttttagttttttttaatctaactaaaactttccatacacaactaaacacagttataagttttcagacaatcgtattcaattctccgctttaatatcaaacacattgtaaaagtaatttaatgtggctaagaaaaagccatgaatatttggatgtactacaaagctttagaaagttgtaccaaggtgttgatgaagcttaggatcaacagctttgattatttgagacagtgtacacaactgagcttgcacacctatggaacttgagctgcacctaaaattttccctctgttatcaaaacaaagacagaaaaaagtctaaatttttacctaaaatgcatacagaaaaagcttcgataatgaaagggatgatctaaagcaataccagccttcgcatagctcgttcaaaacaccaaaatgcgtctgcttcatcatcaagaagtattaccattggcgagcaaatatcgttcattcctgcacaaacaaacacaaaccgattgtaattgtctctcataactgtctttagtttttgatgtaaaatgatcatggaaagcacaccttgaacataaccaatatcattgtctagccaagcataaacagacagaatatcccaaagtttggcttgatgagcttcgttctcataaaaggcaagtgctcgatctgttcgggccacatctaatcctacaatccacatcagatcaataatatacatgttaattgatttcataaaacacaagcagaattctgttgagacaattgaggtagtaattcaggtggacttgagctcaaaatgactgaaataatgatagttatgcaacacatacacacctatttgatgcaataaaagcttccattgaatcacttttttgtctgaattgatagaagatgtagacataacctcacaatcactcattttatcgatagttgaatcttccattggtcggccatcatcagtaatgatagctgcggtgatatactttccactaccgataactggaaccattttttggcattcagctttccatgagccatactgctccctaaaatgaacgatgtgagattaaacgaggacaaaaaaatgctgatctttgctcccattgacatatgaaaggcagaattttaaggacaggaaaaatgtaatctttagatcccatagtgcaagtaaagcaagcatttagccatcaaagcgtagcaatctctttctacacccgaaatattgcagcatagtataagatacaacatgaacccaaccccccacttgaacactatcttggatgataacaaagaagccccttaagatgtctaaagcatattttaagatcaaaatacagttaaacaaataccttacctccgtcgctgcttaaggatatttcgctcttcaaaggtgctatttggatcataacaacctaacaggaattcccatactgctcctttaatcgaaggatgaacg

SEQ ID NO: 37210 - DNA, 3411 bp, Cannabis sativa
taagaagaataagatctgacctgttccatcattagcgatatcaaccccatcaaaactaagaattacatcagaaggcttcagaacattagattctggagctgtaggctcgattcttctaatacggacacccttctgatcaggtcccatgccaatcgacgagcgaagatcaggattttccatcttctgccactcaactccaagaatcggaaaccctgataagaagagtaaatatagtcatgtacattttccttataggagacggtggtgtaaactcaagagaccaaaactacctgtatatgcaccattcctctcgtaatctttaataaagtgtgtaatgacggttgttggtatgacatagcctatattctctacatcttcatgttttagtgactgaaatgcaataccgacacagtttcccttgtcattgaatgcaggcccccccgagtttccagagttgatagcagcatctatctgtagaaatgaagtgaaatgaggaaatgaagaaaaaagataacccagcatattgtaaggacagatgaaatattgagtgcttcacctgcaaccccaaaagctcagtcgatccatgagcataagataatatctccatacgtgatacaactccacttgtcacagagattgtatcacccccaataggataacccacaactgtcacagcatcttgaagcgcggggagatctccaaactccaatggtgaaacaccttcccaaaactcatcatcactcacagacagcattgctgaagcatcagcaaattggaaaggaacttcttagttacattttaagtgattttaatttttaagttcgcattgaataactgactgcatgaataattgctatttaatttgcatgttcacttacaccatatttaatgcctttcacagacaaggcaaccagaactaactcataacttccatcgtaataacacgttttggtcaaaattacttttctttcctactaaactcagtataatctcaataactatgacatggaatgacgaaaacttaacaaaccattaaccaaaaacaatgtttaaactacttaaaaaataaggaagaaaataaagaataacaggattgttaacttgcataagatttggaaacatgtcacaagcacctgaagaagttcagtaaaaggtcttttctcttaatgtcaaatctgataaattaagaaatgattcaataagaatacataacaaattaacaatacagtgaaacttcaaataagccaataaaataaaagaacgaaagaaagcaaaacaaaatgaaatagaacgtaaaaaacatgaatcatggcttcattcatcattccattaccttctttctcaaaaggaaaaaaaaagaggcctgttctcaaaagtcaaatcaaagcaaaccatttactcagtttcttgatattgttgtactataataaactacatcctagagtccagaaactcagttagctgaataacaataatgccaagctaaaaaaggatatctgtttctgatttttgtaaacaaacaatctctttaacgtgtattctgatcacactcctaccatttctgatctttgcaatcaaccagtgtattaaacatgtattctgatcatactccaaccatttctggtctttgtaatcaaacagtgtattaaacatgtattctgatcacactcctaccatttctgatctttgcaatcaaacagtgtattaaacatgtattctgatcatactcctactatttctgatagttgtaatagaacagtttcttaaacttgtattatgatcacgctccaaccacaaatagctaagtatgtaagggaaaatgctactaattaagtagttcatgctagaaaaactcaaaaccatagaccgtataaccaaaaagaacaaaaatttacataccaatatcacattcggtcccaatagctagcacagtggccaagtacttggtatcagacccacgtttcttgagcttaacctgagtatgatgctccacagaatgagcattggtcaaaacccttcttcccccaatgatgaacccactactactcgagctgtactgtctcttcctctgccatggcaacgagaaattcggctccgtgtgtacgcagaacaccttcaccaccgcgtccatcgacggaacaaccctaacaacattttcccacttcggtaccgttagcgacggcaccgccaccacggccatggagtgtgctccctcgccgttttgctccacgtgtctcgacctttgtttctccttctcgacctgttcttctccctttcttggtcggccacgggaacggcgcgatgcttgggtaccgccgagatcggaggtttcggaagtaggaactgaaacaacgtcatttacggcagcagaagaggtggtagatgtggtttgattgttgtactgaaaatccatggtagtagtggtatcgtttgctggagatttgggttttcgacctcgttttcttttgttgtcacccattttcaacagaatgaagaaatggaaatggaaatggtgttttctgggtttttgagatagaacgcagtgtcgcttgaaaaattagagctttgtgagtggagattcgagaatcaggaatctaccatcccctgaaatcaatggcggtagcggaggacgaacagtatgcggagaaggaggagaagtgatggttgggctggacataggtcagacgaaggcccatttaaggcccgtttaacaataacaacccaaaaagatcatttacatttttatacactaaacaaacatttcttttttgtttaagacactaaaacaaactttttttttattattgaaaatgaaatatcaacttcattgaaatttagcatttagcattcatcatacaaaagagcatgaagctcattaggaatatcattcctataaatgctacaatcagagaaaaaccgagagcgcctaacaacaaagtgagcagctcggtttgctgatcgtctaatgaaacaaacacttacattatttaaacctaaaaataagcttttacaatcattaacaatcaaaccaaaagtagaagtcatgtgttgattactaaagattgcttggaccgtgacgatgctatcagtctcaatttcaacttgattattaaagattactaaaacaaacttaatcatagatatgtgttataaatatgtgtgtcagactagctcagcacatattatttcgaatcgaccattttgaaataggttaattagtatttttgtctcacatgtattaaattatgctcctgaatttttaagattgttaaaaatgcttcttgaactagtaagattgttgaatttaacgacttttgttcaattttagtagaaaaattctaatatggatgaaagttcagggggatgatttaatacatgtcaaagttggaggagtatgatttagtagatatc

SEQ ID NO: 37211 - DNA, 4107 bp, Cannabis sativa
aattttatcatcaaatttttaactaaaaggatattttgttaatttttttaataaaaagatatttattaacttaattgttagatggaggatcattttgcatcttggcccttaataaaaaggggcaaaagttccaactttactaatgggcctagtatgctgttattagccgaaagtttggaaaatagatccattaggttcattaattaaaaatgggcccatagcttacgtatcattaccgaagcctaaggttaaccctgacttcaccgaatacggcagttaatcatgaccgtcaattttacaagaacaaatcataaccgttaaccatgtcggctccttcgatataaatctaatctttaatcattttctcactagaagagggctgtttcgaaatttgggtcttagtctttgtgtttgtttttgctattgaaggtgcttcatctcctctaatttctccttttcattattcatttttttttcttcgtaattgaatgttatagaatgttcagtaatggtagatcttgttttgtttcggcgaagctgataaatagaagttaattagggttttcgcttttatgaaatttcccaaatttgagaagaaaataactcaatatttataattttaattcattgagtctgtgtgaaaccgggttttaaattagtagcattatattaacagaaaaaggcaaaatttgtatttgcagattgaaaatgcctcgttacgatgatcgatatggcaatacccgtctatatgttggtcgcctttcctcgaggacgcgttcccgtgatttagatcgacttttcagccgatatggaaggtatgattcttgattcataatctataacatggcttttcgtatatataaagatatatatttataattcagtagcttgttcgttattttctgcatgtgtacgtgtgcttataaatcatcttcagtgttgtgctgtttgctagtgtcgattgttgagaacattatttgtgcatcaaacagataaccttgacttgctcgtaagttaatcagttagtaagagatatggggattttttttccaccattgtggtggggcaattggatcttcgccaagcatgatgcggtgcttggtttaatgtgactatacatgttatatgatggagctcttagctccaaggtgtcagtgttttttttaacttgaatgattttgttgaaggtttctgggggtttggcctaacctcgaggtctttggtgggagggtggtggccttggtggaaattcttgccccgattgtataggagtgactttggcgattctttctgtaatgttattgcgtgtttttatgcaaatggcaaccattctcaaactggtgtttagcttgtctctgacgggcaaagtatcataaatccaaatcagagtttaagattgatgtatgatgcttactgtttctggcaaccatttacgcagagtacgagatgtggatatgaagcgggattttgcctttgttgtaagttctacttaccttaaatcagatgttgtgttataggctttgagaatgtcagttgttttttctaattaatcatgaaatgctgtttataggtcaaataatgcactgtgtgctgtttgtttggttttttgtgctcactctcttgttaacaggaatttggtgatcctcgagatgctgatgatgcaaggtacagcttggatggtcgggaatttgatggaagtcgtctcattgtagagtttgctaaaggggtaaggtttatgaaccaaattgatcaaatgtaattagtttttaaggtcaatttttcccaagttctccagaagattgttttagttttgtaatttaccttgtcaacttatataaatagaagaatgattttgggggaattatagcatcaatttgtcattagatatattttcagtaaataacttattgtttatctttttttcttctgctctgattaggggcctcgtggttctcgtgaatatctaggcagaggtcctcctcctggatctggacgttgctttaattgtggtcttgatggtcattgggctcgggattgcaaagctggtgactggaaaaacaagtgttatcgctgtggagagagaggtcacattgaaagacagtgcaacaatagcccaaaggagctaaggtaaatcttgtggagacaaatgcagcgtttgttatttcataattagtagctagttagcatattttatccctcaattctttaaatttgtattgcaggcgtgggggcagtctttcacgatctccagttaggtcacgctcacctcgtcgcggtcgaagtcccagtcgtagttacagcagaagccatagttataggtcagatatcttagacattcaactttgttccgaccagatatgtgaaagcatcatcggtgtagtatattgtttttttaactttgtctcttttgacagccgatcaagatcgcctgtacgaagagggcgaagctatgatcgtgatggcggatcaaggagtccagtcccttccaagactaggaaacgcagtcgaagtgtcacacctgatgatatcagccccaaggcaagagatagcatctctccaataaatggtagattggctgatgagcaagacgatgactatagtggtagccctagggcaaggagcagaagccccatcagcccggaacgagatagcccagttggaaggaggttccgaagccccaataaaaccaatggccgcagccaaagtccaaatcccagccccagccccagccccagccccagccctaaggatgatagaagtcctgttgatgatgacgatgagaaccgccgttctcctcggaggggcagtgaatcaccttaagcgagtgcaaaagccgttaaaatagatgtttcattagtcatatttatgtttggaaacatactgtggttgccttattatttagcaaagttacttgaactgcgtacttgagatgcttagacttttgaactattgaacattcataaatgtgtctttttatgtgttactttaatagctaattttcagttttgcttgtttggcagtgctatctccgattgggtcctgcttgtattattcttcttcacgtaattggtgattttggaggtcggtaatgtctgctactgcctccaatcccgaccgaaattcgaatgtgaagaaggttggatgagtcagttcaatgtaaatgccccaacggggtttacttaaataaataattaggattagagatgcgtagaagactagtgggtgttcagaaaagttttttaattcattatatttatgattgttagggcattcccaaaataatagttagactctaaaaagtttaaagagtcatcaataaaacacgctctccaagtattgagtgaactaaaatagcgtccaagagcacccatcagcaaatctttaaaattaaaaaaaagaacgagtgaaagaatccttccatcaaataagtcattttatcttcattttacatatagctacaggattttatcttcattttacatatagctacaggattactgttcatgcttcaaactatattttattaatttatcacttattctctttcctttctctattttcttcattttttctctctgcttcttcgctttcttggtgccaaacatagaaacatactgtttgtacttggagagaatttttttagggcttttattttggtaagattatttttgttcttctcttttaaactataaatttattatgtatttcttgtttctgattttggtttctaatgagtggatatttctttttttgttaaatttgggaaactcacgaggtgggtattttccgttttttttttttttttgttgttgatttaatgttgttccaaagtcctaataaattttggttttaattttctccgttttagtttcattttcaatttggagagctagataatttctactcttttcatgtcaaattgtgatcatttaagcacatataggacatttctatggtagggattcttattttgtccctacgagtgaggacattttattatacctagattaagaatctaagagtgataagggagtagggtatataaaagtaaatgtagagcttggtgtatgttaacatatctccttctcaattttttaataatatttt

SEQ ID NO: 37212 - DNA, 3238 bp, Cannabis sativa
ttcattattccgcatttaattaattatttaattaaataattaaactgggaatattaaaatacgaaatttcatacttgatttgagggttttctctcaactatttgttctgttgttgtaaaagactctctatttttatcataagagttctttttctcaaaaagtatataatgtgaaattttcttttatattactcgtgtgagtaatttggtgtgatttaaaaaaagaaaaaaaagaagaagattgatatcttttgcaatctattattacaaaaaagattgtctaattatattattccgttaattaactatgacatggccatgtggcttctctttacaacaagacaaaagtgtaatctaattaatgcttattgttataatttatgcaagtaaattgtttttgtcttcctactttcgattccaattacagttaggttcgacgacatataagaattattagctccgaagttgaattaacattattgtttataaaagtttttttatgtttagaatcctaccgattcaattacaaattagaatccccatttatccttataaaataataataaaaataaaaatcttccatttaaaagacaaatttatgttgtgatgtttctatattttagtaatttagagttacctttaaattatttataatgcggacaaagagtttaaacaattttttaggatacatataaaaaaatataacatagacgatgaacataaaaaatattaaactgaaaaattattttaaatatttcatgcaccgattaattcttctttaaggggtgtactaaagaattacacttacacttaaggatccacactactctatctcttcaatatgaaactattaatgcatttctactaaatttcatgttcttaaccacttgagatgagtaaaatttgaagaagcaacttacgaatttccttcactattattttaatgctacttgtgaagacagatagtatataacctaacttttttctttactaagataaaataatatactaatgattattagcgatgattacaatgaatatgtagaaagaaagaaaaaaaagaggaattgacaaagaggttatagccattttcaatttcactaaattatgccaaatttcatttccttttccactagaactcttttgctcgagtttttcaaagtcattgaattctctaaacaaccctaaaggggtttatatctccctacctataaactatatgaagttgaaaatagggaaattatttatttatttattaaataaacccaaattatttgggctgttaatattcaataatattatatgaaggtggatgaaaattttgactagaactagacctgctgctttctgatatttttcctttttggttggcaaaaatgttgttaatctccaacttgtctaaattttgttgaaaatatctgtcatgaaggcttttctccattccattatacgtccacgtgtacaaataatgtagtatcattttgtttatttatttatttatttattattattataatgttgataaaggacagacaagcacactccaattattagtgaaaggcaacccagtctagcaggagcagcacccacctcaacctcataattaataattttatataatgaaaaggagaattatttatcatattcatactcatcttttaacccatttcaaaaaaaaaaaaaaaaattactcatcttttaacaattttattcacgaaacctctccacaattattttaattttaattaaaatccaattatatatatagttaattaaaatgaaaacaaaaactgtgtagaaagagattatgttatacagtacctctcaattatattcatgctttctttttataatacatatatatttagataaaaaaaattaataaaatatacaatgctgagaattcaactaatgcatacaaagtacaatttggatagcttggctattattaatttattattattattttagtttattatattttggtagtattttatatatagctattaatttaactgactagaaatttaaaaggatgttcgtataattaacaaagttcgcattttttaaaatgaaataagttagtgtggaatgttataatatatattttggactttgaatatgactttatgtatgtgaaacagatagatgtatataaagaagataataaattataggggaattaatttatatataatttttttttaaatttattgtttgagtttttaaagtggtttctctggtgatttctatgtcggttgctatacaatttttagttgcgatttaagttgttacactagtttcgtaaaaatacaaaaaaatattattttaaaatgtaaaaataagaaagcccctaattataataatatttgtaataatgaaaataaaacaacaatgtttaattgtttctttactaaacaaataagtttttctttttgcgcaaaatatatatatttatctgtgaaggattgagaaagtgtatatctaaattaaaattcataatcttgacttgggacattgattaaggaaataagaataaggaatctcatggaagatgtgtttattcaatttaattcgcactatttttacatatgacctacagtaagggtatgtttggaagtaaggagacatgggtggatggagagggaaggagggagaggagtggtgggacatggaaattctatttgtttggcatagaggattgtggaaaagagagggggagggggaatgatttacaattcatttgtgcccactattttgaatcctttctcaaatggaaggattgtactcttctttctaatttattttaaaattacatgtacaccatcataaaaaattatgaaaaaataaataaatggataataaaataattttataagtacatagtaatatatctctccaccttttgatttttctttcaaaacaacttgaaaggattactaccatactctctctcctttatattctctatcctccctcaactctccatcattaatcttctccatccatctcacaaaacatggtgtaagtgggaattttatattttggaattattacttttcactattaaattatttaatatttattaaataaatatattttttccacataactaacgaaataaaacaagttgctgttgttttatgtcttcaataataaaataatataaagaaaataaaaaataaaattttaaatgaagaaaaaaaaatgtagggaaaaaatgtttaattattatttaa

SEQ ID NO: 37213 - DNA, 2514 bp, Cannabis sativa
ctctctctctctctctcgctcttactcgtgcacctcactctctctcaagggtggtggtgtaatccttgtttctcatattcacagtgtctcatgagtggagtacacactatgatagtaaaattcattccttaaaattattttacactacacttgtcctattgtgttgaggattggtctgaaagacactggtataaattcttcacaaatcaattttcttttggattggatgatcgttaaaagatataaaaatcgaggatcccctgatagacattaagaggtaaaatttattttcatgtaatttagatataatttataaatatggtgagatcttgtggcttatggttcaaattagtttcatcataaattgtttttctaaattttttttccgctttctactctgatttggactatagaaactaacaaatagtacgagagatgtttctatatttacataaattgaatattttgaagtgtgtttttatgcatttgtatatatgtatgatatatgatgaatggatggttaatctatgtttgaatgtggattgttaattatatagtaaagtggttaaaggagcctatctgttataagattgttgaggactgttggctttcggatcaaactatgttggtgaagaagaagctcaacctttgtgcctctaagttatcgcagtggggaaaggaaattacaggtaacttccgtcaacgtatcaagcggtgcaaaacagagctaaaccagttaaagaataagagagactctgcttcgattcaggcttatatagagatgaagaaaaaattgtttgacatccttgatcaacgagaagtattctggaagcaaagatctaagcaaatgtggcttaaagagggagaccaaaatagtaagttctttcatacaacaacaagctctcgtaaaaggaataatagcatcactaagctgaaaaactcgcatggtatatggattgactgggaacacggtttggctgaggttatttatgagtatttctcagagttattttcttcgtctgatgcccattgtgttgaagttttggaatgtgttacccaaatagttcctgagatgatgaaccttgatctttgatagaccaattactgaggaagaagttcataaggctgtgtttgatatgcatccggataaaagccagggaccggatggtatgacacctgcgtttcaccaaaagtgctggcctattgtgaaggcggatgtggtagcctatgtccaacgttttttcgaatatggtgtactggaggagacatgtgctactgccaatgtagtattaatcccgaaaaagaagtgttccgattctatgaaagatttgaggcctattgccctgtgcaatttcatttataaagtgatcacgaaggttatggctaatcgaatgaagccgtttatggatactatcattaccgaatcccaaagcgcctttatccccgatcgattaatttctgacaatgtgcttatctcgtttgaagtccttcattatttaaaatggaaaaggttaggcaagaccgacttcatggctttaaaaatcgatatgagtaaggcatatgatcgtatcgaatggtcgttccttgaagctattcttaaaaggatggggttcttggacagatgagttaaaccaattatgagttattttagggttgcacacaggtcagattttttggtttttggatggtcgggttcggtttttcagattttgggtgttttaaatgtgtaaccgaacccgattttcggcggtcgggtcctgcgggtttcgagtcgggtatggcgggtttgctgcggtcgggttcggattgacacccgaatcaatatttacatagaaaaaaatcatagtgtacagtttaaatttctggacagcactgtaaacgaaaaataaaataaaaacttgtgtttatttcactctggtatagaaagtacaagtaataacttttatttttatgaaagtaaaataaaaaaagaaaaaataaaacaaaccaacgaagcttctttgttaagtaaaacaatttgaatatgcatatcaaataaaaagtacccacgtggcataagaagtatgacctacttttataggtggcagaggtaaagaaaacctctatctcacactttcttttcttattttattatccaccataaaaatctgtgcttttgttttgactttcatagaacgaaaatttgtgctgtgcttaattttcgggtttcggattaacacccgaaataatatttagcttattttaaaatctgaactcgatacccgtgtggagtattttcggattggagccgactcgaccacacgggtttttaattttcaggtttttttcggcagcgggtcggggcgggttgtcgggttttcgggtttgcgggtctaaatgttcagtcctaagttgtgttgcttcatatacatatacagtcatccatgacaatcatgaaatcggtcctattagggctattcatccgatccaatccgcactttttttgtcaaacaacatccaatccgcactaagtgc

SEQ ID NO: 37214 - DNA, 5439 bp, Cannabis sativa
gtcagtccagtagaatcaccatgtttggtgaatgttgacactagtgtagaaaacaatactactgaggcggctacagcagaagagagtgccgaaaagtcctcaatagaaggtggatgtgaatcacaggaaactgaagaaaagcctgaagaagatgaatctgtagttaacttaaaccctgataccaaaacagaagaaaatcaaaccgatacagttcctgctgctgggcatatcgaaacagtgaaagattctactagtactatagttattgaggaaaaaccatccaaatgttggggagattacagtgataccgaagctgaggtcattgaggttgcaagttaaaagaagtgaagggttctgaatttttgttggatacaaagcaaagctaagtttttaacagatcacgaacgagtagatgtgagatgatactactgatgatgcaataaagcgatggtgagttattgaacgatgtcgtctgatgcttgtggcgacttcgagcctgtgcaatgtgaatacattctgagacaggttagctttgttggagaaccgaacgggaattgttaaaattagatgctaccgaatagtatttgaacgcggaagatttgttcataccatgactaaagaaagatcctttgaagtagttatttggtgacaagttttctaattatgtcttcttatttgttatttttttgtacttgttcctgatataatttgtttttattaaactgagaacccaaaataacctttttgaggtttagtgctttccatatcaaactcttagaaaatgttgttgactgcttggaaggtctcctctcctactgcaataaagtttcaattttctttctcaagtagtaataaatagtcttcacttcatcatttttgtctttcacattactcaattacttaaaccgtctacactgcataaaagatatggtttgaagccaatcctttacagtgcggttggaatttgcatttttgtcaaaccgcgcggtgcaatttacgattttgaatttaataattacagttcaaactgtaccacactatatgttaaaaaattattaatttttataatatgatttttattatatttttcatataagaacaaatatatataatatatgtgtatattacatcattttttaagagacaatttaatatatggtgacttaataattattatatataacatgttatgatgttaaaactttaataaaacgttttttagtagtgttaaaattttattagattaatttttgaatttttattacggtgtttgataatgataatagtgtaaaccgcctgtgccacactgtattttcgcggtatagtttttacagttttaatattttgcttacagtttaagaaattacaaaaacttcaaatgcggtttagtttaaaaaaaaaaaattacaaccctcatcacaaataccccaacattttatttcctttgtgccttcaaattaacatcaaagatgtcattatttctatttatacgacgcatatgttgttgcaacaaaaagaataaataaaaccatatattgtcatatatttgtcacgaagatttaaccaatttctagattgccaaactgaaacattatgaatgttcggcaaacaaacgcaatcgttgattaagaattactcacaattttatctttacttttttactttgagcaccaaaaagttcatatttaaaaagaccacaatcatgttaatgcaaattactgaacttacaagctgctagtagtacttgtagttgtaataacaaacaagagtagatataagtcaataaccaaagtaacaagaaagaaagacactcttctccaatgcgtcccataattgaagcataataaatatttaattaataataataataaacaattgaaaaatacaataattggagcacccaagatgatgaacacacgtctagattttttttttttttttttggttttccttaatatataatttcaagaaattaaatctacaaagccacttggagaagtaagtaccctgtaaactcctaggtggtggcctttcaacaacaaccaaaaaaaattgtaacccacttcgagggaaaagcttgactgctcaactaaacactaatacaatatattacaataatagattacataaatatgtttatatatatatatatatataataaataaagcttacggttgttatttagtggcaggtgggtgatcctcggcgaaaatccaagacaactaatgtggctgcgctatgagctagggcccctaaaacaacaaacacatggaaaatctgatgactatgtccagctatatcgaatttacctggtttccatttctctggtactctactaacatagaaggcagctcccaaaccatagaaaagagccattgacagctcgtatgcaagtgccaccattatatgtttagagccccaatgtaggacaacggtgtgcaccgcgggaatcactcccgagaaccccattgccagaaaaagggtggctctgaaggtgcggaattgaggagctgaaagagcaggggagaggagtgtgatgatggctaagactccaagtactgaaatggaggtgagatagaggagtcttgagatggggtgacaggagaagccgtagtagattggggcaaagaatgaagagactatcatgattgagattccggcgtaatcaaggcgccagaaaaaggagctgaaacgtttggagtgggaggctaagaggtgggaaacagagctgcaaattaaacaggccattgacccggctaagaagatgaaccaaggccatatgggaatgggatctgtggtgtctgattccgggtggagatgagttggagttgaagggtttgggatttgcctcaaatgggaatcctgcaccatacaagaaatcaaggggaatgagcttggtgtcaaattatacggtgagaaattatgtagtgattgaaataaattgttgtgtataatgtattaatgtattgttgtgtataatgtattaatgtattgttgtgtatatgtgatataatgtgatataaaataaaaaatatagaattttaataaaatattttaaaaaatagagtaaagaatataaatactgtagtagaatgttgtaattaaattattcagggaaggatagtttttttcttttttttttttgcttaattaacaaaagggaaatttattaaattgatttatataaaataacccaaaaaaataataaaataaaaactgccacgacaacgaatataggagacagagccctatcatcaagtaccaatgagcatttctttgactccgtgagtgaaaaaaattccaaaaaaaaatgtcagctgcatgactgatctcatctgacagcaagcagattatcatacgttacatcccacggttgtcagtttatgttctgaacaactggcataatcaccacccttgaaatcattaaaaattatatataaattattattaactaattacttattttaataataatattattccactggttgttaaattgtgacaaaacttttttatcacgcggtattggctgactgacacacttttcgacctctcaatttttcattggaggtacatttttggcttaaagtactaattttagccaaaaagtactaattctctcaaaattattgccacaaaattgtaataataaattcttacccaaaaaaaataataataataatatattgtattaaggaagcctatttcacttttatcaaaaaatacacagagagattattatttttagtgacataaaagcatgttatcactattattttttttcaatagtttacaaatagtgataacatcttttaagtgttcaaataaatttaattttatttttaacacaataaattatttaaaattttataaatttacagaattaatattataattataacaaaaaaactccaatatatattttagagtgaaaactggaaaaaaattataattactaattagcactccttgttgtattaacactttaaaattttattaatacatgctacaactactaattaattattttttatattaaatatatatttttaatttgatttttaaaatacaaatatattttaaagtattataaaaacaaacataaaaaaaatgagaacttgttaaactaataattatgaaaatattatatttttaataaaaagttgacaaaatttcttattgaaattaaaaagttgttcagaataattaaaacaaaaaaaaaatatttaacttaatggagtgagtgtcattatttatttatttattttttgaagagtgcctttacttttgggtacaaatataatagtctctctctttgaactaaaatgtttataattttttatattgggtgcaaatataatagtcgttataacatttcaaaagagaaacaaaattataaatttaaaacaattaattaaaaatttaaaacgacatgaagtaagcacctgaatgttgtcgtttgaaacattgaattccttcgtcgtcatcgtccagggtcctgaaaccgaagctctgtcaccggaaaagaaaacttatttgttttttttttctctctctcaaaacttgaaaaacagtaataattaatacagaaattaatggagaaattacaataataatctttacaaatctcaagtatatatttaataccttgagaaatttccaagcacacctcctaactccgtcttccccgtgaaagtcaccgtcattaatccggcaaaaatcagaaaccctaacaaatgtctgtgtgtacggaacataaaaatcaaattaggaaagaagaagaaaatcatcaacaattaattaaaatatatacaattgatcttattcacttacgtccaaacgttcaatgtctcgttgtgccaagaaaagaggcttaagaacatgtcctttaatggccattcgcacctgtaatggtccaaaatatactcgttgtcctttaaatactcaggcaagtcttcgtaccttaccaattgaggtctctgtctcttcgttttcgtcttcgttttcgtgatcttcatcttctgagattcagctcgattttccagaaccttcgggattttactgtttcgatgcttgatcatcgtcgagaggatttctcaaaccgccggccgtcgtttacccggcgaggattcgaaggtcgccgggagatctgtaaccgtcggagattgagaccgtcacctctctcactcactcactatctctgttctgtgttgatttttttcatgtttcattcagttttcgtatttatacacgctgaaaaaggtgtcttttgagtctcccattaacaaaaaagataaatgctaaaaatgctgctgtgatccattttctataatttttaggaaaaatacttgtaaaagttactcatacttttattttgttaaataataaaataatataataggattttaaattatcttttattaaaataaaatttaataa

SEQ ID NO: 37215 - DNA, 3212 bp, Cannabis sativa
ttatgctgaaataaattagtaggatcataatcccacttattacctcattaactcataatattaatataaaccgtaattatctaccattagactcatcgggatattacaattacctcttccaaagtgctagctcctggggcaccctcgtccaggtacactgcaacatatctctatgaaatttcctcttcctcaatcaagagatttgggtggcaaagcatccaatgagcttctaggagcttatcttctttgccaagtcatgagccatcacctctttagcctctttggaggcctggctttggcccctaccactaacattgtctatgctttggaaaccaaaaattagcccgtgttcatagagaagttttgtggtaaccaagcctttgactttcaattgtgcttcggtgaaggccttgtacaggactacctttttgggcattacctccattttagtgctttgaggcacaagctctgtcaaaagtaagaagcataaaagtccaattagcaattaaaccaaagtaagaaagattttgaaagaaggaaaagccaaaacaacaagtataaacatactttcctcggacctgaaagctcaatggtagagtgggcaccctcttcactcgaaatccaattaaaaagaaccaatattcctagaggtcatgggagcgttgagtgtggctggtagggtaatgagcatcgaagtagctctccaacttgtagaacccctgcttcttacgatttgttctcattggttaaggcttcacaccatagaagaacaagatcttctctggagtagtcacctgtagcttattaattttttagatgacatacaattcagctaagagcttgtaagccagaggtatcaattggaaaggagttatcccaattcgcgcaatgaattctgcaaagtaggttcccaagggaagatgtgctcaattcgagatgtgggcccacctccaagtgttgaacccatctatgctcacgggagttgattcttcctcgacatcagcctcagaatgttatgtaggctagattcagaggcatacatttgttgcatgtcgtatgaggggaagctgttgattttttggtccatctcctagatggaagcattgaatgcctatgcaagaggtggggttttgacattcccctttcccttagatttcacgactaccccggacagaacagcctctggtatagcctcaaagataatgtcctattgaaaccctgtggcaggagcctatactgggaattcttcagtagctacatcctccatgggaacatcacctgaattttctacaatttccaccgcatcaagttggaattccttgttcaaatccattactagaaaaacaaagagaaaagaaaagccaaggaattagacacccaatatctaaatgaaaatatgggcatcggggaaggcctcccccaaaatttcttggagacgtccccgtcagacctgtcactcctagaaacttatcttcgttaggcaactcaaagtgacagatcaagactcaaaagataataccgaaacaagatttaaagcaaattatagaaagtaagtctattcaatgtcctaacaactccaaattgacacacaaaaaatcgacagacgtagtcctcacttaaaagttcatcctaccttgttcaactgtaattccagaatcataaaacatggaaatgtctacggagtttaaacatccatacccttattatccacacagtatcagcactcccctagtgcgtaaatttcaaacacaatcctatactagaaatgtaattctacaagcatcatttcaccattcaggcataacaaatatcctatacctagcttgaactaagcatttctatcctagatacaaaatagcaaatatttaacaaagcgtcaggatacttacttggtatttgagtggggaatgagaggttgtcgtggaaatatttccaagagtggtgaaaccagttgattacgcggtcaaggctggcctgagtgtcaaagtccttgatagacatgggatggatcaatttaaggtctaacaactctgtgtttggaaggaaggctgaatggagattaaagaaatactgaattaagtagtcataaacttcttgcattcaccagagatggaaggttaaaggtttttctagaataaaaagctctagtctaatgtttgaaaatggaggttttaaaagtctaatgtggtaagaaagaagaaagtggttttgaagagtctatttatactttggccaagtccatgaaatttgaaatgaatggcccaaatcttctctccaaaaagcacactttgatctgatggacgggaagtggaaaagatggcatttaaaacttactcatggcgttcatttttcatcattgcccgcctcgagtaccgtatgcattaaagagaggtcatttcaattgacctaccatcattacaagtttttctaagagatgtgccccctacacgcacgtgttatcaacaaatgcattaaaggtgtcgcatgtgtgccacgcccgtggtaccttcagtttttggccctttaactgatgaaaactcaagggacacatccatgatactagttgttatcccaatttttgcactctaacgtggcatcgcataaatggtgacacgtggactccactttgggcatctgcttaggaagcatattccgagtaggatgtctcgctagcatgaccagagcaaagctttcagtaatccgcgcaaagcaatcaacacttagcaaattcagcttttgcatcgtgagtcatcaaccgaatccctataacttggggatcagactacagggatatggcctacacacgatcccacgatcagtgtattcagtatcaatcccacgatctttgtacttagcattgatcacacgatctttctgtttatacacattgtaacaagaggggaaactcttcctctccaagcttattagccctataaatagtgatgtatgttcactaggaaaaaggtcgcaaacagattagttgagactatacactaaagatattatctaagaattatatattcagagatactgctgtaagagctataagaaaaggaaccattctccttgttcttaagtcaatacaaataacgagtattaggctattatcgaatgctcgtgcctgaacctctataaaattcctgtgtctttattttgctttattatatatcgattgctataaatcacttatcgcttattaaattagactcgtt

SEQ ID NO: 37216 - DNA, 4110 bp, Cannabis sativa
tttgtactgacaaaattaaatattaaatttatattgattaaaaatttataattttaaataagggtaaatagtggcataagtacttaaagttttagatttgtaaacgacataaatctaataattctttttagtggcataagtacccaatgtttataaaactgtaattttcttccagtttcatcagtatagactctgttattgtcttaaacatgatacatataagagccaaattttagattatttgatctgaacgaaaaatatgtagtatcagttacttctaaatctttttttaataaatttaaaatggaacttgtactgacgaaaataaagaaaaattacagttttacaaacattggatacttatgcaactaaaaaaaatcattaaacttataccgtttacaaactcaaaactttgagtactcatccctatttactttttaaaataattatgagggaaatatatctataattaatggatttgtggttgagttttcgatgaggaaatggtaagggaaggtggagagcatatatgatatcaatcatgaatggtgggtgggtggcaatctcgtgacaaacaatgtcagtcaccaatctcaatctcaacccaccaaatgggccctttctttggataaacatgtcactccactactgtcggcccacgattgtccgtacatttgtaggtctgttattgggcctcctgacacgtgtggcccatttctatattgttaaaaaatgccatgcacatgcaaatgaaacgtagtacgtttgggcttcccatcttttttcttgacataagatagcaaataatgcacctaaattaatgggataagttaaaaaatatttttttttctattcattaatttaaaatatttttgtattctattttattaaaatatatttacttttatgagtgaattgcctaatatatttattttttaattacttaagtctatcacataatttttaatttatattagcttaagggatataatgagaacatcatctgtaaaagtaagtatattctaaagaatataaaaataaaattaaaaattaaaacatacaaaataaaataggtatacaatataatttttttaaagttaaatggactacatttaaaaaaaatgttgttatgggaatttttatatatatttttatattatttttctgacacaatttttttcacttgtattattattattattatatctatgaaataatgttgtttttgcattgttttcactgttttcacgtggtagcaatatgatcatattctatattttaaaaaaaatgtaaaattcataaaaatattaaaaaaaattgtatattcatattttttttttggaatatttatgaaaatattcaatttttttattatgcaactttcatgtgagttttgcttggagtttaaagaaaatcatgtaaggtctaaaagtaagcttggaagatgttcaaattttatgctataagcatgaaaattttatttgtggggggttgaactcgcctttgtgtcccttatgtggaagttattaaagaagcagtcttctgttttcaccctcttaaagtcctgggactagacaggatgtcaggttgttttttttcaaaaatattgggacatagtgggagactctttttgtgttgctgtcgagaaagttttttatacaggggtaatcaatcccagattgaattacaccttcatatgttttattccaaagctttaaaactttgaaaaatagaacagtttagaccaattagtctttgtaacttcctttataacttcctttataaggtggtggctaagatcatctctaataggttacgccctattatggatgacttggtttcccctttacaagcagcttttgttccaggtagatggatcgcggaattctcaattttgacccaagaaatcattcgcaagattcaaaagaagaaagggaagggatgtcttatggcaatcaagctagatatgttcaaggcctatgataagccggaatggttttttatccatagagttctcttggctaatgggtttaatgagagaagttgcaaccttattatggcttgtataagaagtgtctccaactcggtgttacttaatggaagtccgctcaagaaatttgtccatcaaagagggcttcgacaaggggatatgttatctccctttatctttcttttatgtcgggaagttctgtcaaaacccatccaaagagctgaagttagagggttgttacatgggattaaaatctgctccctctattccttatcttatgtttgtcgatgacactatcatgtttggtcgggccaacgaaaaggaagctgaagcttttattcaatgtttaactctttacgagaagtggtcagagcaggaatgcagctagtcgaagtctaatgttctcttctccaaaaatttaagtcatgctcggaaacaatctttattgcattgttcggagatcaagcagtcaaatggtgaagaacaacatttgggcaatccttttatttttaaaagaagaataaaacaagattataaaaaacttaaggataatttaactaaacgcctggaaggttggaaactgaagtgttgtcttatgctggtagactcactcttatcaagtctatggtaccctctatgccaatttatgctatgtctaccaatatggtttcgctttcaatttatcgcagtttggatgccatgatgagaaaattctagtggataggaggcatggacaaaggccaggttcatgtcttctaaatcttgggattgtatttctcaacctaaatctcatggggggttgggatttaggaggtttgaagacatgaataaagctattctttccaagcttgcgtggagtttagccaatgatgttccaaaaccttgggttcaatgcatgttgaggaagtattgtcgttcgctaaacttctggaatgtggaggtcaagtctaatgattatgatatttagaagggcatccttaacttaagagatattattctcgaagggtctatttcttggctgcctgtggagataccattgacttttggaagtaaccttggatcccgtggttgaagattatggattctcaagagttaatgaggggtctaagaagtagtggttttataaggaaaacagtggcaaatttttcagttaataattgctagaataaggatatggtcttacaaatttttgaaccttcaatgtccacaaagttcttgaaatttcaagaattccatcgcaattcggggactaattggtttggaagcataggaagaatggtcaattttctgtcaaggatgcttgttctgtgaatcaaatctcgagatttagaccgaagcttgagatttggaaatgggtatggcactcttcacttcatcctaaggtggcggttatgttgtggagaattttgaatgaagcactgcctactaggtccaggctccctttcttaacagaaaaaagagtgtcttttgtgtggtgatatcagaacatggaatgtgaatcaaacccacgtttgaattgaaattgagatactgatgcaagttcttctcttctggggaaagttgttttcatctctttaaagagtgcagtgttgcgaaagctgtctggttttctggccttttttcttgtcgctctttatcgtctttccaaatatcaatagacttattgtgttattgtatagtggttgttttgctttagaaatttgacagcaaagaaacattattagattgaaagggggtactgttgatttaaacttgttttctttcaagataacaatctcttttaatgaatattgtgctttgattcatacttcgaattagagactagtatgttgttcgaaaagcttagttgggcctagcaatgagggtattgatttagtgatttgtactaatgcatcttgggaggctggtgtagctagtttagctgcagtaatggctaattttgctaatggaagttgggtgtagtgtactgctcaaacatatgcttcttctcagttggaggttgaaactcgtgcaatcctattggccttatcttaggcgaatcaatcctcttggaaggaaattcacattttctctaattctcaatggttttaacgaatttttcgttctttcaaaaaaaaaaa

SEQ ID NO: 37217 - DNA, 3063 bp, Cannabis sativa
  modified_base (328)..(331): a, c, t, g, unknown or other
  modified_base (1466)..(1466): a, c, t, g, unknown or other
  modified_base (1584)..(1595): a, c, t, g, unknown or other
ttattattattattattaaaatggctttctttgaataattacatctctttattggaattaattgatgtacattgtggtgataattctaaatttgctagctgcatgtatgctattgctatcctttataattcgtatttaaatggatattatttttattttatcattttgaaaaagatctatattaatcaagtcattaatattacaatttggagtagaaaaagagctagttcaatataaactccacctctctatacataagaaataactaaaagaagaattggtaagcaaattgtacttaagtatcaacacataataataataataatannnntaataataataataataatatgcgaattgtactacttgtatagaaatataatattctcattaattgattttgagacaaaatttaatatgtatacagatattattttgtttaccttaagtactcctatttctttatttaactttttttttttttgagaaaataaaaatatccattaataggccaattgaacaaagtccattacataaaaatatagcttacataacaaaattaataataataataggcttaccaaagcccttcataataaaatagaagaatatcctaatagcaacctcaactaaaatttaataattaagccagcgattaagcatatcaaagagatgtgaagtatattagcttttcaaatcaaatacatctgatagtccaccttctattgactatcagctaataatctttcaataaaaattgaaaaattacaactcccattatttgaattgtaaataagagaaataacaaaactaactacatgttatgatactcaatcataaaagattggataacgaaatatagggccaatagcaatccaagaattctccaaataatctaacgactaaagagagtaattaaatcgtccccaccaaaactactttggtccatcgataagatactaataaaccaataaaaaaaataaaatttgagtcactctccaggataattattaaccccattaatctaatagggcgatggtacaccattattaatattattagaaaacacaaaaaaaaaaaaaacaataaaacttagcatacataatcataaaattaaaattatcaccacacagataattaaaaaccatgatacccaaatcatttctcaaacaatactcaaatttaaaattaaagcctttgaactcttgacccagcctcaaactcccacggcatcaaatccaaaaacactcactaaagtacctaggatacacatttttcttttacctaagaataagttaattattagtaacctaagtatactactacttctacttcctatatacacactataaaagattttactttgtcacaataaaatttatgactaattataaactataattcttatattataattaaaaagtttgtggttaaagatattaattacaaaaattacaatttgttgngactaaatatatttttagtcataatacttattgtgactaaaattaaattagtcatgactacttgtatctaaatgttatctttagttacaagtaattttttattgtgactaaaagtcannnnnnnnnnnnaaaaatttatattgtgactaaaaggtagttactaaggataattttttttggtagttatatacttttcatatcatactaattaaacttgtaggaaatttcttgagttccaagaatgccccctacaccaactcaatatcactaaaacgacagggttaaaattgacgaagaaattaaaaccaatttgaacaaacgacaagaaacagtaggtcatttttctccctctacgacaaattgtttaaaccaaaacgatttgtcgttctcccaattacaaataatggatctaagtgagctaaccctagctcagatctaattagaaccttcgagatttgaaacaaaatctctctctatctccctgtcctcctcttcgaaagaaccctagaaaccaaatccccttctcgatcaaaccaaatcgattttaccagaaattatccccaaaaatcttaccccaaaacatacacacataagaacatgcataaaaaattagtaacagagatacaagaaatcaaacacagggattacagaggtttgccctaaatccaggggtacgtcctcttgagctcgccttgaagaacgatctcagatctgcactactatacttgaagaatattacaccaagtgagaaatccaagtcacaatatcgactggtatttcagttctttctctcttcttctttttctgtatatttctcactaactctctttattttcttttacatgaacactctgatctccacacgggagtctctcactttctctgggtctcacaagaatctgggctctctcttcttctggtgaggttattctaagtgtttaattccaactgtagatgagtagaagaattttgttacaataataaaaattcggttagggttagttgttgttgttttgttgtgtctggacgtgagtgaaaaaatcacgagccgttatttgtatttgttttctgtaaagctgtaaagcaacaagtgattgggcgatctaattttaacaaaactctcatcttaaaacctaattaataataaaagtgacttatgctcttataaatacaataatttcacatacattttctggacctatatttatttgttttagttttatagaaaaagctcttattttcaaaggaaaaataatgacaagtaccactaagcactcaactataatcaagagctagagaaatacatatactttaagagaattcgtgccaagaggactttagaactgatgctcaaatattgagggtccatatatcgatcgatatgttcttagctggattctaatgcatgatggttactatacaaaggtttatatatatatatatatatatgtacgtgtaatatcgagattcctagctatatatataggaggatatactctaggaatatctcaaaaaaaaaggaaaatatatatatagaatgagttgcagggagagattcagatatatttcttctgccaaatcataatgttgataatgc

SEQ ID NO: 37218 - DNA, 2774 bp, Cannabis sativa
tttttttttttaagaaatggtagcaaagaaatacaagtccaatgagtcggaacaatcaaatatgatgggcagctgcattagaaaaaactaaaacacaactcgaagtgcaattcagaagcagcaacagggaaggaaaagtgttaagaaaagaaaattcccaattcagaaaatataatacacaagaggctggcgtttagtaagaaaatgttgcatgccgcttatctcaaggtagcataactttgttatcattaaactttaagggaatgtacgtaataaaaaagagcagttctattacaccataaatgtcaaaatttaagttcacaactggatcttctgcctcccacagtgattcaaatttaagaactactctacttacacacgttgaatgatccgaaattcagttttgcatccctcccatggagacgactactattggccaaatatggaaaaacatgcacaggttttgttactagtaaatgtaactaaaacactaatttaaattttgcaactacaagatgcatgaataatttaagtcaaattaaaattcttgaagccattagattaatggtccaagtaaagacataaggaaatgatataattattcgtttaattgataggaaccccaactccatgcaatacaaggtcctaaaaccttttttccccatttttatatcatataagatccaggacccataaaagttcttctttaaccgtccactattattcataataaaaagtagactacaatagcatacaacttcaagacaatgcagcctcaaattagttacctttatcttgcacaatccttctcgagatttcatttaaaacctcagtaacctgggaatcatccaagccagaagcttttctaagctgaattaaatcaacaaccaaatctgggttgaatggcctttcgttcaaagcatatcgtatatacttgcgtaaaatctcatctgcgccaaaatctgtctggaaaaaaattagcagtttttatcagccccttataaagagcatgcacaaacatatcaaaagtatactgctgtaaatacaaaaaaaaaaaaaaaaaaaaaaaaagcaaaccacatcacatgtctggaatttaggattatccctaaaaataatgttatcatataatacacagagatgccaaataccattgtaagaagaagtgtagaacagagatgaagttattctgagcattttcaaatatttctaaatgaaaactaataaaaaaattggccatcataacaaacaataggtcgaaagaacatcaatacagcagctcctgattttgtttttacgaaataaggtcaggacatggtaatggaaaactgtggccggtgacacagtcacacaatgacacattagagtctcaaatgtgttaggtggtcactataatagagccgcacaaacaattattggccaccaccaataccattattagattatattgtgttcagtgtatggaaagaaaatcaaaccaaagaactttcaacccaaaagtgacgataaaatattgtcatgttaaccttactttttgagcgagttgcatgaaagcatctggggtaacttcatctcttcccttctgaaacaactcatctattgatttgcatagcatggcatttttattcacctgtccaaaacccaatgatagacaaaatttatagcaagacttataattctaacacgtgcaaattgaattttgaagaaagctctaccaatgcttgaaaataaaaccattagcaaaaacaaatgggcaccataagcttaccatatatatataaatatatatatatatatacacacacacacacatatgcattcctaatcctgaaccttgcaaaaataattacaataaagctacattttcaagttttctccgtcatcctattttctcagcaaaaaagataataaaagaaacccaatatagaaaaccctcaagagatagagaaataggaacaaatttgtaccaatctcttgcgtttggcttttggagaagtgagtttccgtacagtcttaacaaaggcaatgacgaaagtgataccggcataggcgagaggaagagcaagaatccatgggagagaactagtcccaactctaggaccaggaattgcctgagtcaccgaacccgtgaactccactacatccaaggccttttcctgaatccaaggcaaatcttcctccacttcctcaaattcttcctcattgctcttattcttatcctcacttttctgggtcttagccgagacagagggattgctcttagaagctgcgcaaatggggctcctgggtgtgagacgcaagggagaagaaagaggaactgatgagggagaaggaggagagacaaagaaggggggagggaatttgggttttggacgaggaagtaactgggaagcgaaggagcaggagcaatgagaagaggaagaagctaaagccattgcaggcaagacggggcgaagagaattgggttgggacgatagggatgggataggcgacaatggcgagtgtgtcgccggtcgaggcagcttccaaaacccactaatggacgcgcttcgtaggttacattacatatagtggtcctgcccgttgtcgattttgttttcgccaagtactccattagtttatatatcacaatttatttccacgttagtaatgtgggactaactcctaatacaccctctttacgtttgggcttggaaagtgtaggcataacgaacgacctttaagagaccataggaccgaaacgtgacatgtaaaagaatcccacaaggccaaat

SEQ ID NO: 37219 - DNA, 9091 bp, Cannabis sativa
  modified_base (2788)..(2805): a, c, t, g, unknown or other
ttaaataatcaaactgggaatattaaaatacaaaatttcaaaatggtttacccaagaatttccaataaaatgtaaagaccgaattaccttatagtttcgaatcaaatttaactgtttttagagatatggttaatcaaattagaatagcattattttccttctgtggtatcactttgtatcatgtaaatcaattgccaacatggcagctcataatttaggcaaatgggcaacatgattacatggtgtgaataatatatggattgaagatgatcgatttcttttatttttattttattaattaatggatggaaggaatcatttctgtaatgcctagacaaaattgaggcgccacgtgtgtggatgttgtttcggactgtaaggaaaatgttgaataatagcagtgagatggtggaaatgaaggatggtgagggagtggatcccacgtggggagaaggtcggcattgtgaaagtgagagctgaaattaaaatgaacaaatatatatataatttgcggcagagaatcatcctcgtcttttaccccaaaaccacatttctcaaactttacaaaaacaccatctctatgtgctatccatccatctacacttttgcacgaggacccaccctccctcccacctcttccttaatctcttcacttggccccttctcaaaactaaaaaacaacattccccactgttcacacttgcattatagaaaaattaaagttcaaaaacaacaacatatatgccttctagttctacatttaatttgcttctcctagcttgcactctgatctgcactacgcatgcatcagtttttcaagccttattatcatatttatattatgtatcggtaactaaattaattaactacgcctgtttgaaattaagccactgtaattattaaatggtataattactaggatagtaattacctccaaacatatatattaaaatccaattcttttatagtatgccaaacgtgttcgaaaataaatcgtgtaattatttttaattaattagtatttgtttgatataacgctaaatatgtttttaactccaaaggtaattagattagaaggtgtgtacgtagacagttgcgaaaacatctctcaaattataattcgcgatcattctatatacactcttataagtaaaaaaatttctccactacgtggtaacgtgtagccaaatatattgttcattttagaaacttacttatatatttacaaagaaatctgttgtcagaaacttaaactcatgattattacccatgttgtgagataatattatgtgcctaaactcatgattattttctagttacctaaatatctctgtctacggatacgtacgtcacattttcttttataaattatcttacatgataaagacaatcgttttcgtctctatcgatattctctattatcattttcgtcattatatatgttcccaaactaaccctacctattaatgagggtttccttttctacatcagcaaaattaatataactcaactacaaatggatatttatgtattcgttcatgactcatcctttttagtttattcctagtcatagtcagtatataccttaaatttttgattcagtagaacaaacagaaatggggagagttaagcttcagataaagagaattgaaaacacaactaataggcaagtcactttctcgaaaagaagaaatgggcttatcaagaaagcctacgaactttctgttctttgtgatgttgatttagctctagtcatgttttctccatctgggagactcagtttcttctcctcccgcaataaaaggtctgctcatcatgatctaataatatatgcatacataagattttatagtactactgtttctacccttttaattaatatattaattctaacacatgattattattatttttcttcttcttatcgtatgataaaaaaaaaaaagtatagaagagattcttggacgctatgttaataaccttccacagaatgaccaaggacggtaatatataagaatataattaatctttcgttttggaaatattcagtatcatatattgttattacaaatacgtaatatccaattaataacgactttcttcatcatcttgttttgtttcgaaactcgatcctacgtttcgtttaattaaacttgtcatatgcgcaatgcaaccataattaaggcagcataatcaagaggtaaccatttggttttctagtattttaaatttccctttatttaaaatataaaaattttacctcttatttcaaaaaataaaaataaaataacagagagtattttatgtgattaaataactgcgggtacgaagtttctgaaacgagcgattagtcagataaggaatgaaggtgaccaacataacaatcgtacaattaccaggttcttctgatcactttctaagcaaccatttccccattattggtacgtatatagctaattatattaattaattgatgtcattggaatttgcagccgtacgagctccgattctcagcttgaggtactcaagatctatatatggattatgagctaaccaaattaatattttatgttcttagatcgatttatgataaaataaaattcatcattaattgaaatgttttctgatcaattgtattacaggagattcagcaagtaatcctttgctttaggttgcaattaaaagaaatggagaatcgactaaggtaagtaggtcttattattttatatattatatccctatgatcttccatacatttctatacagttttctctctctctctctctcnnnnnnnnnnnnnnnnnntctctctctcacacacacacacttaatatatatatatatatatatatatatatgttttgcaggatatacgaaggtgatccctctgaaatcacgaccctgcttgaggcagaatactgggagcagattcttcaagagactctaaaaaatgtctgtttgcgcaaggtaatgaataaagatcgatcacccagctgattttgtttatattcattttgattttaactttatatatgtttgtatctatatacttatatgtagagaaatgttaaaggaatattagtggtgtctagttcaatttaatatcagtcctacttaattaaagttacaaattattatgaaaattactaaccgcacacgcaaagagattgttgaacgccaataatgtttaataggtatgctcatgtacgtttatttgataatataattgtgtgaaaattacgattaacagtgtaaaatcaaatcaattaaattttaaacaattaaacaattagcactcacaaaattataatatatcacgaataatagtcgaacaaaaacagtaataaataaagtaagtaaaaccaaaaaatgataaatgcagaaaataaagaaatcaacaccaagatatatagtggttcaagtcctacagatcgatgtgatctatagctctattctagttctggaatacctccaaaattttctttattgattgagcaagagcaggtacgttacagtcaagtttgattctctattgagttctatcaaagtgtttcaactatcacactcttacccaagaattttcttcatctacaaaagattcttcatacaaaatccaaacccaatctgtctctctctctctcttttcttagtacctctcaatctctttctctctctaactttcaatctgaattgtaagatctttgtcttctcgatcctcctaaagttggtggttgcaagaatcgaagttgttaagttagttaaacaataactaacttaaccaactctcctatgagtgagatcttcacgtcagcataattctaagtgcatccaggaacatatacgagcttcctggatcacggaccaaaggtacttgctgaaaaagcttttggataggatagaaccagctagagtcgactattcggatctgcctttcaggaagactaaactttcaggaggaataactagttgtctgaaactcttttctagaggagggctagctaacctgaagactgaacctggagtggacatgatattcatctgggaaactcccttccaaacacaattatcattccacaagaatccttctgaggtggacaagttagctgtctgggaataacatccgggagacacctaactttttaggaacaactttggagactttttcattttggaggaactatacaataaatttcacctagttacttaaaattaaaagaaagacgatgttgaagaaagaatacatccatcatggttggtgttctaagaatcttaatgtactaatttctaagattgatcaagttcaagcaattgtttattgttaagaccgtagtcccaacatcagtaggattatcttctcttctgaccttttctaaatcaaccagcccttcttctatcttctctctaatccagtagagtcttatatatatatatatgtttactcttttcatgataaacaagattcttacaaagatggatggatgaatggctatccaaagacacagtcactccacctttgatttgtttcaactcataatgtactctgcgaagccataaagcttccttaaaagcttttgtagttaccatgaattctgcttccatggtgggaagagcaaccacagactgtaactgggcttcccagcttatacagttccagtttgtcaagaaaatgtaagaagtggttgattttctagtatctctattcgaggcgtagtctgcatccacgaaccctttcaattccaattctcctttagaattttcataggtcagaccataatcgcaagtgcccttcaaatatctcagtaactatttaagaactttctaatgttcaatgcctggattggacatgaactgacttaggatgcttagagagtgagctatatccgatctcgtgctcaccatcacgtacattaaatatcatagaaccatatcatagggtacatccttcatttcttctttctattttgtattgttaggacactggacttttgacaaaacaactgacctcttaacgaaacggatgtactctttgcatcttccatgttgaacttttgaataacattcttgatgtacccatactcctttaagctaatagttccttccttctggttccgtgagacttcaataccaagtatcttttgaactggtccaagctccttcatctcaaattctctttttagcttggctttaatacttttggttgtagatttatgcttgctcatgatgagcatatcatccacatagagcaataagaacacacctgtagattgctctagattcttgaaatataaacagtgatcgtacatagatcgtttaaacccgatttgttgcataaacgtatcgaacctcttaatccattgtcttggggattgttttaaaccatagagggatcttctaagcttgcacactaattcaactctttgcccttccacctaaaattcaagtggccgcttcatgtagatctcttcatccaaaaatccatttggaaaagcagttttaacatcaagttgttcaaccttgaactttaattgagctgccaaggacaacatcaaccttattgtcttgtaatttaccacatgtgacaagatttctgtgtagtctattccttccacctgagtaaatcccttagccactaatctggctttatacttcactggttcattctcattgattccctcattcaccttgagaattcatttggagtccacaatcttcttattctctggctttggcacaggtacccaagtcttgttcttccagagtgaatccatttcctcatccatggcttgaagccatttagacttgtttccacctaaacttgcctcttcatagcttctgagctcttcaatttcatgttgttggactgccgccagtgcaaatgctattatatctacttccgtgaaccttgctagagggtgaatctctctccaagttctgtgaagagtcaactggtaaccttccagacctatttgtttgaatccttccagcaccactatttggtctttattatcttcttgccctgcaacaccttctgtctgtgcattattttctagttccaaactaacttccgcctataaatcttttttctagagcttcattctgtactctatgtccacacttacagtgtgtttgtttcctatttttcttgcatcatacggagacacgctacctttcctggaggtcaagtgaggatatttttactcattgaaaataacatttctagcaatcacaacatttggtttacccttcctggaaatgtagactctatagctcttagtgcctaaggcataacctaggaaagttcccttcatggatttaggttccagcttgtcaatggactggtgtacatatgttatacacccaaaggttcttaagtgcattaggttggggttctattataccacatttcataaggtgttaagtctatcactctatttaggcttctatatataaggtatgttgtggttgctaaagcttcccccaaaatagtttctctaatctgaaactgaacaacaaacatctaactttgttcaacaaggttcagttcatcctctccacaacgtcattttgctgtggagtcttcactatagttctacgcctagtgatcccatactcttggcacatgtcaaattccaagttgataaactctaacccattgtccattctaaggttcttaactttaaggtcggtttgattttctacttaagttttccaaattctaaactattccaagcactcatttttggttgatagtaagtaggtccaaacacatctactataatcatcaattattgaaagaaaatattacttaccagagtgagtgggcaccttgtatggtccccaaagatcaacgtgcacatattcgagtatctttttagttgtgtgccttgccagagtgaacttcaactgatgttatttccctaaaacacaatcttcaaaaaatggtaaggcacaagaatttaaattttcaattataccttgcttgtgcagttctttgaagccttgttcactgatatgtccaagtctatgattctgcaacttcacattcgattctagccctttcaccaaacttgtctctccagctgagatagtttctccttggagaacatataaaccattgatattttctcctttcatcactaccaaagaacctttggtgacccttaagcttctgtgaatggatttgtattcgtatccttcatcttcaagcgcacctagggatatgaggtttcatctaagctctgggatgtgcctttacatcgtcagcactttgattctgccatcatactatttgatggctaccttcccggttccaatgactttgcatgaatgatcattacctattagaactttacctccaccagctaatttataatcaaaaaataattctcgacttggacacatgtgataagtgcatccagaattgagaatccactccctgttcattgaagattctgagatggagaacaactctctatctgtggagcagtcatcactatctttcgcgattgcagcagagtccttcctggagtgatgatgttgactctccctcctatcttcattatgaaatttgttgaagccttgttgctccttgtacttcttgcaaaatctttggaagtgtccatatttcccacaaaagtaacacttccttgtttccttctctagagacttcgatcttgattgagagtgatggtgtttactttttgaacttcctttcttgggtgatcttccgcttgccaaatacacttcttctttcttggattccttctccaactgtaattcaaaatctttcaacttaagtgtggaaataacatcctccaatgcaatcacgtctctgccatacttgatggctgcgttgacttctagatatgcgattagaagtgatcttaacagaatgatggtctagcttttttcaacaaccttgtgatttatattagtcagtcctatactaatctcattaaatctatcaatattatcatctaaagaaagggaagaaattattctaaaactgtataacttttctagcaaattaatcttgctagcaattgatggctttaagtataattcttccaacttgttcaaaactctttttgccatcttttttgcaatgagttttcttttgatagatacatgatgatcgtgtattacgccatctcctccatttctgtttttttcctctagtttattttctgccaataacttctcatctctaagaaccttggagactttttggtgtactaggattcctttcaaactttctctccatagcgcaaagtccccagatccatcaaacttctccaactcaaatctcgccattgatgacattcaaagtttcttcaagaattaaagcggaaggaatcttgattctgcattcttgatctattacctagctctaatttgtgggaaaattacggctaaaagtgcataatcaaatcaactaaactttaaacaatcaaacaattagcactgacaaggttaatatatctcgaataataatcagacaaaaatagggatgaatagagtaggtaaaaccaaaaaaaaaaaacaacaaatgtagaaaataaagaaatcaacactaagatatatactagttcaaatcctatagatcgatgtgatctatggctctactccaattctggaacaccacttctctgttgagttctctcaaagtgtttcaactctcatactcttacccaagaatcttcttcatctgcagaagattttcatacaaaacccaacctcaatcttctcttttctcagtacctctctctctctacctctcattctctttctttctctaactctcaatctaaatcgtaagatcttcgtattctcgatcctcctaaaagcttaagtgtgggtcgtatttataggcttaagttgcctagaagagcagaactatgcgtgaaactttaacataaaagagttccaagaactgaattttcttggtgctaatttagagtatcactgctgggcggcctctaccaaggtagttgaaatgattctacaccttacatcatgcatgcaagtccatttgcatttcgaagtatttgatgtgggacagaggatcttccttgtgttggaaattatttta

SEQ ID NO: 37220 - DNA, 3850 bp, Cannabis sativa
acgtactcgtgtataagagtcagttattccgtgagtgtaacgacccaatggaggcttgaagcgggaacgttacacgggcctcatggttggtatgagttgacccgacatgaccaatatttaagacaacccttacctattaataaaatcttcccctaaaaaattgagaaattatgtataatttaaactttaaagactttgtatatatgttatagtgcaataaaatatttaaatcctattttttatagcttaaactattaatgaaattaaaatagattgtatgtatttatttatttaaaaaaaactataattattatgaaaaaaataatggagatgccattaaatagtataagatttttaataataatttttatttttattaaaataatacaacaatattttttttacaaaaaacataataataataaaggataagtctataatatattttttattttttatacgaatagtaagtagctgtttaaattttagtattgatactctaaattatttttattttttaaaaatattataaataattataattacaatgtaccttatcactaaaaataattttaatttcaataataataataatattctttttttctttttaatgttaattattaaaaatttaaagaagaatattcgagaatgaataaattattattagtaaagaataaagataaacgcgcttggatacccttccacgaagcgagaatcggttctttctaacacgtgtcaccacctcaagctatcaaaccaccttcagccgacctgcgcgtgtcttcacgctcacactggagcgtagcctaaaccaaaccctctcaactcaataatccacgactcttcaaatctcatccgtccattactttccaatcggacggtctacaccgttcgctcacgctacattaataattcccacgcgccactctcccaaatctcaaacacttcaattcgtcaatttcttttttttttttttaaataaaaaaatatacaaacctagagagagaaagtagagagagaaaaagggagaagaagaaaaggcagaagcaattggcagagatttttgaacgaaagcttagtagatctctattatctcagtttgggcaagcaaaaggttagattttgttgatgtcgatttcatctttcttgtttagatttttttattttttcaacattaattgatttaggtttcttgttaatttgtatttggaataattgcgttcattaatttatgattgtttatgtttataatagttccacacaattaggtggttcagtcttgtgaactttgttagattcttatttgggcaccctaaatattttgcattgattttcaggtatttaagcatggaaagtaattgcaaatttgtagaaattaaatcccagaattttgaaatttgagttcatatgatatgtatatagggttttgagttcatttgattctgtagttttctttagcatttttctcacttcttgaaacttagtaaaagctttatgatccattttgctgactgaccatgttcaattgtgtataattttaccctagttccaagtcttgttagaaactatggtggttatggtgtttctaatcattcttctttatagaactttacaattctttttctttcttttggtgataatggagagacattaattgcccgagaaatttgccaaactaacaatgtgaaatactaaattttgccaaataacctcacttaatttactctatgtgattatgatggtcacatagtgtaattctatagtagttttgcgattataatggtcgtttatggccgcacagtgtaatatggtcatttttgcgaccatagttatttttcttaattgccccccacgaagagtatttaatggttttttaacttcttcctttttgattatatggtattgacaatacttaaatttgcaggtttatgaactcaacatcttgagtgaagaggtctcttgagtgagtaataggttttgggtataaagatttagaatggcagatgaagtttctagcttttggggccctgttacatccactgattggtgtgagaaaaactatatgcattcttcttatgttgcagagtttttcaacaccatatcgaacatcccgtgcgttgttttagcactctttggtcttgtaaatgctcttagacagcgttttgagaagaggtttagtgttctgcatctatctaatatgacacttgccattgggagcatggtgtaccatgctactttgcaacgtgtgtaagtatcttctttgctttttattttaatatgttaaccttgaccgggttttgttagtttctacattttgtttactattgatgtttgaaactttgctttttctctcatccctagtatatagataggaagttgttccatgtgtctagcatctaaattttatttttatctaacaatttgaagcttcttttgcttttgaagttgattagcttagctcgatagcctaattatgcctttcgttaatctgtttttcacttttcatgatctttttctgccaaatgccctttcagagtttatatgaaatgcctctataacttgtttatgctacaaacatgaaatgttgtgctctcttctgcaaacattttcaagcccaaaacctttcttgagattccaaagcactgatcatctgattttaatttacttgattttcttgtgaactttggaagtaatgcttgtacccattttctctgttttccgatgaagctttggaagtaaaatcgttcttacagttgaaacagattgtagcttaaattgtaacctcggaacataatctttgcctactttctctattttcagacagcagcaaggagatgaaaccccaatggtatgggaaatgctgttatatatctacatcctctactcaccagattggcattaccgaagcacaatgcccaccttcctgtttctctacggtgctgcatttgctgttttccattcactcgttcggtttggaatgggcttcaaggttcattacatgatcctctgtcttctgtgcatcccacggatgtacaagtactacatccacacaacagatgcacacgcgaaatggctagcaaagctgtacttggggacgatactcgtaggaagtttttgttggctcttcgaccgagttttctgcaagaacatctcgttttggtacattaacccgcaaggtcacgctctgtggcatgtcttgatgggtttcaattcttatttcgccaacactttcttgatgttctgtcgcgcccaacaactgggttggaatccgaaagtagtccagtgcttgggttttcttccttatgttaaggtacagaaaccaaagacacagtgagtaaaaaaaaaaaccaaaaaacaaaaaaaaagagaaagtaaaagacttttgagttagtgaaaatttgcagtgcaggaaaagaagctttcttttaattttttttttttgttttctatttactcttctttcactttcttcccactccaatattttgaaagtaggtggatttatttttcaagggcagcaacagtaattataattctttgcttcgttttacttgatgaatgttaatggtagtttttgaaaatggttatgatattaacatcattgctcacatcttagatttggagaaagtagtgattttgtttttctttttaaccaaacattttagagaggaaaatggggttattttagatttggagaaaggttgttttttgattttgtaggttatgattcttaatcactaaaatgtatgcatcttagtgttattgatcacttgattaaagaccccattaaagattggatttgtgatgattattttcctttggtttattgttgaaattttttccaatt

SEQ ID NO: 37221 - DNA, 3206 bp, Cannabis sativa
aatttagtgttttgatcaccgttttgcaaccaatcgacacgcgacctttgctgccaatatgtttcctcttgagctagcaaatcatcaagaacattttcatggtgtttgagatcgtgcatagcagtaggagttcggtctgctacattatttagatcagcaactttcttttgagcgtgtgaaattttctttttaaaatttccaaacttttgtcgatgccattgctgaagtgaagcagtacactgagtgagatttgttttaaacactgctgctgcatttcttgaggaacattgctgccagttttttttaattaaatctgtagcttcctcctcttgcaaccatatcttttcaaaccggaatctggtgtggcgtattgctgctggtgcgaagaattgagaggcagaatgttgacacaaatagctctatggtccgatcgatagtagtccaaatggtgtgtggtgatgctttgaaaaagatcactccacaaagtattaacaaaacaccagtccaagcgttctttaattgtgacagcattatgtctacccttaatccaagtgaatggatcgccttcgtaagcctgctcatgtaagtgacagcaatcaagaacttgacgaaatttatccatctgtgcttcattacgcaaagcaccaccagctttgttgctgttggataaaatttcattaaagtccccaataaccatccaaggcattaatggcgcaacatctttcaatctttctaagagtgtccaagtttgaagacgattttgagtagccggtgcaccataaaatgcagtaaagtgccaagttggaccattaccacaacccatgtaacagtcaaaagtatttatattaaaatttaaaagagttacatcaacatcatctttccataacaacattaaaccaccactaagaccaacacgagggacttcaagtccattattaaaatgtaaaacactacgaaaacgagaaatagaactaggacctaacttagtttccataataaacaacacacttggggattgctctttgacaagcaatttaagatgacggaaagcactcgggttccccaatccccgagcattccaacttatgaccttcatggctgtcggcggagctgaatttcagactccgcattgctgtcatttgccttagaagaatccatttcagaaatagaaacatctaaaggaggttcgttttcaactgacaatggagaaacgaacaattgatttgggttacccctgcatattttaagggtttgcctcaagctaagcccatctgattgcctcttgaaaagtcgatttggtgaaaggttctcttttccaacttgttgcccagcagtaggagagacaattgactgtgctgtataacatgtagtaggtggcagtggtgtaagaagctgacttgatttcgccatttgaaaggatgaagttggtggaggataagttgcaaatgtattcatgacagcaaaaggagtaaaaactccggagagatcagtgcatatttcagcatcatttggttgtgtcatgaccacattctttgtacgagggagtgattggttatttattttgtcaattgagactccacttccagatgcagaatgaaaacgtggagtatcagggaacgaggaagtcagtttttgtttgccacggtctttgctatttgttggaattgcaagattgaagttgatcataggtgttacggcctgagtagatgtattggtaattggaacagaggaaagatccttagattgagaggattcaccattaaaaagtggcatgggatttggggaatcacggttcctaaggcttggaacagcagcagtgagtgaagatttggccaatcgggtcaataatggccaggcattgcctttcgaaaagtccgtgcgatatcgatcataagttgaagttggtaatgccgaacccttcatagttggcttgtattctaaagcaggttcctccccattgtctagtttttccagataaactagacatttatcaaaagggtgccccacacgtccacactccatacaatactccggtaatctttcatacctgaattcaacccaaaacctctcccttgattgctgtaaagtaatcatcctacccctcaataaaggctttgtaatgtcaattttgactcgaacacacataaaaggcccccatccctcattgagagaatcttcaaaaacatccacgtactcaccaatgatattcccaagagcaatggccagacctttagttttgctaaggaaaggaagacatttaggtaaccttaaagtttatttttaaaactaatgagttatcatataatataataaactactatttttatttaccaattattttatataacttttggttactttgaaacttatgtgtttattcttaaattatattaaattaatttgttattttaaatattttatgttatttttttattttgcttttgtaaaaatatttgtgttattcaagtctttttttttttttttttttttgaaaataaagcgtattatagataggaacattagacctcacggtcattacaaaggatagtatcaggtatcgaggatggctccacaaaatctgagatattctgggcaaacgcccacttagccacattatgagtagcaaaattacaatcacgagaaataaacgaaaaattacaagataaaaactttttagagagttgattacataacaaaacataattatcaatattccaaatagagtgaactccttttagagctttgataaccaaatctgaatcgctctccaccaaaatatagttgttgttcttgattttagatgaatataaagtaagatggcacgccgctgcctcgccgatcagaggatcactaaaattgagcatggaaacaacagcccacaaaacagaaccagagtgatccctagccagagccgcaatacacatggaatcaccaccaaccttgacatcacagttgatcttgacccaatcttcaagcggaggggtccaaaccggagaaaccaccggaagcgtcgaggggaataataataaataaaattcaaaaaataataataaataaaagtggcattttcgtaaatatcttcaatattgtccgaattgggacgggacctggtattatccatttatttgggtctacgaatacaatggtacaatcggattggagaaactctgtgatttggtatatggtttggccatatgtctacagag

SEQ ID NO: 37222 - DNA, 5850 bp, Cannabis sativa
cccccggaaatttagacaataaagttataacaatttcaaacaacgctcctaattcgttgagtccaactaacaggactaaagtttcagcctccaacactgaaatttcacctgaaaaaacatcagaagaccaaaaaaattaataattagaaaattatcaagcttatcaaaatcaatcaaacaccaaaactaaatgactagatctccaataaaattactagaactagccaaagggaataccctttggctagtagcaactaaactctttcattttacttcataatcatcataggatcaccgatcactatcccatactaagatcctaagacctaaaaaagattttgatatgtagtctagtaacaacaaatattgcctgcaatgctcccataatctaggagatgaaatttcctttggaagtaaacaaaatagtgaaaatatataattaagcaacgaataatgtttctaatgtacccactatgactaatcttttgaggggttttctcaacgcaacgtggactatattatcttttgataatataacacaacacctaatccaaactaagctcgtggtgcttaatagcgcaaaattcctttgaaattttttatttctcatgaaaatatggaacaattaatcatattaccctaaataattaggggcaagctataaaaataagtgcaaaagccttaaaaggcatcaaagccaacaaaattgtggcacaacaaatcttcacaatgtattaacatttctatttatatgtttgtgaaatttgaaaaaagagtatgcataaattgattcaattcaattataaacgattaatccaatgacactcaaccatcaaacattaaatattaaattgtgatcaaatcaaatgtttgatgaggtgtccaaaaatttaatacaatcaatcaatattcaattgaactaattactatttttatgcatttttttaatggagatttatgtatttaatttatgtatataaaatttaagattaaaattttacttatttattatttttttttaattttttgtagattaggatttaatttcatcaaataaaatatttgacttaaaatagatccgatccagaaaatatcgactctaaaatattagataaatctaaaataatctaataaatatatactagatcagattcgttagcaaaatctaatatatagttagatcaaattttaaaaatatattagttataagctattttttgttaacaatctaataagcatgtttttgaaataaatacagatttaacaagttcttaatcttaaccacaaagaatatcctatcaaaatcaactaataattaatttcatttcaaacaactatctaagcaaattgagcatagtactcaattcaaaatctataacaaattctctattaaaaacttcattgtaaaaggagaatatctaattttaagaggaaataaaaatccttacaagaaatctcctacattaagaatctaagattgtcttttttctttatataaataaatattacatgtttttttggtatgggacgaaaccaaattaaagtttcaatcatattattatcttgtcattttctttataaataaacttttttattttttaaaaagaaaaaaagaaaaagaaaaagtggaaagagtgaactcgggcgagttacaagactcatgatctactcgttcaacttttaggtcaagttgggtgtgttagaggtcgtactttttattttattttaaaaataaaaaagaaaaaacgttataattttagaacaagaaacggtgtttgactctgcaaagtgcaaagcagtgaggaagagggtaacttagatctgagaaagctaacaactcagtggccagacgtaaaatgtctccacaccttcccgatttccatgtctaattcgagcttttccgtctgaattttcttctggggtttccttcattttccatctcaacccaaccagaaaactgtccctaaaacaacatatctatttatttaataatgcatagaccttattttcacaagctgattgtcttgtccatcatccaagcgaaacaactggtttttttctttattattattatttcttttccacattttttttgttattatttatgtcgattgattttttaaatatgctttttttgtttaagatttttcataccaaagttttagaattattagtttgcagattaggtaaaccaaaaagaaaaaaggacaattctgatttcgaacaaagatgatttggggtgaagatagtgaaataggattatgtgattttttcttaggttttattattatgactaaagcaattgtttcaattcatgttatactggactggtaatttcatttaaatttcgatgttaacgatgttatggaaggaaattagaaaacatttctgatactaattttagatgctgatactctatgctttgtggtcataaattataatgaaataattgactatttgttgaaattttagtatttgttcaatgccctgtgtgtaccttgaaatctgatattctgttgaatttttacttcatgttgatgccctgtgtgttcctaaagtgaaatctttatttgcttccatgcaagctgacatgcataaggctgttaacattgtgaattgttgaaaaggtgaccttgttcgaagtgcttctatgagaatttgtatttttctaccaactgttaactgttatcttgttcgttgttattgagcttgttccgtcaaatgaaattggctagtaatttaaatcagctttgcaatgaaccaataattggctatgtaattgatataaatgtttgttcatttagttccataaagttagattggaagtagattctcattgatctttctccccatttgcttaagcttttagaaaatcatgttactgttttatgcacattatgtcacaagagtttccttgttttctgtttcttccgtgagatttggatattatatctttagcatttattatatcatcatttgaattactttgaaatctgaatctttacctgtcgtaagtgattttataacgcccgttttataaagcaacaagttaaaacaaatgtgttaacaagaatttacttctaaatgatatggagttaagaaaacatcatggaaagttccttttgtaaaggaaatgatcatgtgaatttgaagaagattcattggcagtgatgcatgtcattgtagaatttacttgcaaaaagctacagttgcagatgtcaattttgatttcctggcaatctcataaatacaatacctttttaattattacaatatagaaatatgtttttttttaaataatatcttatgaaattttcttgtattagaattgctaacatttaagatgatctaaggacaatgataatgatatatctacatatttgaatgtcacatgttacttctatgcttttattttcgttctgtcttgaatactcattgttccatgagatggacgaaaacagtttttaggttcaatatactaatgctttagtggaatattgtgttcttgaggcatctgctctaaattcttgtattagttctgggatgatttttccaaggtatggggtgacaagaaagcgtagaagtctgctgatgtatagtatattagtatacctaagagttataagtcaagacttcttataattatagtggttctttggttagaaagaaacaagagatccagggacagatttggatggtttcaactttgggaggatagtaaaatttggatggctgtttggatctttagaacaaacgatcataatttccttgtagaagatgataatccactatcttatcatctgttgtaaatctttgtttttccttttgttttctctctctatctaatagaatatcagtttcttaaaatatgtgtgtgtttctagattgtataggcttgtgtttgattttatcatatttacaatttcttccagccaaaaagccttacttgaattttgtatttgcagaggatcccagataattttgtcaagaagttcagggatgagctttcaactgttgctacaatcactgttcctgatggtcatatttggcgtgtaggattgaagaaagctgataacagaatatggtttcatgatggttggcaggattttgttgaacgttatggcatccgtcttggttacctcttaatattcagatatgaagggaatacaactttcaatgtttatatatttaatttgacagcatctgaggtcaactatcaaggaaattctgtgcatagttctcaagccatttacaacaatagatgtcaaatctttgaagaaatggaagatgattcggatgaaatattggggttttcatctgggcgtatggcaactggtcccttgaaagctaagcttcttggtgaacgtgcagagcaaatggcacaaggcaaggttttcaatcccccatctctacagaatttgttcaatgggtctaaactgaactgcataaattggggcattgaagggaatatggatccagcaaagggtactggcaatttccaagcccaaaatcaattgactcaaggtgttcctcagttcaatgttatggagtctaaaaagtctggtgaggaagtcaagatgaacaattctgaagaagaactgcgaaagtctaaaaaagctgggaggaaaaagcggaaaattgattctagtaagttctttaaacttttattacttcatatgtgccgttttcataagagtttgttgtattaattgtatgaaagtgcagatgggcaggagcctcccatcaagcatgatgagacagatatgcgctttagattttatgaaagtgcttccgcaagaaagagaactgtgactgctgaagaaagggaaagggctattagttccgccaaaacatttgagcccacaaaccctttttgtagggttgtattgcgaccttcgtatctgtacaggggatgtataatggtgagttgttcaatgattcgatgtacataacttattattgatgttttccgttgcagccttggtgtaaatataccctttctgtctgtgcagtacttaccatcctgctttgctgaaaagaacctgaacggagtttctggattcatcaaacttcagacgtctgatggtagacaatggcctgttcgatgcctttatagaggaggtagagctaaacttagccagggctggtatgaattttcgctggagaataattttggggaaggcgatgtttgtgtttttgagatgctcaagatgaaggaagttgtgcttaaggttacagtttttcgcgtgcttgaagatgcaggagtcataaaccatccatcacagcacaatgtcaacaatagcaaactagtaagaaattgatggatggccggtatattttcatatgataaaccgtatcaaatgatgcatgttcctttaggtagtgatctgatttgttgatgtggaatcttggtgctgttcagtactcagtatactcgtccgaatgacttcatatagctttcttttctttcttttttgtctcatggctagtcgtttcagtacaaattttgttaatcgttattaggtctgtaaatagcttgtgcaatctagttgaatgtcaaactggactccttattgatccgaattacatctctcttgaagttggattctgaagactgaacactagtttttcatgtcattttggctatgatacttgtgtgtcaattgtgtatataaacatgtaaattggatccctttcccttatttttcatttgagttttaagttaagaatggtgttgataagcttaagcgctagaagtacaagcctgtgctaaatagtaaaataataacaataataacaaagcatcttgcagaataaaattactgaggatggtgagcccacaataatttt

SEQ ID NO: 37223 - DNA, 2115 bp, Cannabis sativa
taatatattatttgtgtaccttcttgcatgcttgcatgcgcatttttattaacgcatgtttttgtgtgtttctgagttggcctagcttctatgttttaatttcttatttatactaaaatatattataaaataataattaaaaattagaatatccactagagaagagctatatgtataaatgtatctgtgaagatatagattattaatgagattgttaaacacactaatgacaatgagtacctgggacttctacctagctacataatgaacaattacacaactatattaataagaacatatgttatcattaataggtcaaaatattatgtaaacatacatgatagttatggacaacacattgatacatatattgatatatttattatataaatacatatggagagagtatagagaggataccctagactataggagtggctattatatagctagttttatacatatattctcatgatattaagtttacttgctaaaattgattcatctgtaatatgtagcctcgatattacttgtatattaattaagtgccaatatgaagctaggaacggggagcaaaaactgaataaaaattggcaatgtcgcaccaagctaattatatataattataaggataactaattaatggttacatgcttttaaactaaaattaatgattatatttttattctaactcttgtgtgatggttacatttattttaaactagctataaataatgtttttaaaaataaaataaaattaattataattaattactttttaaataattaatttttaatttaaatatataacaaaactcttttcaactattaatatttaaaaatatattttttttatatatttaaatccatattataatttttttaaccgttcaaatcatttaattataatatttacaataaatctttttatttctttaacaaaattagactttcacctattctaaataaatttttgaataattgattagtttttgaaaatgacactaaattatttattttttggagaaccgcttgacacatctttctccattataaaaaaaaattctagttcaaaaaataaggtttcagttgcaacctaatatcatgtgaatttttcacttcgatacaatctttaatatctctaattctctgctacaaactcattcctccaatcaactagctatatcatgttctttccttttcttttcgattctcagttgtcttgtcgaacgaccagacccaatggtgttgtacgtcattcataaatcaattgacaataatgacaaaacgttattttaccctgtctacttacttcttttctgcatacttttttttttttttcattcacatgatgtcaataacatttcctgcatgatcatataatgtcattcagatataataattgtaatcatttttttgctaatttaaaaatttcataccaaagaaaaacttaaagtttaaaacaccaagttcatgatggacagtctagagaaaagaggcttcacctcctcaattaatcaatgttctttctcactgatcgcttcacaatgtaatttgtgccacttgtttcaaatatttttttttaacacgatgaggaaggagaaatagaaagaaaaaaagttaacttatccttaattttataattgttactcgatttcaaaaaaattatttatttattttttaaattaaaataataactaaatgacttgaaccaatctaaaactaatatagtcatttggaacttaaagtatttgttatgactatattttgagtactaaacatggacatgacacatgtcacataagtctaaaagaattaaggaaataataaatgcgaggaataaatgaatgtttcgcctcaaaaatatgttacggtttaaaagatatgatgacctcgcaggatattatttatataagggaaatttgcggcaaaagtccccaaaaagttcagtttgatacagataagtccccaaccttcaaaaatagcggcaatagtcctcaatgtcatgttttttattagtctgctggtctccaagttaatagatccgttaaacccaattcaaatgccacgtgttgaaatattattggtgggtattattattttaattttaaaaaa

SEQ ID NO: 37224 - DNA, 4565 bp, Cannabis sativa
tatcttaaatagttataacgtacatgaatatgaaaaaaaattaaactaaaaaaattttctgaatatcgaaacaaatcaagggtgtatcagtacatcccttttaagggagtttatggtagaatcactctatcttatttaatgtgatgtaagattttagttaataaattttagagtgatcaactttgaaaatatttttttatagtaaaatgtgttaaattttatgtaaatttataggataatatatttagtttcgacatttaattataaatgttgtctagttagagatgcaattctcttgtttacaatactaaggccacgacgtacatgacagatggcaacgaattatgaccggaagaaaactcgtattgttcttctcatcttttcgcctcacccttatcaatgatcatgtaatatcatgttgtcgttttcttttttttttttttttgattaacgtcgttttcttttatagttgtacgttaatacattgttgaaaaaaattattaactctctctttctctctcttttctccaaccactcagtttctttctctctctctctctctctcttacgaataaataaatacccacatatcttcatcaataataagtagtctcaccaaaaaaagtaaaaaaagcagaaaagaaatggaggtctcctctgtttgttcactatgtactaaattacttggcatagtcataactgtgacatggattttgagagctgcgaactgggtatggtttagacctaaaaggcttgaaaagtgccttagaaagcaaggtcttaagggcatcccttacagatttctgtttggagacttgagagagagctttaagatgatcaaagaggcaaggtccaaatccatcaatctctcagacgatgtcgttccacggattttcccttttgtccttgacacagtcaacaattatggtatgtttatttaattatgattactataatataaatgtttacaatatttttcaagctagacaaatatatatatgagtaatgatatatatatatatatttaacacacttataatatggtaacaactttaataaattagtcatttttgtttaagatagatctgacatgttaaaaatgacttgccattaaatttatacgtgcacaggttaatttgatacacacagttacttaattatcttatcttttcatttattatcttttcaagctaaacatgtttttagtgctacttggattacctatgttatctgtgttcctgactacctctgatttatatatggtccaaattaaaaacgtattgcctgcctatatcttacttctagctataaattattaccatatattatatacaaacatgaaacattacactgtcacttcagctctccttcttttatatattttttcttttaaagagtttacttaattattgtgtttatcataaaggaagttattaacacgcagcaatctgtatttatatgtgaagtaattttttctatttaggagttgtagaaaatatatatttttcttttaatatagaaagtccagttgcatgctggaattatcaagcgttagttattacaataagcatattcttaaacattaattaattaacataaaaaacatgttatatatgtattcaaaatatatatatatccagtgatatatatgtcagtcttttgaaatagctggttcacaatggggacggactcactggcaagcttaaagccccggccccactgaaaaacgaaaattccaattgagaaagtataaaagaaatttttaaagttgatagttatacaccacaataataaaaaaaagccctcatgaatattttttataatacttaaatccctccaaaattaaataaatttattaaaattgaaaataatttttatttaaaataatataaataattttttttataataattaagctgaacaaggcaaacttgtcactgggttcatctgatacaaaaatattcacgtcactatgtatatagtggtccttcatacacactggccaaagaaagggagggggtgtggggtcatttgctccttttaactttttgtttatatatttttttttttgaatattttgtattttgatcttataaaaataattttttttttatttatgttcttaagtatttttatatttgtccctataaaatttatactttattattttttaacacatatattcttatttgtattcttagaaaatttatattttttacttttatttttacatatatttatttttatattttttattaatactttaattttttttaccctcactaaaatatttgactgcctccgccattgtgtatacacacacattcatatattttttttaagtttcaattaatttctaagaaattagattcttattttaattaatattataacccggccataagagtatctccaatgataaaattttaaaagatgtttggtgagatggacatattatgtggcaaaacattgagatgctataccattggagagaggatgatgtcattttaaaaatttacatggatgctatgctgtaggattaatgctattcattaatttttaataaaaaaattaaaactaaaaagttattgtagctaaaaattagaatatataaaataataatgtgtgaaattataattataacatttttaaagagtgctatacattgaaatatttttaaaagtaagagtaccaaaaatgatgtggaagagagataaaataaaatattatatttctatatgatgcgtaaatttttaatatccttaaaggatgctattattggagatgctctaagtataacgataatatttacttaagtggcgtttgttaacacttttttaatcaattttctgtttttaaaattagaaaagtgaaaatatttttcaaaaatatgttttataaaatttttgtttcttaaaaacaaaatttttaaaaataaaaattttactttcattttgtgattaaaaaaataaaaaacaaaaatgtataatatcttatatttttttttatataagattaattaatataatctcaacatattaaaggatatggtttcaattaggggtgggcattcgatccaatctaatatttttttttctcatctgatccaattcaattagtaattggatttaaaaaattattatccgatccaatccaattagacctcaaaatccaatccaatctgatctaattgctgattggattggatcaattttttaattggatatctaattacaaacttaatttttaatattaacttaaaatatgaaaataaatacgtaaaataacaccattaatttttaagtttactactccataaaaatattattgttacacgtgtaatgtaactaaatgtttgaaataactaaaacaacaatatttctaagtaataaaatataacaaaaaatcatgaaaataaatacatagaacaaccaagtgttacaaatttgacaaaaaaaaaaaaagtcactaaaaatataattaatatataattttttattttttattatataaattaatttaaataattttttaatatatataaatgtatttggattgcatcggtttttagattttaagattgacattcaataaccgatcaaatccaattagaattcaacttttagtgtctaatccaatccaattataattggatatccattttttttgtaaatagattggattggatcagttcggttcaattagattgaattggatgttacccaccgtaaattataattataaatatatagataaataaatgagtgtgtatgatagaaggaggctaatcgaaaggtgtatacatgcatgtagggtcgatccaagggttttgggggccttgtacaaaattttaaaattaggatctttaaaaaaaaactgtatacattaaaactacaattctattagttttttgtttaagattcgttcataaattttcaattataaattttttattgatgtatatataataggaaaaaaaaataggcattttctttaaaaaaaaaaaaaaaaaaaatcgagccttaaaagaatgagagccttatgcaatggcccaaactgcctaaatttccaatgcttgggccggccctggatgtatatataaataaatatcaaatgaacaaataacgctagttatattaaaattattggttgcacacgtacataatagcatcgaagattcaaataagtgatacaaatgtaaaatataatttattttgttaaaagtctactccaatagtgtactaaatcatgatgcaaaaagcttacataagcgtttatatattacacaatacataatttgggactcgaaccatgacctccaacacacacgcaccctcctatggccacttaagctagcctcaagtggtttttaataaattattaagtaagtattaaataacatattaaattttacattaaaaattacaattatgtattggagcacaatagtaaaatttgatgtaaaaacatcacaaatctactttttgtacaaaatttacatattcttggagatggtctaattatttaactaattagatcgatttcacatgttttttttttttttt

SEQ ID NO: 37225 - DNA, 2275 bp, Cannabis sativa
aaacgtaacatgtcgagaatagcaatagtttgcccatatcatcaccaaaaactctcttgggattggtagcaatatatataggaataacacttgtgagtgtacatgtaaacaccacgtggcagatcggaggcaggcgtgacggaattgaccatttatagaaatatgggcgttttcggctgtacatgccacaaaattgaaataagggaaaggataaataatagtggagagattttgtgaggcccaactttagtagtataagattacaaagaatcttaaagagagatattttcttcaaaatctttcaaatttgagagaacttactcggcagaatccatagctgtgccttgaattacacaatagccatacacatatatatgacagatatctgcacgctctcatccctacatatcccatcaaattatactcactttctaatacttattaagatttttggctctctttattggacttgccaatttcaaacttgtttattgcttttttactctataaatatataaatatattatttctgcatgatattttattatgtacgacttaaataattaccaaatactattttattatacacttttttcatatatacaggtaatattataaatatcaaattacatattggatgacaaggcaatatatgataagcgatattatatatgacttatacgagttcacatcacatgccaaatataattgataaaatttctatacacatatatatttgaatatttcctatgattttgttgtttaaatctagcttgtgctgtagattttgcatattaaatttggataccggatatatataagaatacatagaaatatcatcggtataatgtcaaatagttgacttgccagttagaacatatatattggatgaagaaaagtagtattcccttaaagaaaaacagtattgagaaagaaagaagaaaaaaacaagtgttaaaatcttaatgaaacataatattaattaatttatataattaatgataatttgaaatttaattatccgattacaagaatattaatggcatgggccgccgactatataggttctgtatgttggctgtcattctccaaatccctagaaaggtcggccccaaagaatctcaactgtcttatgacaaattaattaaaatgaaataataatgttaattattttaatatgcacagtatgtgtacaataatattatattaacatacgtaatggaatgataaattcgaattaagttaagtactcctaattaattaaactaattatagcttgtgttcgacattacccaattgcaaaaggtcggtctattaagttaattaagaatctccaaaaataatgctaatttcagatttgtcggcttttgcaatatgtttttaaatttttacatatgtattaatgtatattaattaagtttggggaagttttaaatttataaatgcacttaattttaataatttttattttatataatatatatttaattatagtttttctaatctatattttttaaaaatatacttattaaaaataaataaattatattttaaaatattatcaaaaattatgaaattttattaaaaaaataaacaaaattatatatgatttaaaaaaattatgaaaatattattcgatcaattatatatatacgtacataatatatggttatagttattaattgcttgacttaattaattagatggtccaaataatattccaagtgttgatgatatataattaagtatttaatttaagtggcttttaaaaatgattatttgagagagagagagaggcatggggattattgtataatgtataagtactaggagtcaggtcaagtagtgtttgttgcagcgtacctggaaccatgccagttgccacgtatttgacagttcaagaccaaccatgcatgaagaaggaaaggaagggtcaagcaatcctatcctcctaattacactctactttccttatatatgtacataaaagagtgttttaatcggctatagaatctctatctaagaatacacttgaaattaaataaattatattctaattgagaggttataattaaatagagttacactagaaaaaaaattaaaaaactaaaaaataattgtaataataaggctaattagcttttttgccccatgaactttgacatataccgaatcatgctccctaaacatttatggccgttaaaaatatctcctaaactattgagattgttccttttcaaaaaaaaaaaaaaaactattgagattgtttgattta

SEQ ID NO: 37226 - DNA, 5468 bp, Cannabis sativa
  modified_base (28)..(44): a, c, t, g, unknown or other
tcacattttccataaacctcgttgattnnnnnnnnnnnnnnnnntacgtttaaaaatcacgttaacacgcctaggctagttagggtgttacagacctaatctctcggtaagtatctacttaagcttcctattcatctcgtggaattgaactaaggcaacctgaggatctggtaaaaatgtgagacgaggctaaaactttttggttttccatcacataaagactccattgtcgaagcatttgacacaatgcttacaggtcactggagccttcaaggctgcttatccagctttcaaagactccttctttgcctgttccttgaattcacgaagctccttcaatttgatagacattcttgttgtcgtttgaatgtcatcttggtgtagctcttcaaggtttttgagcttggacactagtccctgattagcttagcttaagtcaaggtaaaactatcatccttagccttcattgtttactgatgccattctctaagggccttctttgccagtgcctcattctagagggtctccatctgatcatctacctctttaagcttcttcaacacctacccaataccaccgtgctctgtgacagagaatccctgatcagttagtatcttggatgggcagcctacttaagttagcaaaaagtagtaaaaatgaaaatgtcaaaactgctaagtgtgggcttaccgatgttattgctaggctcatatctggaattcgatagactgggttggaggaagcgtagatagcaaaccaatttggcagaagctgtgtcaggtgggcagcaaagtgaattactatctctgaggcaaatggtgccaaaaagaaccccaaaaagttcgtgaaccaattggtcattggattaaggtttaagtcccaagcctgtccaacatactccgcccggaaaggaccatcttggttttccttaagccatttctttaaaagcctctgccactgcttcttcttttgtttgctcgtcaatggcataattgtgtttggaaattaggagttgaacacgctaatcgttagggttaatggggttcagaagaatcgatggaattgtggggaaagcttcagtctcagacgggatcctaaactcaacactttcagtaggagtcctggataacttggtctttttagaagaaccagagtcactaggcacaccctcttgtttccaatcaagcatgggaggctcctcctcttcctcaatcacgactacctcaagtttttcaagcatttcatttttatggcctctaggagttaccaccacagatggagaattagcaactgtaggatcagggttgtttgtagagtccaacatggcaaagagttcatccataggattagctataaaaagagaaaaaagagagtgaaaagcggaaacgtcaaacatgagaagtgcatcaaatgaaaacttaaaagaatagtaaacaagaaaggctaatcctaccctaatgtcctaattcttccctagaaaacttggtgtcatcatctcctaaaaaaatatctgaggtaaagaaccaacttgtggttaggaagaaatagtggtccaaaaatttggaaaccatgaggcttgaactcatttgagattggccaaggaagcacctcatgtttgaaaaaataaaaaaccttttccctatagccccactgagtatggggcatctagaacctataaagcctcgcgtcaaagctaactggccttgagtaagagtattcctgaaaacgaacataatgaaaatttaagggggacttacgagcggtggaagtactagatctgagggtcccaaaattcaaaactagaaaggggaaacactctaggtctaactgtcctgatatgtacaatcttcatctactcatatttattgctgctcagccttaactttgcccttacctacacatgtaaacaatagatgtgagtcaatgactcagtaagaaaagcataaccataacataaacttaaattggattacgactaggcagccatacacccaatcataaccctatcccacatcccacgcatactgagtctagaatatttgtatgccagtactattgatcatagtatatcagcctatactcggtactctagtcgtaccgatgtgatagcgtcaatcaatactcatgtcaaacatacattcatctatatccaatataactctatgtatactaatattgctatctcaatatgttatctaataggctttcataaacatgcacgatatacatgtaattacatatgcatatcattatactaatcttaccttgattctgaatttagatgtgtcggtcaacctgagtggaactggtgcttgatagtttatagttccctaagtcacaacatacacaaaacagataagtgatacgctaaatcactttctagggagttaaaatccattacacaagcttgcagcatatcctctaatataagtggctaaaagtgagatgtttcaagtctctacaaatagttggagtatcttctgggctctactcctaagttccagagtgaagggggtcagaagtaggatggaatgtgctgaaatctgatatggttggtccccatgttcttgaaaaaaatagtaatcctcctcaaagccactaactttggacatgtcggtgtccgtggtaccaacaaccaattctcttcgatttaggagaagtataaatacctaaatgtattttccttggagttgcacttaagtcaaacagctaattggtgtggtgggctagttgaccccatccttgataagcatacatcacgaacgggggttacaggtactttatgctcttaggagtcaactgtgttagactgatgtggtaataatttgtaatctccttaaagtatggatgtaatggcaacattgcatcctacttagcatctagtcccaaccacgcataaaattcatccccaggatttattgccagctgcctaggactagaaaggaaaaccttgaccttcccaagaagaccatcctcgtagagattaatcaatcttttgtaaatcaggagggaacccaccaagcactcctggaacccttgttgtttataggtcaggtctcgatgtattcctcttcaacatagtcccgcctagctaccaagacttcaccatcatcaaagacagtctctctgtcctcattgaagcaaccaaaaggaagcacctaaacttcctcctcttctttctcaccttctccctcaaccttgggaggggtagtagaacagacctttccttggtcctccacctcttggacttcaaattccccatctgtaatctctccttccttagtcgaatgtctagcttgctccacgccatctgcaacaaatagccaagtaaagtgtggatcagtctctgaagctttcttaattgtatactttgtcggcaccatcattctacgcttgggtggaggcttaaattcagtagtgtgccttgcaacagttacaacaaacttagcaacaacaactctcttagtaggtagagcgtggaagactttgggcagagtgtcagcaaccctgggttagaccctataggtcctagaaacaggcagataatgcctctaacatttcattaactcctgaatgaagcacccgtgcccatctttacatatttgatcgaggtgctggtgatgttgtacctcaggcacaaagacggtgtgtgcttggtactcacttccaagtcttcaaagctagaatttgaaaggttatcactggatgaaaatgaacttacacggagtcgaggaagatctttgtagaagagttggagtaagtcctagtcgatatcatgcttgcatccctagaaatcactagagttcgtctacaaaaagatgggagacaagaaaataagagttgggcagatggaaagttgaaaaataggctttatatgccgaccaggcaagatcaaagacaaaaagatgagatttcattcgaaaatagaattcccaaacccagaagttcaaaacctcgaaagatgcctggaaatctttagaattccatgaacgactaaaaattaatgacttcgagtaattaaaattgacacgcaattaaagtaatagaggttataatcaaatgttagtcaaagttacaagccctaatttcatctatcctatgatcagtcaggaacagataaatttgcagcaagaaatctaataaaaaagcgtacattcaatgaatattgcataaagtagagggaaatgtaacttactcatggtttgaagcctttttatctgcttggagggtaacatcaatggattttctaccaacctttcttcaaagatttgagagtaaatacaaaaaaaatctactctggttctttagaaatgaaagtggctaaaagatttccgtgaaaggttgaacctcttttataggcatctataaacaaaagttaattcatttaatattcaaaatttgggttgtccccccaaaagtgaacgttaagtactcattatgaagtacaaacgtcacgcatgcggtatcactcaattgtcagtgcatgagttgaggtacagctttcaagaggcatttaatgccccagacactgaagagactctcaatcaagtcacatcgaatcaacttcaacaaccaagatacgcgtcacccattcggatagcttcctagctgaatgaagttcacgtacgatcagaaaggtcccgtgcagacttgaggggtaaaggttatcttaatttttacactatgacctgacacctaactggacgacacatgtcattcatttttgaacatgggtggatggttttactcctagcagccaataaatattaatataaagatccaagttatacgtccatagcaggatgtcagagtagagtcattcttgaacatttgaccatctctatcgtgtgataaactcgcatgtaccagctaggaaatgtgaattggaaatttcagaagtgatcgatactatctccaaatttgcatgtcgcgaagcaatctttacttttgcgagattaatttgtactttcagagaataaagtcaatcaacctagatttcctaatttcctcattgtaattataaaaacaagttaatttcctattttatcttttatatattaagggaaacaattcttatgtaagtagcccctatgaatactggtcttatttccctattcaaggacacaaaattaattaagaatcactgtcgttggctaaaagcgggatcgacagactaaaaaccatgttatcttttcatttctacaatttaataattttttttatatttaagcactagttttaattaaataattatatctaaataattattaaataaaaacacaatttaaatgttatttattaattatgacaacaaaatatcttaattaataattaactctttattctctatttattctaaaattcaacaactttgtggaaaattcctaaaattgataaaattaataatgtgaattttaaatgaatcaattatagtaacctactattaagcattatcgtagatattgcgg

SEQ ID NO: 37227 - DNA, 5047 bp, Cannabis sativa
atagttcaaggggaatttttaacggccaaaaaaattcaggggcatgatttagtacatgtcaaaatttttaaataatgttttaatgtgactataagttatcagtacaattttagtacaagaatttatttaataactttgaattacttaaaatacaatttattaacatttaatatgagttaattagaatttttataactattgaaattattagatttaataactttgtctaattttatttaattttactaatacaaaatcatacttcttgatttttaacatgtaccaccaaattatatcacctaaattttcattcatatcagattttttttaataaaattagacaaaaattattaaattcaaggaaaacttttaagggcaaaaaaaaaactttacatattcatcttctttgattgagtatgaaatagctttctatatttatactaactatacaatttactattaaacccctataatctttcatgtaactgacgcttgtatttttgtaaataaacctcgacttatatagaaaatcattcccattctaacctgtaatggatcaaagtattttttttttttgtgaaaacaaactcaaagggagtttttcctacaatgaactgttttactttgaaggtaaattattgaaacttattaaatgagaagaagaaatggccatggctagtgacttctacaagtgttatttagtctgagtcagttctaatgccaaaatttacatcttacccaacagaagatagatgaagaagattacagtgaagcatgttctgaatatgaacacatttgtgtttttttacagttcatctttagcaacaccacttcttgcatgcccagtataagatgtgtaagctttgattatagattcatagacttcaattcctttcaagtattcagctatgttcaagaactgcaacaaagtttcaaacatgattcattattaaaagattggaatcgatttgagacgacacgttgaaacattccagcagggatgggattacactcacctcattgtggtcatggagaagaatgggagtgttggccataggagagaatccaattgctggcaaaccttggtcccggaaatagcgagcgtctgttgatgcaggaaagatttctggcttaccaagtttcccattagcttttttcacagcttcttctaataggttccaccaggggtttgaactgtcagttgatgtaatgagcggcttccctgacttatcaagtacagccattttctgtatgaactgaccaagctaacaaaagtatagttagagcaagtggaattgagctcattcaagccagttaaattcttggcaatcaagccaagtagacgagccattttttatgcttttactctgtctctgcttaatttaaagggggtattcaagtactcactgcatatagattatattaagttgcatgctaatttatgtaaataggctaattagaatttttgcctcctgaattttgacatgtaccaaatcatactctcggaacttttaaggtcatcaaaattccctctaaactaatgagatttgatagatttaaggatgtttgtccaattttagtaaagaaagtctaacatggatgaaagttcagtgggtatgatttggtacatgttaaagtttgagtgacatgatttggtagatatcaaagtctggggagcatgattagaacataaacaatcactgaattaataaaattgaatgaaattggacaagaatctttaaatccaacaatcttaatagttcaagagacatgaattggtacatgtcgaaatttaagacacaaaaatcctaattagccttttagatatgctcaataagattcacaaaacaagatcattaacattaacatacttcatatgcttacatgttatagcaaaaaggaaaatatattcccaaaaaaactaacagtgcaactatgtatagttcaagtagaaaagtaacgagtaattaccctaaatgtcatgttgcgtgaagcaggagcccattcctcggcgatccgtctctccaaagacttgcaatcagcagttggagggatcctgatatcaaaacctgcttctgcttcagatggctgcaagttcataacaaatccctgatagacaaaggaaatttgttagtgagtgtcactaacaaaattaaagaatattaaattttgtccattcttcctattttatcactaagtgctcaaacataagaatatgcttgtcaagcttagaacttatgccttgaacataaacaaactcaacttcataaacctctcatttagagatcaactgatatactcaaatgatgatggtagtgctctttaatttattaatcatgcaagtcacacattagctaggagaagtcattattcttaataagatttaataaacttttcaatcattgttgattgtcataagaatcagatttcatatcccacattcttgttgaaaaaattcgtaaaaatagtcaagtatcacattgagttgaaagtcaaatcaaactcgatcgagtgactaagtagcatcaaggttgtaaattaaatttgcttaagcttctcctatagacttctttaaataccattgatcatcctgctagaatcaaattaccagtagttgactcatagtagctttagtagatttcaactgcagtcacttcaaaaacagttcatatcaaattgggcatctccaaagcataggcccaaatgaagttttacttcaaaatggagtaaaaaaagctcctttaattgatatggcaaacactacaaattgagtagtaaacagtgcttgctccttcaaatatgaaatctataaatttccaacttctagcttattcatcttcattaacaacaacaaaaataaaggaattatgtccttaactagttaaactttgccttaacacttctttcaagtcttcatataaaattttaatacaataagataacaaaattcagtccaagcaagataatctaaggtgacaaactatataaatgaatcacttacagttggagatggggttccagatttcagaaaagccatgttaaccgagacaacttcaccttcttcctttaagcccgccttcaccaaatcgaactgtgaagcacgaaacttcctgatactctcaatactcttcatcaaattctccacagcagtgttgtcatatagtttggccccatggccaggtgctcctatggccttgatcaccagccaccaagggctcctctctgcataaaacgccctgtaattctcatttggcgacgccaaacctgttttccaaaaacaaaagttaatcattcccacaatgaagtagcaaatattcatatttaaaggctaatgaggatttgtggcggggtcacgatatagtaaaatgttaaagtttgggagcacgatttgatatatgtcaaagtacagaaaacatgatttaatatagtgaaatttgccaaattaaccatttgaaatactaaaatttgtaaaaatgacctcacttgatttactctatgtgaccataatagttgtacagtagaaatctatggacgttttgcgatataataatcgtttatggtcgcacattataattcataatcatttttgcaactatagaaagttattttgataataaaatttaagaatttttttatttttacactttaaaatagtattttttatatttttacgaaaattcacataacaactaacagatcaacctaaattacaacaaaaatccacataacaacctacgtagaaactagcgaaaccaaaccgtaaattttaaaaaaaaataatatacagagtaattcttttaaaaatttttgtaggattattaacaacaaaacacagtttaatatatgaacaatcagattgtcttcttagtaaaattgaataaaattatacagaaataaaaaatttaacggtccaaaaacttcaagtacatacatagcaaagtttaggaaaaataatcctaattagcctacttttaacaagtcatttacacaagattcaaagctatggcagagaatttcaccttcatcaagcacaatacccacgttcaatttctcaaaaacatcagactcagcaaacttctcagccccatcatggccaccaatctcctcatcaggaacaaaagaaaggtaaaccgaacgaaggggctgaaacccagaagccttcaatcgacgaatagcctccaaatactgcatacccacacacttcatatcctgagaccctctagcgaagacattgccctgggaatcgagataagccgataacggatgatgattccatttctcgtgctcggaagggactatatcagtgtgggagttgagaagtacggaggggagagaagggtcggaaccaggccatttgaggagaacaacgggcttgcccttaacaaactcgatggtttgggattctagagagatggaatttgcctgagatatgatgaaatcggcggcttcatagtagtgaggagtgggttgagctgtgtcgatttggaggtattgttggaaccttgatatgatcggttcagatgggtgttcttggattgaagctgttgatatggtaaacgagtatagaaagcatatactgagaattatatgacagttgtttttagccatgtttatggaacaaagcttcatcttcatcttctccttcctctttctatgttttctgtaataagagagatatgataaaagatgcttcaatcaatttttttatttttttttcaaatgtccaatcaatttttttagggagtgaaatttatcaatctcaaatactacgaccaaaaattactaaataataaagtaatgtattatgattaaaataacaaattttaacacaatataaattatactatttaacacataacaaatagtcactatcaacttgtattattatatttaaaaatgatctaagatcaacttcaatctacgatccaaatctagggacccagaccaagaccgaacccgaacttggactgaactcgggcatggacttcagacctaaatcccggatcagaccggaaccacgaaccacagactcgaacaccgaatcgaa

SEQ ID NO: 37228 - DNA, 2534 bp, Cannabis sativa
tacaggcctagcccgcctatacccaagaccggccctgcttaaaatgagttattagtggagaaaattactcaaaaggataaatatttagagttcacttaatttctcatttgcagggagaatcactttgatcaactcaatcttgatatccacatacacatattgggcacaaagcatgatactttcaaaaaaaagtcttacaaaaagttaattcaatttgtaaggcttttctatgaaaaggagtagctgagttttgggggtctgataaggtgtcaggggaagaagcatgaaagccaaagaaagaagggggttaggtttcagaaaaattattgattggaatgtggcagcaattgagaaatatgtttgggcaattaccacaaaactagacaacttatggatgtgctggattaacagtgcatacataggagataaagattggtgggactacaaagctctaccattaaacagctggtacaaagagcacttcaagacccaaactaattttcagcagcttctttcagggaagtatagtatccaacatgggtacaaaatgataacaaaaactcaaccaaagcattattagcctgatatggtttggagtagattaaataacccaaagaaaaattttattttctagttaattgttttaggaagactacaagagagagaaagactagccaagtttaataatatatgtcaagtatctagatgtgcagtttgtgaatatgctgatgaaacagttgaacatttatattttattgtcaatgtagttctaggtgtcttttggagctttaaaactggttgcaatggcacacaaaactcactacaacatctcggctgataaggtggacaaatcaggtaagattaaatagattttgaaagcaaatttatgcagcgagtatggctgctatggtatgcagattgtggcaaaagagaaataataaagactcttgtacaaagaattaaagagaatgtaaaaattagagcaagattatatatgcctaaaaaatatcccagaaaaataaagaatgatttgatttattgtaaattgtaaatagaaaaacatacttattatgttatccaagcatgggatagattgtaaaaaattgattgatatataaaacttttcactttcacaataaatatatatgataagacggccgaaaaatgaatatttttttttttgtaaaattcttaagtttaagaaaagattatatttttttgctgataacatctaatacttatcatatttaagatatactcaaaaagtaattcatatattatgataaataatttgctgataacatcatttagtattcaaatagaaataaataagcataaatttcatggttaattaagattttttgctccgaaatttgacatagaacaaatcaagcccccttaaattattgagattgttaaatttaaagacttttgtgtaatttcattcaattttactattttagtgattgtttataaaattcagggacatgatttaatacgtaaacgtttaaagggtaaaaatcctaattagccaaatttctactaaaccattcaaatcatataacatcgaattacacaaacttgacatatattattgtgtgatgactaatttttaagagcattgctattgcccattaccttccataagtgtcaccctataattggttagccatcttccctagaatttattttattaagttatagggaacccgctatttaattacaccaataactatatggctctttactaaggagagtaataggcattaccaattctcaatttttaattagtagaatctgtcttaaacaaagataattgtgtgtatgtgaagagagagattgacaacttcacaaacggctaattaaaatttaaatgacatattactactaaaaattataaaaacagttaaaaataatgataaaaactgcattagtacattacacaaattagtgtactgtataaaatatttggtaatttcaataagaaaaaaaaaagaaagaaaagatgatggagaagtggagaagtgaatatggaaggacagatgacagagtttctcgattcaacacatatatagaagacggatgagttagttacgtacctaattgctttggtggcttgctataaaattcacgttgactaatatctgtaataatagtggcaacaagttgtggaagacttttgtcgaacaccttcttcaccaaataaaatgccactaattcttcatcgcttggaataaatctgtacccaacaggcagactcccaggcagacttcctctaccggtcattgttattgttataactaaatatatgtatttatagttatatataataaataaatgtgcgtgcatctttcactcgcattcattctcttctatgccattatttatatattcccgttttttcaacttggtgttggaatagattttccttttttttctaggtcattaaagatattaataaaaaatagatttcaaatacaaaagaatttaaaatcaatatataatcccatcgacagagttatttatcttttttt

SEQ ID NO: 37229 - DNA, 5934 bp, Cannabis sativa
gatcaacaattccctgatatgttggagtttgagaatgaacatggctgcaacacacatgtgggaattaagtatgagtggaaaccgattatatgcaaccattgtcacgggttggggcacctgactgatgactgtaagaagaatgtcaaagaggggaagatatgggttgtgaaagaagatcatagacaaaaacaggtggtttatgaagatggctttatgaaggtcactaaaggaacaaaagtgaaagagagaacacacacaacagaggctatgagggtggaaaatgccttccaagctttagattctgaacaagcacaacaagaaatggcaagaaacaacgaggaggatactggaaatatgagcaatactggagggggggagatccctctctcacaaatgaataagtttttatgttggaatgtcctgggagccaacaatcaacaaaaacagagactaatcaagcaatttattagtcatcaaaaggttgattttgttgggctccttgagacaagagtcaaggctcttaaattaggaatcttgtactctaatgtgtttgagggatggtgcttctcttccaatattgcttggcatgctagagggaagattgtaatagcatggaatcctgtaagactcattgttgatattattagttgcacaagccaacttatgcatctaaaaataacaacaatggatggaatgtttgatagctttgttactgttagatatgcctcgaataacagatcagaaaggagaattttatggaaggatatatgtgatttgaagacaagtgaaagattgtgtcttatgggagatttcaatgagattctagcaaaagaggaaagactagggcatcgggtttctagcagccctgatttggattctttgcaatgtgtgaacagttgccaattggaagatataaagagtagtgaaaatttctatacatggtcaaacaaacaacatggagatgatcgtatcttctccaagattgatataatgctggctaaccaaggatggctgaatacgtatgagaatgctgaagtagtttttcttaatgagggattgttcgatcactcacttgttgtgctcactcaacatccgcttgtaactagtggtttaaagcctttaaatgctttagaatgtggaaatcccattccaagtatgaaaatggcttattaggcatctggtcaatgcgagtaaatggttcaaaaatgtttcagctggtgacaaaattgaagagcttgaaggttgtcctgaaatacatcaacatggagggtttttctaatctacagatggctgtctataatgctaaagtaagattggatgagctccaaactaacctgcaaatctgtccactgaatgaagaaatctagattcgtgtaaaggaggcttgggatacatacgctaaggtgcaaaaagattataactcttttttacagcaaaaggcaaatatggcatcgattcaagatggagatagtaatacaaccttatttcatgcaagtataagacaaagggtaaggcaaaatagaatcttttctattgaacaacataatggggagagagtacatgatccccaactggtgcaagatgctttcattgagtactataagcaactgcttgggactagaatggagaagaggagagctgtaattgatgggatattgagaagaggtcctgtggtaactgaggtacaatctgagatgttgatgaggaagtttactcaagatgaggtgaagaaggctgtgtttgacatgtctgggtctaaatcacaaggcccaggtggttattccagttatttttaccaagataactgggataccattggtgaccttgtgtcccaagctgtgatctcctttcttgaatctggtaagatcctcaaggagataaactcaactatgatttcccttgtccccaaggtaaaatgtcctaacactgtcaaatattttagaccaattgcctgctgtaatgttatctataaaattgcaactaagatgttatgctccaggctaaaatctatccttccttctattatatcctcttctcaatggggatttattaaagggaggttcattggccacaatataatgattttccaagacttggtaaggcattatggtaagaaatcaaacaaaccaagttgcttgattaaattagatcttcagaaggcttatgacacagttgaatgggggtttatagaagaaatgctagatggattgcaattccctcctaaatttgtgcatttgataatgcaatgtatttcaactcctagatgctcactcatgtttaatgggactctacatggcttctttgaaactaggagaggactaaggcaaggggacccgatatcgcctctactctttgtaataggcatggaatacctatctagactcatggggaagattggagaaagggaggatttctcttttcatgataggtgtggagaattaaaactcaatcatttggcttttgcagatgatgtgctactatttggcaaaggagagacaaagagtgtgatgtacatgttacaagctttaaagctcttctcaacaacatctgccctatatccgtatgctaataaaactgctctttattgcagtaacatgaaggatgaagacattgaacaagtgctcaggtcctctggtttcacaagagggaaattgcccttcacttacttaaggatcccaatcaatgcaaagaaaatttctgggacaaattgtgagattcttgctgaaaaaaatgacagcaagaatttgaagctggagtacaagaaatctgtcatttgcagctagaacaatgttgataaattctatattgatagccatccaagtgcattggagccaaatttgcatactaccaaggaaagtatactgaaggattgaagcaatctgcagatcctttttgtggaaaggccaaggaaactatgatggagctagctcaattatctggagcagggtttgtactcctaaatcagtgggtggtttagggataaaaaggttgaggaatggaataaagcagccatgacaaaatacgtttggcaattgcaaatagacaagaaagtctatggatgaaatgggtgcatagtgtgtaccttaggaaagatgaatggtggagccataatgcttctgtccatgccagttggcactggaaaaaacttgtggccttgaaagatcagttgaagaacctcatcgatatacaacagttcactaggcagagatactccatagcagcaggttacaagctgtttacccctgttgatatcaaaacaaaatggagtaataaggtatgggctcgactaaacgccctaaaacattgccatattctgtggttggctatacacaacaggttgaaaacaaaggacaggcttctcaaatttggcttacaaatggaggaaacctgttgcttttgcaaggaagaaaaagagacaggtgaccaccagttcttttactgtcagttctcacaagaatgtttgcagagaattaaagcattacccggatggataggagtgagtaaaagcatgcctcagctcattcgatggattggaagatcaaaaaccagcaagcttaaaaagttggtgttggctgcagcttttgctacacttgtttacaacatatggaaagcaacaaatgcacactatgttcatgcctaagaaaaaaaaagagagaggagaggttatggtttaaacattgtaaaagttgtagttagatattaattctttttgggcctctattgaggttcctataggttgtacaaaaattatttagagcaatacaaattactgattcataaaaaaaaaagattgaaaagaatatttgaaactcatttttggaaggatttaagattacttcaatagagataattttaacaacttgaggctagttcaagtggttatagagggtgctagggatgaagctaaaaaattattttagatgggataaatatttactagaaatatatatataaaaaaaaaagataatttcttatttaaatgtattaattccatttttttagctcttgcaaaattttgatttaaatcataattatatttttttattaatattttcatttgaatagaataactaaaatattctttcaaaaaaaaaaaaaagactaactaaaatactcttacaaatatatttataattctattaaaatttaaaattaatgttaatattttttaagaaaaaaaaattatgcaaaaataggtgttgaagcaaaaaagaaaaaaaaaattatggattattttattattactaagtattgttgaaataattattgaaaaattttatatactattatctcaaaattcgacattactaattaattgattttaaaatcaaaaaatgtatgcatataatttcaaattgtaaataataaataatatatacaataatttaattatatgatatgatacagaatcttaacatatatgttaatcttctcatgcacagtctttatatctaccgtacacagttttaagaatttacttggaggtacgaaaggtgcgtgtgtgaggggtttttggatggaatctcaaagtgtgtaatctaatatgtatagacacttcaataaaaaatatagaaagtaatattacttttactgtaataattttctcatactcaaagataaatatacaagtacacttatactcaaagaatataatataaaatatatgtaagtatgtaaatagataaaaaattatagtggttcagcaaaaatttggtctgtctagtccacttttgaaaaagtcttactctgtaatctatattttattattcagaatcagcccttttaaatggaggtgggttcacttacttataggtagagtgtgaaccttacaaagttatagttagagtgagactttacaataataataggcaattaatttgtactaattatatctattatattacaaatataatgtctaatctaacgatgctcgaatggttgatcgttgatttggtatgtgttctcacattttctattaatactgcatgtttagttaatattgtatggtcactttttgatactgcggggtctctttaacaaggtccttcctgcgagggagaaaaagtttattctattaacacacgcccctagtgttgggcaaatatgcttacaaaatcaattttatttttttttttacgtaaattaatatttaacataaatattaattttttataacatcaatatcataaattgagcatagcatacttatagagctgtagcacagcaaaataagactctttctgtttagtgatctaaaccttgatcttttatatcgcatagtatgatcaatcactaaacttggatcttcaatagaataagaacacaacaatttttcttcaatttcttacagtcttccagagagatctaaatgttgtgtaatagaattgtgtgataattgttacaaccactattaaaaaataacaagagaaagagagagaactcttcaaaattctagagagagaaggagagattttttttctaagttttctgacactcttagccaaagctctagcaagaaaagaaaaccctaaacattttcttgacaattaattaattaattaattaaacgaaataaaagagcaaaaatgtagtctccaagtaccattggtcgaaattcctataggaacgggctagggttatgctcttcattatctcaaaactaaatggacttaagtaatacctttcttttttattatgtcataatcaatttatttcttacatttaaatattagtgtttaattaaataattatgtaaagataattattaattttaataaaaatattatttaaatacttattattaatttcttacaacaaaatgtctaactactaatgaaacctttgtgaatgttggaagcaattgattattattaattgataaagagcctttatataggcgtgtacatttacaaggaatactgatatatactacaa

SEQ ID NO: 37230 - DNA, 6847 bp, Cannabis sativa
  modified_base (863)..(877): a, c, t, g, unknown or other
ccctaaactcacctgggttcatctacaaaagacaacacgcgagatgagtgtttggtcgggatatcgaacattaaacaggaaaatatgcttaccaggagtacttagcagattaaagaataaaaatattcgatgaaaagtcaaaactcagaagtatgaaatttttgtgagttagggccaaaatttcatgaagcttaaaataagcaagatgaaagacaggcattgtgcagttcaaaaagcaagcattatgaacgatgaagtcgcatgaatcgttacaaaagaaaaccacagagtttctaagcctaggattttctacataccttcaacaacatagctaaggttgcattcagaaaataaatgtgcaaaataaaagtaaaagaaattgagaacttactcaaggatcgaacgtctgggttcaggtcgcgcaaagttgaacgaacgattctcgtgaaaatccttcagcaaacttgaagctaaaaacctctcttttcgctctgaaattgcttagcaaagaaggttggtgaaaatgagtttgttaacgaatgctcgatggtattcataggcaaacagccaaaatacgtaatcatttcgaaatacctcaggcgcctcggttcccccaaaatcaaatatgggaaatcaaaagcaatcaagtgcaactgtcaaacgtggtgagagaaaatcagatttcgaagcattaattgcgtcagagcatttattagtcgaaaactgaagggacgcctagtcagcctcacatcgagttgcaaacagacgcgcctgacacgtgtaacctatctaaaagcaaagacagcttggatgagtctacacgcaactttagaagtcctgtacagacttggggggcaaatgtnnnnnnnnnnnnnnnactctgacgtggcatcactcgatggttacacgtggaatcgactttgagtatctgctcgcaagacacaggccgaataaggcacctcacacattcattcggacgaagtcctttaagcatagtagtgagcaatccgcgcagaacgccaacgcttagcgaattcaactttcacatcatgattaatcaaggaaatccctataattttgggatcacattacagagatatgggaagcggtccaaatcacacgattagtgtattctgtatttactatgcaatctttctgcttatatcaatagtaaggagaagggaaatacttcctctccaagcttatagccctataaatagtgattcatagtcactgggcaaagggtcgaaattttttttctaagaactcatattcagagatactgttgtaagagctctaagaaaaggaactattctccttgttcttaagtcaatacaagtaacgaggattaggctattaccgaactgctcgggactgaacctctataaaattcttgtgtctttatttgatttactatatttcaattgtattaaactacttgttgcttataaaattagactcactgtccttggctaaaagcgaggtcaacagctggtgttgctgatgttgttgtggcaacgatgtgttcggtgacggaacatcggtcgccccagtctcaaagactgaagatttgactctcttcacactgggattaggggaagtccttgatccattgcgctttgacttggcttgggttaccttttggggtaagacgagtccgtccaaactatcatcagaacccccgccccatctagtacggtgttcgggattgattctcctctaaggggaattacttgagaagattactctccgatagttgcgagcacatcgtgagatttttgggaggtactagaccttttttccccactagctgacgttgaatggctaggtgcgataagcccagccttggcgggtggagaaatctcttggacgtctaacgacgaggaagtcaatgggggtggtagtttgcaagtcctagaagctctagttctggtctttttcttccttttctcttggcatttcctggcctcgtccagagcagccacaatttggttgtttcaagatttcaacatcttggattctagtgtttcttcacaacaagtcaacaatctgggtaaataagaaaaggcacgggaagtcatacggtcataataagaaataacaatagcaataaagaaaatctagtaaggaagtttgtgcgtgggtgcaacaatccagtgaagttctataaggtggtccctaggcaaaggctaaaatgctcctatgacccatgaagctgccatattcctcaaattcatgaagggacatagtcattaaagggtcaactttgacaatatctgaaggagtccccaggttactagggctcctaactattaggtctactttgtttgtataaccttcaaggggaatttattggggtttatgccttgaaaatacgtgtcaaattgtcccggattcctccaagacatgcgactcaacctccgggtacggaagatgcaaaagggtccattacctcttcctaaaatactggcacctggtgcccccgtgtcagggtaggagctagcaaatctcttcgagatttcttcttcctcaggtagagggtcaggatggcgagccacccactcagactgtagggcatggtcattttggcctgcattggtgattataacatcaaaactagtggtgattgcttccttcactaccttgggaggttgacgctatccccaaaggctgacagtgtcaatactttggaacttggtgatcaagcccgacctacaaaggagttttgttgtcaccaggccctcaaccttcaatttttcttctgagaaggccctgtattagtcttccttcctggctatgacttcagttctgacactctgaagaggaagtccagctataaatcaaaaattttagtccatagacagaaattggtagagtttggaaaaaaacaaaactgagaataaactgctaaaatacctaggagttgaaagctaaactgaagggaggacaccctactggtaggaaacctagaggaatataaccaatatttccaaaggtcgtgggtacaatccgtttgaaaaataggatagtaggagtccaagcatttatctagtaggaaaaaccctaactttgacatatttgtcatcatgggattggccttgacactgtagaagtaaaggatctcctcaggggaaagaacctccagttaattaattttgtggaacacgtaccacccagccaagagtcagtaggatgaaggaatcaactgaaagggcacaatctgaatctttacaattagactcgtaaaataggttcggaaagggagatgagcaccactagaaaaacgggaccaactccatgcactaaacacatcaacattggtggatgcagattccccaagcaccaaaagcctgtgccacgtcagttcggggacattgcggaggccagcgacttcagagtacgcttgctacatcccataagattgaaagcaattggattttagtccatctcccatacggactcaggacggacctacactagcgaaggaatttcccccttttgcctactcatgttgcctataagaagtcctctctcagttatagcttcacattcgtggatggtttctaagatctccacaagctgtggtgttgccatggaaactccagcctggtccttacccacagagaacctttcggcgatttgaacaggttctccctcgacggacatggctgcaactgcgaggggactttgttcaaatccatggaataaagagaaaactctttggaacaatgaatgaatgagaaaccaagattttcacacacactatctcactacacggcccgagtacggacctagccctaacccaagcaagaacctttcttgtcctaaatgaaaaatattaagaaactcaagcagggggttagttcactcacttgacaaaatagaggggatagttggtgtctacagaaagttcgcctgaaagctccaaaggcaagtcgatgcagcagtcgcagttaaattaatatctaatgttccctctgggaaagaacttttctagtttagttgaatgagagcaacatctggaaagagctccgtgagaatgatgagtagacgctagatgagatcctccaattccttttgcatgcaaaaaatggaaaagaaaaggaaaagcaaaagtcagagagaaaaaaacttctgtttttagtaaaaaagaagaaaaaatgataataccgccacagacagtgtttatttcaaaaaaggagatacggctctgtgagacaaatggcttgaaaaggttaatatgaatccaacgactagggaaacgaggggcctcatatgataacccttggggccacaaaaataacaaggtcattctcctcatgtcatttagccgccaataatgctcctctttccttgctaagcacgcttttccatacacaaagtggagtagaaaatacctcctaacataccatgtggttaccacgcaaagggaagtaaatgccataaaaatccccccaagagatgcagttcatttggggacgtgcccatgaccttaaactggagtacgtatccgcgatcaacatttaaaacaatggcaagcttccgtgatctagagaatctcaaaagcatgggtggtaaatgttatctaagttttcataaatcagacatgtggcacaatcatagaggggacacaatttttacataaggcacctagggaaattataagaaatgactcatacacttataaggcaatagcttcttagagcaatatcctttgctgagaaacctagagagcggtacaggttctaaagacattggacacattagctccttgaaaaatagcagtccaaagatggttatacctttttctaacacatgattatatcttatcccgtgtgcctgatcaaggtattgcgcgtatgcaccctcaagcatgcttttttcccaacgacgaaggtaaagactatttcgtaaaggagataacttttgacgacgggtgtccaaggttgtacaaaagtccccactagtcgttccacactgcaccatgaagaaggttccccccagtggatggtcagatcatcctttggtagtacagagcttagtagcgtgtgaaggacaaaaccctatgtaggtgaagggtatgccctttatcccatgtgtgcctataaatagcctcactcttttgaaggcaagggagaacaacttttcatttaccatcaccctactaaaatccctagcaatatcttcttccgcagaatattctcatactgtaatactttgtagtatcgaaacattcacccaaagaggataataatattgactcgtggactaagaatcattaatgcctgaaccacgtaaaagtctgttggtttattattttatacgtgttatttcttgtattctgtcaaaacacttagtttccaaaaattcagtaaacacttagttactagcggttccataagtccttctagggatatacccttgtgatagaaaaatttcagaataatggaatggttatgtaatcagtgtacaccattattatgtttagggatcctgatcatgaacttaagaaaagctagaagtgttaactaagttttacgtgtttgatagctattgtaaagtgattaggtgtggacagtcctatggtcattaagataagaatgtgtttgtttcaacaaatactacttttctatgagtatgactaaatctaagaacaaagtagcaaagtagaagagatatcttgttccaaagtgttctatcatcttattctatataagatggtcccacgacctctattatcatgacacagtcgatgaggacaataccattaatgttcctagatagaaagtcacggtaccttgttgtaggtttcaaggaactcacactgttatgacttggaagacacatgtgattaaaatccattgttaatttaaacaagtaatggatagtcaaaataaggaaccaagaaacaaagccaagagaataatagttaaaacaattcatatggagtaaccaaaagttttttattacaaggagaagaaaggaaattttactaatgtcttttcaatggacttaacaaaacttcctaatcctagtattatatgtttaagatcatttaaaactatggcttgtgatatccctagtaatttgctaattcttgtgcaagaaacttactttagtaagatgctagagcatttttctaatggctatctgaaggaagtcttttggctcttagatatagattttatttatctaaggaacaatttcaattgtgccaaaaaggataaaagtcaagaaagaattccttaagaatcaacagtgagaggtctcatgtatgttctagtatgcattagacaatacacctacaattgagtgggagttatgagtaggtatcagattaataaaggaaaggaacactggaagataatcaaataaataataagattcgaagaggaaactatatgtgagtcggtaaggctgatattttaattctcttagactacaccaaatcagtcttctagacctgtgctgatgctagaaagtctacttgagagatggtgattactttgggagtggagcaatgattttcgagaagtgtacaaactaatctagagtctctaactctactagtgagattgaatgtcaaagttgcacgaaggatacttattcaacctatggaaagttttctacaaattttggtgctgtaccaataacgaattaactactagtgttacttcctaactaacatagaagtagttgccaaaaagtaaggaattcaatatcccaagaggagtagacatatagttattaatctcacaatatcaaggattttgtgattaagaatatgtaatggtggaggaaattttgtattaaatacaacatatcagatcctattacaaagataata

SEQ ID NO: 37231 - DNA, 1925 bp, Cannabis sativa
  modified_base (1602)..(1611): a, c, t, g, unknown or other
gattcgacaaagtatctattcttcttaagaacgagcttcactttgccataattagccgtagagccatgtatgaagtctatcatctcttttggaagcttagtcttagacaatttattcaaaacagctatgattgtttcagtttcaagaccaacagacacagcggcatacaaagaatgcggtgtcaagttgtattcgtgcattgattctggcctagaaaacaagtcacaggcataggcatagatgttcaataaccccacaaacaatatatagcaaatgtcgactacaactaacaaactacattaggattagactttaaatttcatacctgcaaactggttcagcaattgcaataagaaaatcgtaagcttgtttatacaaaggtgagaaggtttcaaggaaaatgcgtccatccgcacaagcccacaatggcctattggcgtggtcaggtttcaattctaatttggtaaaatccctccttttcccctcaccttgaatcaatcatagattggccaaaatcaatcaatcaatcaatacccataatccttaatcgaccaaccaataaagaaaatagaaagtagtagaaagaaaccccttaccttcacgcaaatcctcatcgacttcatccccataataaccaccatcgtcttcaacaaatggatgattcctatgctcttcctgaacacatttccctaatcaaattaaagcccaataacaatgataaaactaacataaaactattgcatcaaataaacgaatgaatgaattaaaccttcgccgatgatttgtgcttcttatggggtcgacccttattatcacctgaaacatcgattcaaacaattaacacaaaagaaaaaggatctagagtgagtctgatgagaaagagagaatttgggaaaaataccgtgtcccatagcttagcttctatgaatcaaaatattaatgtgatcagcttctgcaaaagtatataacttgaacttctactcaatccacttgttcacttcaaaaaccacattttcttcttcatattccataagtaatgatatataaaacaatacatcatacatatactaatctaaataaatatatgataaaaataacacaacaaagtgagaacaaattataatcaattatttaaaaaactatttttactccttacatttttaacactacccgaatttgcccactcgttaattatgccctttattgtgttaggttaagtttttttttttttttaatgttcaaaattagtatttttatcctttaaattttgaccaatacaaaattttttccttattattaaaaaaaattaatttaaaaattataatattctatgaattctaaaaaaaaatataataaaaattatttaacaaactataaaaatactaaattaattaaaaaatattaattttacttaaaaaatataaattattcgtaaaataatatttttaaactttattttattttaaacacatatcttaaaaaataaaactaaaatattgaaaatccaataaataatttaaacaaactaagattttttgaaaaaaaaatcaaacttatttgtatttataaactcatatcttaaaaaataattaaaaattcaannnnnnnnnnaaattattttgaaaaaaaaaaatagaaattaaactaaaaaaatgttatgtttacttaaacaaatctatattttttgagaataacaaaatagactcgtttgttctcgaaagactatgcataagagcataaatgtaaaagaaagacccttcaattgatctcaagataagaaaattaccttgtcataatttgcaataccctcgtaacgagaataatagataagaatctaatgaaatacatcttagatgacatatacagagttactttaatagaaaacatccatttacaagatacagagttaaaaaaaaaaaaaaaaa

SEQ ID NO: 37232 - DNA, 2480 bp, Cannabis sativa
  modified_base (207)..(210): a, c, t, g, unknown or other
  modified_base (2052)..(2058): a, c, t, g, unknown or other
  modified_base (2344)..(2370): a, c, t, g, unknown or other
agaccgaatgacaacctgagctgccacattataatgaaacagcaaataataatatatatatatatatatatatataaaggaatttggctcaattctagtcgcattgcattgacccgaaataacataaaactttcggaaaacttaatacgcattgaaatgatcaccaaaccagaataattgcgcagctagagagagagagagagagannnngagagagagagagagaattcaaatttatgcacaattctaaattgttacgtaccatagaccctctcggagatttccagaagccgatccggcggctttctataaaagaaccttctgaacagcgccatctgatggcgctgtttctcccttgatcggatccaaaccgataataattaaaccaaaacgatcgagaagatcaagattcgatccccaaaacgaggaccccagatccttcaattcttaaattttatcaaaccccaaaatcaaaaccaaacccaagaaactcccacaacgtcccgaattagaaacaaacacaaccccaattcgaaaaagaaaaaaaaatacaaaacaaaaagaagcccaaatcttcaataaagaaaatgtttgaaattaacaataataaaagaaaaatccaattaaaatggagctgtaattgaacttccacagatatatacagattcaaataaagcttaaactttattcaggtgaggaagaatagaagaggttggtgaatcaaaatgcaggataagattgttaaattaggattgggaaagagctataaaaattaaactctgtcaggtaattttgggaaagagagaagagtagtggactgaaaaaatgaagaagaagaatactcttagacctgtctcttctcttctcttctctattcttctcttctttgggttctattctatctacctgactctctgcaactttctaacaagggaaaaaattaaattttaatttaaattaaactttggtttggaagagtccgtatctacgtggtatgacacgtggcataatgacttttattcatttgaaataatttcataattaagaaaaacttaacaacagtctctttctttttgttttttaaaaataaaaataaaaataaaaatgaaagagagacgtaacaatgagtgaggagagagaatgtagaaaaaaaaaatgaaaggagtgttttggacagaggcatgcgtatgtaaagcagctcaacgtggatctgtttgggattgaggatttttcactgtttttcttgccttttttattttcttttaaagaaaaaataataataataaaaataagaaatgaatcagaatgtttggttgcaagtctatacaggctatgtgagtgatatttataggcatatcacattcaagtaaaaatttgttttggtaaataattatgatgtgcttaggtaaataattgtcagttaggtataaaatgtggaagttggtaactagggatatataattatgtattatttatttagaaagaaaaataatcttcatttcaactcctatggctactaaatgagcaaatgttattgatatcatgtcacattaatatatatacatatgtgttatacagttaattaaatgctacacctacacactaactctttttaagccatattatttgtcaacatatatatatatattgtagttatatcacctggtgagtaaatttgatggtaatgtttattaatttgtcaaccatttatttttaaattattagtgatacagttgaaaatcaaactttgcatatgaattgtgtatatttgttgaaaattttctatggagagctatatttatactctttaattttataaatacaccctattttattaaaaaaaaattatttacatatgtaccttaatataaaatgactaaattatccatctctaaccttagttatatttttaaaaaagaattaactcctataaatacacctcgtttatctcatatactaaacttttactcaaatatttacaaagtttaatataaatttaggtagctttttataacacttttttaatcagttttttatttttaaaattaaaannnnnnnaatattttttaaaaacatgttctaaaaactatttttgcttttcaattttttaattgagaatcaaaataaaaaaaaaatcactttcaatatttttttaaacagtttttgttcttaatcaataatttggactccgacatgactcgaacccaaatcctctctcacgacccttgtgttgaatccgacctctgacctggatccgaattcgaccccagacctagacccgacttaaataaaagcaaaaaaataaaaataaaaatgaactaacaaaaattttactttcattttnnnnnnnnnnnnnnnnnnnnnnnnnnngttaccaaacggcaccttaattaagttataataatacaccacccacttttattatttattaaacttctccaaccaataagaaaatcaacaatgtaatattaaaacaaaaa

SEQ ID NO: 37233 - DNA, 2824 bp, Cannabis sativa
tttttaatattaaattatgcatgtggtattgatgtgatgattaactatacaatcatgttattattttatttaacacgtgtgacaaaacttgaaaaaaaaacctatttaataatacataaattataactcgcgacacaaaaatcctaaataaccattttttttccaatgattataaattatagtaagtaatataataactcatgaattttttattctctctcaattgaattgtagacaattttgatttagaaagaaataataattcgatgaaatttttataagatttgtgcaatatcaataacataaaaataattaagcattataaagtagtttctaatataggattaacaattataagttgtataatttataatagctaacaatatgaaactcgaaagaactcatcatctgaaaccaaatcaacctttagtaaaggctctctgagctgtgatgttgttgtaccccaaacactaaaactatttagttgcacaattatttcttcaaacttattacttatataattctttccttctataaccatcatcttcaaatattgacccaccttccaaggtatactgcacataataaatacacatatactaaattagtaaatcagtaaaaaaaaattaataatagctaaacaataaaattttcataattaaagagttttttaccgcaaaaccctctcaactattattttacggtaaaattctctaaattattaaactgtttacaaatttaaggtgacattcattttccacaattaactgtcaacatagactgtttatgtgtacactcttatacatgctgcatgtttatattataatattattatttaaaaattatttcaaattttatactattttttttattttatttaattttaagatgaattttaataataattttaaaataatttgagcttagatagttaaatacaagtaaaacaacagttaaagagttcagccgtcaaaaactcataattaaataaatattaggtttagtatgatttgctcaccgcattctatcaaaagaaaatgcaccgtcgactatatcctcaagaatcacaagaccgcgttgatagaatctaatataatcaactccttcaaatgatttgggatacaatggcttgtatgtctctccatttttcttgaagagcataacacttacaacaactccatcttcacaaacatcgtcgtacaacagatctccgaaatcgcagggttgaatttcaactatcttaggattttgtctagattttgattctattttcacttgaagagtataatcagaacaatcattgtaaatccttaccgtttgttcgaacatattaatcttccttcccatttttaatgatcgatcaatagtgaataatgatcttaattatatgttctgtttggctatatataatataattaataattaagtaatcctagttggaaacgaattagtaataatgatacttttgatttgttaaatataaaaaaagatatttaaaaatatttacgtgtataatttaataaatcagaaagaaaagaaattcaactaattaattgtgataaccataaaattatttaaatttgaatcccactcataatcttctttaataaaatgaaaaatatttctgcaaaaaaaaaaagtaaaatgaaaaataaaaaagataataataataaagtgattttaattacaaatatcaatcccactaacgagaatggaatatcatttgcaacaattttatagttaaaagagaattttcgcaaaaaataaaataagggttcaaaactatatcagaatcttaatttgagggaataaattctatttattctaattatataagagtaatataaaagtagtatataaattaaacacgcatccactgtgaaatctttataaggcctagttaattttgttgcacaagtcacgtgtttatttgttttgagggccacaccacatcacaaattcaatcctctctattaagagctaagcaccaatcattttttgacacttagatcgtgagcttaattcagcccgaataaaagagcattgctattagacaccaatagaatctagcaccttctcgacatgtcgcgttgtgattggctagcgatactccttaaaagcaattatattaaattatataagacccaataattagttggactaataacgatattaacacataagagatgtgttaggcactacttgtatccattagtatttttcaaaaaaaaatgggagccaagaatatatatgggtaaatatggtatatatttttttacataataattaattattatcgttaatttaattcaaaagttacataggatattcccaattaaaaaaaaaaaaaaaaaaaaaggttctgtattggaccctgaaatgcattcttcatgtttgtgagtcaaatagtcatctctagtacaaatctattgaaagtgataatccatgtttagtggtaatcttcccaactcaatatatataaatataaacaaatgtgaattattgagacccgaaaactacaaaaaggataagaaagtagtttatttcttagatctaaagttattgtgctttgggtgtgcatatcaaagaagaatggttcttatgataagaataattaattaatagattttatattaatattaattgtaataatatatttatttattttatttttatatatagtgccttgtcctagttctacgtactactaaattatcaatctaaactctgttttcttcactaacgcgtaaaagtctctataataatacaaatatgtgttattagtcttagtgcaactcaaaagccgtgtttggatacaatttta

SEQ ID NO: 37234 - DNA, 3060 bp, Cannabis sativa
cttgagtccttaccatatcggctccttccctaatcctgctcaaagcctccccaagatttcgacacccacaaagaaatggggttcaaaaattatgcttgttgatgaaattatcctcgtcggccaaagccaaagcttcgctctcatcgatgtaatcaacaccgatggcttctaatatctgagcttcaacgaaatgcccaactctagatctcgccattacagggatcgaaacagctcgcttaatctccttaagaagagatgggtcagccattcgagaaatccctcggtggattaccggttccgatacaataacagagcaagcaccggcatcttcggcgagcttagcttggtcgatgttggtaacttcgagaatagctccaccgcgaagcatttgagctaatccgaccttaatggaaaatgggttgttcttcttggtatcggtaatggcgttggtattgtagaccgttacggcgccgtcttcagccatgattatttgcagagaagaattatttggaattgggtgaaatgaaaaacagagtggattgaattgtaaggatatttttgtttaggggtaaatatataaaagggaaaaaataggaggaagaagaagaagaaagggagtgactttggtataattgagtcgagtcgagtgagttcgagaagtttcgtaattgggttaggttatattagtcggtggcattggcaatggtatatagcttgtttaagctttagaatcttccattccattcttacataaaggcataatttcacactcttttacacctattctatttctatgggtttaggaaaatatagaaaagtaataagaaaaaacattgggagggccaaactttttttgttttaattttgcacatttaatctttttattttttcttggcaaaacttcattaagtttatattttttctttataaatttgacaaaccaattaaatattaccgttaattatcaattggatgaccattgtatacatctgtgtatatgtaacagtaaaacttcagagtcgataaagtattaatttagttagaattaaatcgtagatatatataatagatgaaactagtcttccaattaataacaattatcaaagttatgtgattttatttctaaaaaaaaaaaatattatgtaaagtaaaaatacaagttattaatttaaatagttactttatttctattaaaaaaaaataacatactaatgtttctattgatctcgtgaatagcatttgtagcttgagaatggtgactcgagatatttataagatagttttggctactgtttttggaagttagaagggaattttcaactagaaataatagaagctcttgctctaggtcatggagtcactcaatgcaatcgttttagatttcacaacatttagtttgaatctaattggaaaggcttggttgataagctaaattattcttttaatttaaattcatctttggggttagtcatctcttatatcaaatcatcttgtaatcttttttatattgtgagattttttttttcctcctgttaatattaatcttgttaagtttactttatcaacaactgtaaataaagtctagtgtaatgtgaatattttcattgtattaaaatctttattttagctgatatcatttattaatgatatctcctaatttttacacttgttgaattcttagctcttttgtagtgttttttgaaattatttttttttaaaaaaaaaataataataaaataaataaaaataacatacatttgtacttttttttttcaatgcgaggacaataattctatctaataacttatctaattaatgcaccctaagaagatggaagctaaagactactgtcccaaactgcaatggaccaaaaaaattaaaacactttagaactaactaattccaaactgtattttgacataatatttatgagactactttaacatttagcttagttgaaacttaatcatcaataactcgagtaatctatgaaagaagagtaattggtcattttaattttacagtaagtcactttaatactgtagaaatattggatgagatatattttttgaaaatggttgttttgggtgtgttctctaacactttattaatcagttttttaatttggtaattaaaaaaataattatatatttataaaacaatttaatttagaaaataagttcaaaattttgaaaactataaaaaagtcatatactttcaaacaaattttaaatatatacattaattattaatttatttatattttcatttatcaatattttagaccccgaatcgagctctagtcccgaccctaaatccaaactctgactctgaaccctggacccatgacctgaacccaaacttcacccagacctaatcccagacagggacccgaacccccagccacggacctgagcctcgaactctaaaccctggaccctggacctaggacccagacccaaacgttggacccagacccgagccttggaccttggacctgagcaccaacctggatcccgacctcgaacaaggacccaaactcgaaccccagacccagaccgttactttgatccggacccagatcccaacctagacctcaatctcgaccctgaccctataccctagaccccaacccggatctcgaccccatccccaaacccaaatccaaaccccagacctgaaccacgaagtctaaacccgacttaaataaaaacaaaaaataaaaaataaaatttacagaacacacttttattttttatttttaaaattgaaaaacaaaaatagtaatagaacatatttttatttttcaaaaaccaacatttaaaaacaaaaattttaattttatttttatgattaaaaaatttacaacaaaagtgttaccaaatcctaccttaaaaaataaaaattttacttttatttttgtaattaaaaaaattaaaaaataaaagtgttaccaaatgtcactttaaaataaagattaatttgcggcaaaacttcctcaactttgaagtttatcacgatcaatctcctagactggaaaaatcaaggctaaactctcca

SEQ ID NO: 37235 - DNA, 3235 bp, Cannabis sativa
attagcttattattataatcaaaactatatatatgtatgtagatacatatacattatataatgttataatgtgctttcttttatatattgcagcttttacttttcttctttttccttcttaaattagtcttaatataattttctttattattatatttttttggtgacatatatctatctaaatatatatgcttctttcttgcatgtagtactatatattatatttatattaattttaactttttaagaaaatgaaaaagactagtacgttcatactttgagacatgcatggatatgataaaaagctaaattaattaaattaaattgatatataaagaaaagcacttttgtgtataatcatgactttttcaatatctctcaaaatcaatccattcattcaaaatgtaacaaaaagtatatatatttggaacactttgtattatctattcataattattaaataaatttaactataaatattaattttaaaaattttaatctaacgaataataacatagaaatttaaatttatatgtttaattaaaaaaaatcataatattttttttacattatatcaaaaatatatttcgatacaaaatatttaagtcaaatttaattttttatatattttcttaccgatttttttttttattttttttaaccgatagaataatcttaatccatataatataaaatgagaaacttttttaaatagataaaaattaagcttaaaaaattaatttttcctaatgttactcattcctagattatatcaaatatgtaattataatatggttaaaaatggacaaatataagccatattaaacgtcattaaaaaaatgtcacttatgaatatatgaaggaaaaaaaccatcatcatttttatttatttattcatttttagaagaaacatcctaaaatttcactctaaagagcaaaaaaaaaagagcaaaagctatatataaaaaaaaaagaagaatagaaaaatatcattaaaaattcatagcaccatatgaaagataatttggtcaccaaactttttataagttgccacaactaaatcaactagcctatatacattatattttaatttaattaattgaattttaatttaattaattacataaaataaaatcataaaatatgtatttcatttcttattttatatttttcgagaaattggagaaaattcatcattagcctatacaaatatttatggattcatattcgacacaaatattttttttagagtatatttggaagtaattgtgtaattattagagagtgtaattattaaagtagtaattatgcagtttagtattaattatagtatattttaaactataaattaagtgtgtttggatatgaagtgttaattatttatgaactcgtaatattttatttggcaaaacagatagtaattacacggaaaataatattttttagtagttaatatttaaaattgaaagtttttagtaattacaaagtgtaattacactcacgtggcgtttgattgggaggaataaaaatatatagtgtcatgagaattggataatataattaaaacccctcaattgcctctaattacaataattacataattagataaacatttaaaattatataattatcttcaattaaacacaaatctaataattttcggccttagttaattattctatatatgacatgtgctatgatttaaaaaattatacatatttataatataattaatataagaattgcaattacctttttcttcccaaacataatgttttgggtggaaaattaattagtttattaaatatttatttcttgttaattatcttcaacatcaaagaatattaaacgttgacatacatatatagatgaagaaaaaatgtatcgatttttttttaaattgaaaaaaaaaaaattatttgggtcaaatcactagaaaatattaagtatatatatagtactatagtttaaatgattaacaaaattagtcatattagctttaattagttaataatataatatctacatgtccttttctatattgtttcaacaaaattagtcatataatctttaataattttagtattttcatgtagttttctttaatcactttaggaaacttaatttagaaaactaatttaagtcattattccaatattttatttaatggaaaatcaaactttacaaattattaacttcagtcaccaagatcggtaacaaatagttggaacaaatttcaaattaaaacgatcagaatacaaaatagaagcactaacaaaattaagagttactatattattagtttatcctttaaataaaaaagataaaatttattttttttctttttttttttaaagagaaaataatgtaatttatagtgcttgactttgtaatatatatctttttgacattacaaagcaagaaaataaggttttaattaattagatgatgatatataaatgctttattattattatattattacatatactttaattaatggtagaaattaatggagtgaaataaaattggtccatcatcacattaatttttattatataatatataatgaaacttaaagaatatgtttttgtttttcctgtattttagggatttcatcataagtatacatatgtatttcattaaattttgttcagacattataaaatttaacttctattcaagtgctctttaatgctcattttgttagatatttcagctctcaactactaataaattcttatgtactaacccatcaaaatttgatttttttttctttctaaacaaatcaaaatttgatattaaatattgggcaaaatgatcattaatatttcatcagtcaaattcaagaaggtagttcaaatggtaatatatatatgggatatttgcggagaaatctttttaacatttataattatattacatatatgatcttaataaaaaaggtggctgtaaaaaaagcttatcttaaaattttattacagtcgtagtacttttttttggttgttaattgtcaattaagtctgttaagtgtcagttcaaaaatacgtggcgacatatttctttagcttattatttattacatagttcaataataagtcgtcacgtgtttctgagttgactcttcaaggccaaaaagagtacgactgcaacaaagtcgtaagataatatatttttactgctactctttttattagtcatatgtgtaataattataagggtaaatattattttg

SEQ ID NO: 37236 - DNA, 4449 bp, Cannabis sativa
ataacataattattaaattaattaataactaatatacctgcaccaaataaagatagcatcaactccgacccaatccaggttttaaaaatctttgacatccttcttatcgatccaagtcttagtcccatggtgtccgaacaaatttgtcttaaatttacatatgtttatgtagtgaggattcgcatcccatggctccacaatcttttcaagcctctccagtaatggtgttttagcaggcggagtgtaacaatcaagtgatgaagaaagcttattctctttcttttgcctcttcgagtgtatgggaggctgattcgcatcccatggctccacaatctgttcaagcctctccagtaatggttttttagcatgcagagtgtaacaatcaagtgatgaagaaagcttcttctgcttcttttgcctcttcaagtgtgtgggaggctgagtggatggaactgacagatcttcccgatatctctgctttgatttcttctagagtaaaaataacattaattaaaagttagaattttcaatattaattagtgactatgtttgcttgaagctacaaccttatacaagaagcaactcaaatatacaagcctacatcaagaataaatgctcgtttacaataaaagtccaaaacaaatagaactcctacatcaagaatcagctcaaagttgttcgaaaataaaacaatcagctcaaattattgtgatacaacttttactgttaatgcattcagagcatgaaattttctcaactccgaaaattgatgaatcctaaaagtgtgttttatttttacaagatattttacaaatttgtagaaatggctatagagaggaataagaacgggaaatatcatattaggctagtgatggtcatcgataagattaatgtactcagagtagtgtcaacaaatatacactttatttttacttagttgattaagtatggtttatatattatgtataattgtgtctcactttttttatgtgcgtgtaaaaaatctatcaaagtagcactgaaaaagagaaaaataataatttaagttatagatagagagagatttatatgatagatattacctgtgacaacttgtccttgtctatccattcaactctccatttttctttcagtagcttattaggctaaaaagaactctagatataccttagagatttcatcataacagattccaaagggcaccttatccgttcctccaccatggtgtccaactctttatttcatatttcatcatccttaataaaataattatccttgatgtattacagaattttgtctcattgggcttgcttcaaaacaattttgacattatcgtctatatcttccaaatctattgaccttagacccaactagatgagattagaaatacttaaattataactgtcgtaagaagattaatttgaacctatattatagtccaaatatatcttaaatccataaatatcataatcaaaaagacctaagatagggatgtcgatcctctctaacaatttatttagaaatcattttgtgtgtagatcaccatatccagaagctattacaacgatacacttgaatttagtagcaaaactgaattcaccaaaaaaagtttttttatcacacaactggtaaaaaatacttttcttctcgacgagtagtataaatgatgctccctcgcttataaattcactaatatcatcaaccatgttcagaatatttataccttccgactggctagctaaacagccaatcatcatgccatccttcataaaaagtttaagaggaccgtaaagcaatccacgagtggatgcaaaacatgtaaactacaccgtgtaaagtttaaatccatacaaatatctgtgataattgcattcaatatatctgtggtaattttcttatccttacttttaaattggtacttcaaatttcgaatgctcatttacaaatctctttttaccaattttttgatcaaaagaagaacactttttttttaaaaaaatattatgggtacatggcaattccttcacctttttatataagattcttcggtgaagttcttttgcatatatactaatacctctgtttcgacggatagatttgtgctttagttgcatgcgaattagattcaagttagtttttttgttgacatcttcaacttcaataaaattatttgcatcgtactcttttgaattttctattttagttcttgctattcatttgcgatgcaaattaaaatgattcattgaagtcaaacaattctgtgccattatctcaatggcactcatcattttcatctttctcttcttacccataatttaatataataaatgtagaaaaatataataggcaaaaattatgagaaaaatgttcaacggggacagagagtacatatgttcctagaagggaaaaaaatacattaagaaattaaaaaatatatatataaattagtcgtctttatttatattttctttcaattaatctagtttttgagttattagtttagcatttgtgtagtgtggttattttgatcattacatttttatttatttttatttgaatattttaatagtgcataaatccaaaaaaaaaatacacgtaactatctttgaggggaaactttttagtaatgatgaattgagattctcttgttagtaaggtgtttaaggaaatttattactcaatttcagtaaacatatcaacatattcatatataatactaataatttgtacttttttatttttattatttagtttattatacatgatattatttataagatagtatttaaattaaatagatataacatttatactacatatattttattactatagttatatatcttcttatagttttcttttatatatattaacattatagaactttcagtacgtttatatatatataaatatttttgagctaattgagcttttttttaggtgaaaaaggtggtgcaaaaaagaaagagaaaatagtccaaagacaacaagaggaaactagaacaaaaggcagcaggcccgacagcaacaaaaaaacagcaaacaacgaaaaaccacaaagggaaagtctaaaaaaaaccaaaacgaggaataagttttgagctagtacgtttatatacatgagtttttgtcaaaaaaactatgggacatttgtgcttgcattgtgacccttctaattaaaccattttacccttctatttgtggtgcttctaattttttcttgttctttttctttttgaatcacattaacttttttgtgttttctttgtctcatgcccttttgaacttattttgttgaaaaaaacagagagtttctcatacattacaaagaagagaaaaaagattaccttgaaagccaaaaaaagttgtttctttcctttttctttcttaaaggtttcatcttttagctgattcttttttttttatctgaagggagtaaagagaagaaaggagaagaagaacatgggaagaatgaaaataagcttcactgttagagtaaagaaaaggagaagaaagaatcctaattaattaattgaaactacaaagcaatgttatctcagttagtgtggggaccatgggcctacataattaagctttcaataagtagttctaaaatttatcgagtaaattctatcttattaattcttcctggttccactatagatttaaaattacaatcttgattacttagaaagttgtattaactaagaataaatactataagttattatttcaatctaaataattaataatcatctataaatgatttacattgagtagtgtaatatcccagaaaaatatactaagatttaaatggacatattttattaaatatataattatatggatattagagtagcattataatcttacttaagttatttacgagttaattagtgaaatttgagtacatgaataaataaagcgtgatttattaattacggagattttatcggattatgggagtattgtagataccattttcaaaataaaatatttttagattcggcagctgtggaaacccgacggagtggtcagaaatatcacgacaataaaagatgaattgaattggaattagaccggactagtttaattctaagttgtcggtttggcgattaattaaaaattaccaaattattcctaggccttatttttatgtaagtgttttagtacaggggcaatttagccttttactaagttagaatgttgacttttatggactttgaattatggttgaatattatgttaagttaagtgatatataataaaggaattcttttttttttttggaaattaaaaggataagacttaaactaagaaagaaacgtatcaatctctctctctctctcctcttttcgcccctagaaaaaccaaggaggtcaagctgttcatctcaaatttcagtccaaattttgctagaaatcaatactaagtgttgtccaaaacctt

SEQ ID NO: 37237 - DNA, 6601 bp, Cannabis sativa
  modified_base (3874)..(3886): a, c, t, g, unknown or other
  modified_base (3943)..(3969): a, c, t, g, unknown or other
  modified_base (4798)..(4824): a, c, t, g, unknown or other
agctagctggggctcagtattcagtatacgtagacagaataagaaccacaaaataacatcgaaataaatacacattgatacatatctattttttcagataataataagggaggataacattgatattgctgctagtgctacactctctgcatggtaataaaaattattatttgacatgtaacgagctggctatataaggtatagtaatatttatatataatattataataatttattaatgtgagtgttacgtatatatgtatatagaagacaaggttattaagttttgtccagtacaactttggaaactgagatggtccatgcgacaagtgacacatcaatttagagcttgtcctcacagacctcaaatctcaatgtgaataactcctcaatagtgctataaatgttacatcacctctgtcatttgagataaggtttcatgtaattgacacagcacaattaaacaacaaatatatatttgaacatggttgtgagtgtgactcatatatatggacgggactactatatatattactatacctgatcatcatcattaatataagtatagctataacattttagttaatattgtattatgattgttttaggttatttttaataataataacttaataaagaaacaaaattaagaattaacttaataaaagtagtagctcgattgagcaacgtcatcagcgtctgttgtcgtaagtgcggaaaagatagcaatatatatgtattatatatatatagttcgagatcaattgccaataccagcgcatgatttatattggattaggacatcattagaagacaatattaattagtttagtagttgaatatttatacatatcccatttaatatatcatatataaattattattataagccaaatattaaagcatgaaatataagatgattaaataaaagggtctctattaagtataaaaaaatttacatatattatagtgacagcaatgagtcaactttttatgttggcctcgcataagactaaataccttttatgcacaaaatcgattatagctatattttgtattattattaatattaatactgcccgaatacaaatatacaatatattaattaatactcctcccttatagtcagaaaacgtacaatgtagtttagaacactaatgattgggcttgaattacattattaatatatattccccacataaagtcagacatgtctcatatttatttaattctcaatactaatcattataggtttgttagagatgctttttctcttcgataaatttacatattctatgccatatataatatatatatacgtacgtacccacacgctgcactttttctttaaagtaattaattatatattataattaattggttagacaaacagagccacatccttatattaatcagagtgtgatgattgaggagactttatacgtctaaagtggaagacacttataaatatacaaatacattttatatatagttataatattaatgttcatgtaaaccagtagtagtgatgatcgaacgcggttccaagctgccttgccaacccaaaaggccacttttgcttgagctagcttgcttccatacatatatatataccaataaaagccaactaaatgttataatccaatctaaataaaaacgtacataatatatatatatatatatttatatgatcgagtcgagagggtttggtgtacatggaacttactttttttattttatttggttcccggactactttaatttgtttgtgtttttaggtcatgtttataatttggcaccatatataaaataacatataactaatatagcattgagctaatatatttatcatctttatttaattaatatttcacaaccatgcatatatataaatattattgagtactctttataggtaatacttcatatgcaattagatatttttttttaagttacatgagactcaatacttaattacactaataataatatatgataccgacaatagtgttagacaccgccagtatttttagcaattctcaatattatatattatgtaataagtacatatataggcagtaattaaacaattttaggtactataaggaatagagaagagaaaacatgtaccatatataaaacctaagtagggtatagccgtgggacctaagaacatttgtcttagaatcaatatgggtgaaaccccaattttctccatccgtgttttaagctcttgtcgcgttttgttttgtagtttagtgagttacgtaccgaaatgttatagtatatagtttttatttttattattattattggttaatttattaaaatattatctatatatactttccaattgtttaatttgacagcatggaaaggatatgagctgatgaatatcgtagctagagagttatattatttttgcacaattgatgaggactaatttgatcagctgagctgacttggagagtgaaaacaacttaacgtcttttctctgtgaaagaagcacatgaagatgttgttgtagtagtagttgttgttgtactgcagcaaaattattttgtcatgtggggatgatgatgttacttttatatatatagaggtatctatatatatagctagtctagatgtggtgactcttgcgtttactttcgccaagtaaaaataatgtgtgtgtacttgaatttaaattaatatatagttgcagttcaatatatgtgcaatttttctaatttatttctttttgtctgcttatgtatattatatatatatatattattattttgttggtcattattctagcaacagtagtggatgggcatttggttgccaaaggaataagttcaaattcagtgggaagatcccaacaagagttatatattgactatttcttattgagttagaatggtggtatatagaatattataaacaaccaaatagggtatactatagtaattaacctgaaccatgagagagtgagagatagagagactacaacaaattttacttttactcgactaattattaaatactattgtgactaaatagttcgtagctaaatgtattagctagttacaaaaattataatttgttgtgactaaatgtgatgttagttacaatatttgttgtgactaaaagtaaattagtaataacaggtgtctaaatactatattttagtcacaagtaattttttgttgtgactaaaagtcacattttatcacaaaaaatttatattataactaaaaaattatcactaaaaatattacctatttttttacagtgagacaaagctagtaaacattttttgtcagtatgtgtgatcactatcatatttatcttcttcttatatgtgcttaagtattttaataatgaatatttaaacttattagttagattagttactatatgtttttttttttttgaatggtaaatcaaactttattagataaccaaattcgttaccaaaacaggagttactatatgttattatagtatttagttaatataaattatataataaatattaattagcaaatatgaatgggttgtaaaaagataaaaatagtaagttgaggattgtgaagatggaagatgacgattaattaagagcatcttcaatgaaatgttttatataaatgctttatgaatatatttttaacatttgtaatgaatacttattattagtgtgaaaaaaatgccaagacattttatatcttctctttttttctttaaatttaattatttaatatatatatatattaaataagagtgctatcatcaactttttatcactacaagaaatattactttttgcactggtaaaatagaatttacttgtgatgtgttggcaaattaatgttggtattagaacttnnnnnnnnnnnnnatgaaaagcgctggcaaaaatgaccttttccagcacgtaaatacgctggtaaaagtnnnnnnnnnnnnnnnnnnnnnnnnnnntagtaaaactttgacctctttgccagcgcagtagcgaactgtgcaggtgaaagtgacatttcttgtagtgtattgattacaatctcttagtcagttttttattataacctcttagtaaattttcaattcaaatttttttatagcggtgttcgttatgcttactatatcatctgtaatttttttaaaaaatttcgaatactttacagtaccaaaattacatttgaagttttttgaacacgtataataaactagaatatcaaaaactctgtgttcgctactgtaaattattcaaaaaaatttaaaaatttacaggaataatactataactataacgaataccaccatgaaaaaaaattgaaaaaaatatttcggcatgtgattttaaatgtgaaggttaattaggttgtaatagaaggttatagctagtactcctcatattaaataataatataatattattttgataattttataggtgcttattattattagaacattttaaaacaaaaaataccaaaaataatgtagaagagagaaaaaaaaatattatatttataagtgatgtgaaatttttttagggaaattacttcatatactatattgggtaaataccattttggaccttgtattttgcaaaagttaccaattggactctctgttttgttaaatgacaaaatgaaccctgtatgtattttctaagatagtacaaataggagcctaaactaattttttgtcaaaataaaattaataaaaatttgatctaaatgtgttatgacaaaactgtttacattttttatatctgttcatgttaggaattatcttcaagttnnnnnnnnnnnnnnnnnnnnnnnnnnnaaaattaagctcagggtcctatttatatcattttaaaaaatacagtgtttattttgtcatttaacaaaacagagggtccaatctataacttttacaaaacacaaggtccaaaatgatatttaccctactaattttttttttttttaaatttatggtttgagtttctctggtagtttttctggtggtttctatgtgaattgctatacggattttagttgcaatttacgttgctctgttagttgctataagagttatcatgtgaaattctgtaccaaaaaaatataaaacacctattttaaaatataaaaataaaaaaacctcaacttttgaacacccttaaagaaaatacgaaatgctcttatatattttttgcaataagatagggtaaatggttatttggtaccttaagtccctaatgccatattgacatgtcactataattggttaataattttatatattatttaataaattaaaataatatataccatgatgtttgagacatgacatgtttaacagcttagtgaagatgttgattttgattaaaaatttgtaaccaagatgctctaaatctacttgtccgtgcgagagtgggagagtagagatgtggtcggggatatatacgtcttttcatctgaaacaagcattgaagtgtctgggtcagaggctcaagaacatcccacgtgggtgtgggccgccaaatcggatttcggccctttttactgggcccacctcacacacgagtccatgttacctatggaatttttgtctccgatttcactaatcatggcaaattgttcatgcatgtaaccccacttttcttctttcattttcatttttataagttctttaaaagaaatattagaagctgctcgatcgtagtacattttttttttctatacacacactataattaataaattttaattattgtaattagctagagtttattgatcattataatttgttccgtagtgtgtactcatgaacactttgaacggctacgagtctacgacattacttgaaataaccatgttcaatgttttatcattataagacctattataattattttaatatgtaagagagaatctgtataattcaaataattagtgttgtaatatatataaacatcactaattaaatggaatcaacttttctctctctaatctaccatgtcaaaatggataatcagcatctttaatagagtcctataaaaatgatatatatttattattttaccactttaacaaaatgctactcatgataatgttaaatatgtgtaacattaatttggtataaactaatattatgtcaaaaaaatggtataaaatatagcatgaattaaatttgaacctcaataaatattattttttttttactattttattattttaccactaattaatgaattttacaacttttaattcttttttatataatttcaataaagttttaagttttgttaactttttaaaattttaagttagtttgaccaaattacactagagtataattgtaaaatttggacaaatatggtactattaacactttttttttttaaaaaaaattattaacataacttttaattaaaccatcttcttgagcaaatttagttatgcatttgattgtcaaataagtaaatagtgaaattttattgtatgttaattattaaattagtcagcaattggtataaaccattcacaaaattagtcaggtgattaagtagaattatttttttatgatatatataaaatataagagagagagagagaga

SEQ ID NO: 37238 - DNA, 2438 bp, Cannabis sativa
taaaaggattatcttgagataagagctaaccaaattttaagaaattgatttctgttttttttttttttttttttcaagctgtaatcttatatttaagcggttacagaataaaatagaattattgttcaatggataatgtgagcgtcaatcttgacattcctacctagaagaccacattacaagaaactaaaaaattgtcctggttatcttgatcaactaattagcttatagttaaactataatttaaaatcaacacttcataataagaaaagtggggaataataaatactatctaattagtctgcgcagtccttttctatggataaaaagagaagttgttttcagtttctagaaattattaacgcgtctttgatccaccgcattatttgcactgtttttgtctgaattgtcgccctttgctgtaaatttatatccagaaagtctgttaatattagtcaacttgatccaatatacatatgtcaatatttacatcttttaaggtagcatttttgtttgctttcaaaaagaaaaaaaggtagcatttttctttaaatatacatatagtcaatatttacatttggagttttagaatgaatgaaacaatgtcaaagtttgaaaaacaaggctaaatggtatgtcccaaacccaggtttcagaagataagatcataagtgctaaaatattataactcaatctcaagaaattacaaccctggaataaaaaaaaagtgacattcctctgtgttttttttttaacttcacaccaaagaacaataaaataatattataaaagtacatagaagaagtgtgtatattggataaagtttaaggggacaaacgaaaagaagaagtatcaggacttagatcttgagctacctgaagaaggtgttcaatgtcaatgtctggatagtgttgtaacaactttaagttggctataaagtcaccttttaatagtctgctctttatgcataacaacatcgcacagcacactcttagaagcatgtcctgcaagaaatgctagactactaagttttttgtacaagtaatctaaaaagcaatatgtatatgtaagtataaaggtcagtaattaacactacacactaatatcatatggcatatgtatgcatgcttagaacatcttcattgcactctttttcattttggtttgaatgagagagaggaagaaagagacctgaacaccaaaagggttactcaatatagtatcccatattctcatgatggaatgaaagctgaactcctgagtaagtagcaatgtgatccacctgaatgcgtagaactgaggtttcacctgcttagaagggtaaaaacttcagaaatttgtctggttaattaagcagttgaaaatgataaatttgtaataaatagtagtgcatatgtatccatttcgttacaattctctacaaaaatagtattttacacttttgatgagctttgtgagaactatgtaagccacatgactttggtgaaagcagtgatggattttgtgttgacatattacctttgtggtgaattcaagatgcctccaaagctcctcatcattggcttttaacaactctgacaagcgagaaagagtagaaagtattccgactgaactattatctagctgttgacagaagtgatccactgaatcacttaagactctaacaaaacagcaaaaactatctgcttctgcatttccctacacaataacatgaaagcaagaccacaaaaaactagaatatgttatgacaaatagcgatagcaagataaatccatgttttaagatatcaaggaagttcgtacagcattttcctcatccgtgtcagtactaaacacatagaatattggtgccaagacctcattcatgccttgtacatagcggattgctggatttagtttcgcaaaaacgagaagaatatttctcattgcttcctaaaagaggtaaaaagaaacagaacactatgtcgattcagtaattcatgaatgtatgagctcgttcgagaaggcttagaaatttctaatgtgtggagaagatacccttttcttcttactggatggtgagtccccagaaaagaatttcaagttgggatgtgtgcgttgcagatcacgatctatttgctcagtaatttctgtatgctgcaaaatgattatgcctactttgataatcatcatatggtgaaatgaaagcaaaaccaaaatcagattttataatggagttttttgctttgatttcttttacctcgaagtactgattccaagcactagatttcccaagacttaaagggtgatcttcatgggatatttcatgtcgtttaagaggtccatcaacaccaatttcagcaggctggccttgaggacttttcgaatctccaccttttatccttgtgaattcggactgtctagattaatgattatgattagtcaaagcctcaaacagag

SEQ ID NO: 37239 - DNA, 3917 bp, Cannabis sativa
tactttaaaagttcaggggacatgttcggtacatgccaaagttcggagggtaaaaatcttaattagccaaataaataaatcatattattgtttttattttctttgagaaaaaacaacattaaaatctcaagagtaaatctagtgggagaaaccccaaaagaaaaaagagtgtcagacaatatcattaagagtctgtttgcaaaacaacaataatacaatcagatagccagaccaccaaacataatgatcattcaaggacagtgctaactttgctaaaatatgagccacgctcttagcaagcttaggacaatacataaaaagaatatcaataaaatgattataataagcaatgatatctctaataatacatcctaaatacgactgatcaaccttactataaaaaatgacactaataatactaagacaatcagactctaacaccaccctttgatatccaaggcgatagaaaagtaagatcccatagtagatatccaaaacctcaacaacattaggtcgggagaaacaaacattccaactccaagttccaaaagccaggatgaaaccagactcatcacgaaacactgtcccaatcccatttataactaacttagaatttaacccagcatcacaattaatttttaccgccttgttagaatttgtgaataaggtgaatgaggttccatctcaaaatcaattggccatgggaggagtagtatattcctcttatatattctattatctttccacatattagcaatgtgggactctctaacatcctccctcaagatggtggctattttatatgctgaccatcttggacaactcaatcataagcggctatttttggctcactatcgctgatcaagcggctatttttggctcactatttttgggtaaccatcatgggtatagtctccatgactttattttcttctcttccttctattggagactatggaggttgtgaaattttagaggataatttatttgtgtcatagtttgatttataaggatatgaaactaaagtttaacagttctgccttataaatttgactcaaggactattagaattaagttaaggttctctcgcttttctttctctaacctccctatggtttttttcctactttgtgatttcttctctgtttttgcaaattaaatccagaattggaggttgaaaattaaaaattaattatcatatcaattttcacagagtatgatcaaagcatcaggaatcgccattacaaaagatatgttgctctcaaactcatatactttggaatacttctctgtttttgtatgttgtgctttcttaattcaataatatcctctctatatgaaagagctttagaagcatcatcaacaaggatcaaaggtagaagacgacattgagaaatgtcacagcagcgattaataccatgtagaagtgtagaaacacttagatggtgcagagcaccaagaactcaaaaaacatagtgaaagaaaacaatagagtaataatgcagtaagaaccacaccctctcaatgaacaaagtctttatttataggcacacaattgttggtacaagataatagaaaaaatagaaagaagaagtgctaaccgaactaacagacaagtaactaacttatcaagcatgttggtagcttataatacttatttatgtattataagctttaaagtaaaaataatttaataaaaaaatattaaaatatttccgaattacaaactattgtttcaaactaaactaaaccatttggtttgctttggtttgatttgagtatttaattggtctagtttgcttttaaattttaaaaaattaatatttcttgtttaattttaaaaaaataaaaattcaaaccaaaccaaaccaaaaacacccccaaaacatattttctcaggacaaactaactttaactagcttaggacactaatacttaactaaataaaactaaataagattaacaatcacaacaaaaactaatatatattctttaaattatataaatatgtatatatatacatatgaattgatcgagaacactcatacataaaagttaacaaattggtatgttaaatatgacataataagataaaaattttatgaatttaagaatatttgctctataaatatcttatgttgtcagttttatacacttatacactatatatttttttcgacggattaaatattatatattgcgtttttgctgcagttgatactacaaattttattaagtgttgatttgattaagtgaaataccacatgttaatatattaacggtccagttaattttttattgaaatatcgagaaaaagaataatagaagcatttttatctattttttaataatagaataattattgctttactttttttttttttttttttaattttgaaattatttaataatgtttttttaatgaaagtggagaattaattaattgacgcgtgttaatttagtcagatttaataaggtacaacaaaaacataatatgtagtatttaattcgtcaaaaaaaatataacatataatatttaatatatataagaaaataaaattaaaaaaatagtatagaagtgtatgaaaggaaaaagataaaatatttataacacaaatatcaaaacgattgaaagataatcctacaatattaatgacatgcattcacatgatcctatttattatttttcattaaaaaatcacttaaactttatatctgttatgttcccaaaattaatgtatagtgtgcttataatattcaacataatttatgtattaggaaaattgtggcatataaatctccaaaaaatttagtttggggtagataagtccctaattttaaaaattggcagtaattattctcaaactcctaattctcgttagtccattagtacctaacttaccagctctgtttattgtgctttaaattactatgtgtaaaaaatttattggtgcacgtcataattttaattaaaaaaataaattgtttaaaatcataaaaattattattttttttttacctttttttcttgtttttcttcttcttcttcctttccatgtcttgtttattgtccagtacccattctcaccattgtttttttcttttctttttcttctttagtcccattctcaaccaccactgctacattaccctcatcactccaaccatcgcaaccaccgctattgtcacaaccaagccacggtggacaaagccctaaatacaactaagtcccaaatctcaaatcaaaatcattcgagacaggcatccaaacagaaaagaagaatagggcgacaacttagaattttatcattgtccccgtcgcttaatcgatctcgtcgtggtcgttgtaattgtcaacgaaatgtaatagatccagtactcgacggaatcgtgggtcgcatggtagcgatagaattttgtccaggtttaatcggggttcatgactcgatgcatcaaagatgggtctggcttcgtggatctgttccaaagcgtgacttgtgcacctacgttcgttggctggagtcatgagaaacccacgacaccgagcaaaaagaggcccaccggattgttcttgtgcctgacttgggtgctcagcattaaggagactccttcgttggaacactactacaaaagtcaaaattcacgacgatcctaaaaaatcttttttggggggaccgtcgttaaaaaaattaagtaactgtataaaaccgtcaggaaaaatttgtatcccgacggtttataccagtaattacaggaatagatgacagttttaattagaattcgtaaaatttattgagccctgttttaaaccgttaggtataagagcccaataaaaaatcgttacatacttctcgccacatttcccacgtgcccacctacttcttttctatttcccacatgctcacctatttcttctc

SEQ ID NO: 37240 - DNA, 5019 bp, Cannabis sativa
ttatatattgaatgttaaattttaccatccaatctgatctaattaatttatgccatctaatagatccaacatctactagatattgtattggatcgattctagcaattggatgtatttcatgtcaatttattagtttaattttgatttatctaatatttttagatttagtattttttttagatcgtatcgatttatttaatatcttagattcaatatttattggattggatagatctatccaatatgaaaaaaaaaaaaagtaaaatttatatgtcaattttcaacttacatatatattttacgtataagaacataaaatttaattactcatttaaattaaatgaaaatactatataattcgattggaaattagatgtacttgaatttttggacatcttatccaacatcttatctgatccaattggatagtaaaaaataatatccaatctgatcacaattggatattcaatatttagtaatcgattgtaatcaaattgatcaattatcattggattagatctatttatgcataaccctatactctatgtacattctcaatagtatatataatatggtaccttctaatttaaaaatataaatttggtattttaaactcaaatttgatcaaaatattttatttattggatttttatataattcgattggaagttggatgtattgaatttttggacatcttatctaacattctatttgattcaattggatattaaaaaataacattcaatctgatctgatcacaattggatattcaatatttagtgatcgatcaattattattggattagatctgtttatgcatacccaactctatgtacattttcaatattatataatatggtaccttctaatttgaaaatatagatctggtattttacactcaaatttaatcaataaaatatttatttatttgattttttttttcagtaattaaataattaaatttgaatttataactcatcaattcaaaacattttgatgatattaaaaaagttttattaattaaatttgaatataggttactgacatcaaacataaagatttaaataagtatataattgaaaatacaaacaaaactttatattttgaagaaaaaaaaaataataagacataccaaataagtacataccctaataataattataaactttcaaaacttccaatatagttaatgttttatatcaaattatcagtgtttgcttgaccaatccctagtcataaatttctcattcaaaagggcctatttttgaactatttattttcatcattttaatggctaatgcagatcctaaattattatgagattatactattactattttattatcttatggcatttttactagcatggtaatatataattcttattctacagtttatttggaggttagtatttttgtccctgaaccatgacttatatataattgttctctctaaatttttcaaaccgttaaaaatgatcctaaaactatttcacaatattgtaaattaattcatgtcaaattttgtcacatgtgccaaacaaataataacatgtctgtttagacaattgacacatttataatttatttgaaaaaataatttaaaatttttttaaacgtaaggtgtgtttagtaacacttttttattaactttttattttttttaaattgaaaaaataaaaatattttttcaaaatcttattctataaaactgttttaactttttaattgaaatttcaaaaattttgaaaaaaaaatcactttcaaaatttttttcacaatttttttttcttactccatattttggacttcgaccccaacattgaaacccagaccctgaccccgacctagacccaaacttggacacgaaccccaaaccctaactcgaacctagaaccaaacccagacccaattcccaaacctgaaccctgactcctacccagacctggcatcagacctacaccccgaacaacacccgaacctcgaaccagtcctgaagtccagaccgaaccccaaccccgacactaacatgacaactgactaagcaaccatgtcattattctgtttgccatatgtgacaaattcaaaaagcacaatactactgtactacatagatcataatttattttgaaaatgattcttttaagtgttcaaggcgattaacacgcagacggagttagcaaagaagtgcattgccagagattactattgtgaaattgaacttcaacaaacaaaaattatattttctttaaatttttgtatatttttattaaattacatactctataaattgaattagatatgctctaataagattcttgactccaattcaatcaaatatattattttttctaattaaattgaattaaatcgattgattaatagtctggattataattatcatgtaaagcaatttaccacaaatctgtggccaaaattatctaaataagattaattattcatgtgcaataaatcaagagctaaaaagggtctctaactctcatgtttctgatcccataatcaattgtctctaatgaaaacttacactattcagatcatgattcacagcacaaatggtggaaaccttaatcaaataccactattgtttaaatggttaattaatataagaattaagagtatctgtctggtttgaaaccagtttctttcaagccaagacagcttcattattattttaattcaaatggatatgaaaaaaagttcagcttgcctcatcttcaaatggtggtaaaccccactcacttggattgaaatccagcaatgagtttagaatttgatctgcaggtccatagagtgagctatcaagccttgcatcaggaaccatgaccgcgaacctattaccccgaaatagaaaatcaagattaggcaaccaaggtgattaagaaaatacagataaagctctcatagtttcttttgtagagcaaataagagtaaaccaaacagcagaggatctcttatagagctaccatgaaaagatggaacactgaagattgtaacacaatatgctatgacaaatttactttcattgagtgatagcattccaggaaaaagaaacacaacaaacagaactttttatttttaatttattcaattttttttgttagttcacatcaggccaagtcttgtaaagtatcttattcttttggggctcatcaaataatgattaaacataaagattacagattagtgtctgttgatcacaactgccatttgtcatagataacaatcacaacatgagcaatattataggcaagtgaatcctatattctaaggaatgttgagctagcatctaaattcctttaaaacttacaccaaatatttccatagtttctcttttaagttctccagttatataaatgtgattgaaacatgatcttctttttccaatttaaacatgttccagccaatttgaaagtacaagattcacatataacaatcaaattgctatcggttatttccaacaaaacatcaccttaaacaaacctataacatatggtggaaagttgaagtatatctaaacctcatataagtaaaacagtagataatttacttgggaaagaaatgaacaaacttatgcacttacatcccagcattctttgctccttgaactcccgctggagcatcttcaaacacgataatcttatctggatttattgggcctccctgttgatagaaaacttgtgattaacaattgcaaccataatttttattttacaaaatgtattacaaagaaataaaagaggatagcagaaccagatatagaatacactaaagcatatattattcaacataaactaacttgcttaagttacaacctcgaatctattagctgcagcaagaaatacatctggtgacggtttgccttttttgacttctggatcatcaccaagaacaacatgatgcatcaacgagaaaagttcaccatgttgttgtgttttcagtgcaaaatgccgcttgtgtgaactgcaaaatgtaacttcataatgagagccctttataattttttccgcataaaacatcaaaacaccatcttttttttttcttttcttctttatctactttttccaactcaaaaaagggttttgtaacctgagaaactaccaaagtaaatctgtatttactaagtaatctatacgaaagggagaaggagaaaacataccctgtagccacacaaatcggtattccttttgcatgaagatgtctgatcaagcggctggccccttaggttgagaacataatattaataacaatgtatttatcatatctaagacaagaacatagcaaaatcattaggcacaattttactacaagaaatggtaaacttcataagcaactcaaaacaccttaggtgttcaggtgttgatggcaattatttgttctgttagaggccataatttgataaactgaaaaaaaaaagtataaaccaagtttcttacttaatagtgacaatatctagctcaaataaaagatacctcaatctgcaacactagaggcatataagggcaacaaacatgaaagactgaacaataaacacatgtacaagaataaaaaacgaaatgggaaaggaagagaaaaggtgggggacttgtcattaacgtactttagacataagaacacaaagacatacatcaaacatcaaactatctttaccatgtattgaatcttttgaaagtttgaaaccattattaaccaagtaagatggccataaggggttaaatcggagaccatattacagcaaagaaacacctttttcgtgaccactcaactaatccatcaaattttttaaattctatcctgattcccaagtgttacaaacacagtagaaaaataacaaaatgaacttggaggggaaacaaataaggatattgatatttaactaaaaacctttaattgtgcttaacaaattcttttcccactagaaatttaacttgtgtaagagtattatcaaagagtaagaaacattacaccaagacacttgtaaagactagttaacatttataga

SEQ ID NO: 37241 - DNA, 3243 bp, Cannabis sativa
tatatatatataaaaatattgatattgaaagaaaacgggtcggtttgatcctggatagaacgggtcgggttaaagccgctccatttatgagctttggcgctttattttgggaaatcaaagcttcttacggacgcttcactctctcgaaacgttctttcagttcagactcagagtagacgagttcaatcactgatctcactttctctccaacttttccatttttcttcgattcttcagcttccagatggtcaaagcagctggaaaatcatccatcggagctaccaactctcccgacgaggtttttttttttggtttgtttgtttttcaagctatttgtctctgctttcttgtttcaaaatgtaagaagttgagttcttagtttggagttttaagaaattgtggaagaaatttgtgaatctggttattgtttagtgaacgtgaaaatttggtggaattcgtgagaaaattggtggaaaaataatgagatggagtagttgttttgtgttttgaatttgagggattacagtgaaaggtttaaggtggcgtttggctggaaggaatgaaaatataggaaaaaaaatgagaatgagaatgagaatgagaatggaagtaagaacagaaatgaaatggaatcaaacttaaaatgtataaaaaaaattgacaatttttttttattgactaccttccattccaaaactttaaaatgctaccgaacaaaatgaaataaaaattattttctttccattctatttcattttataacctccaaccaaacagcacttaaattgctttcgtggagattggagtttagttgttttgtgtattgaatttgagaacttgctgtagaagtttttggatcaagacttcagtttagttcaaattgttttggtgtagattgcagtgaatttttttggattaaggcttcagtttaattcaaattgatttggtgcagattggagtttagttgttttgtgttttgaatttgagaaattgcagtgaaagtttttggattaaggctttagtttagttcaaattgttttggtgcattggagtttagttgttttgtgttttgagtttgagaagttgcattgaatgtttttggattaagtcttcactttagttcaaattgttttggtgaagattggagtttagctgttttgtgttttgaatttgagaaagtttttggattaaggcttcagtttagttcaaattgttttggttcagattggagtttagttgttttgtgttttgagtttgagaaattaaggcttcagtttagttcaaattgttttgttgcagattgggagttttagtactcgtttttctctgccttcgtttcttaagcaagtaaaacgactcacggatcatcaaagtgaagctctacagaaaactggttttggaaatttgctatcgattcctaaccagaggctcaacaaaagtttgttagacgagttaatgaggagatgggacactaataaacaagctttcgtgcttcctcgaggtgaaatttctcttaatcttatggatgtcgcattgatattgagtttgcgtgttgttggtcctccagtatcacttgttaattctatacctttcggggatttagaaagagattatggcgctgttatatggaaaaggaagatcacagttacatccctagaaagtaaactgaattcatttggtgatctttgcagtgatgaatttgtaataacttttttaatgtatacatttgggacttttcttttccccaatgcaaatggaactgtagattcccgtttactttcttatattcaagatgtggacagtattcgccggttttcatggggtgaagcagttcttaaagatgtttgtaattggttagatcaaaggaaaatgaagagtgtaaagtatgtgggaggttgtcttctatttcttcaagtgagtttgtttacatttaaacattgtgaagaagttgcttgtcatgtttatcatttgtttgaaggaatggtttttggtcttgttttactagatatggtctttcgagcatattgacatagctcggcctgccttgttgggtagctctgtttcatttcctcgtgtgttcaaatgggataaaagtaaattgcacagtaaacaacagattatgtcacagtttaagtctctacacaatgatcaggtaattatatttggtgagttagatttagtttaagcttagtttctcttgagtttctatatttgaacttgtcctttgctggcttaccatatattaggtgactcaggagcttcaactaacttcttgggagtcagaaattgacataattaaagagttattggaggcacaaagtaatgagaaagaacattctgaagtagaaaactcttgtgtgaattctcctattgttattgtgggttgcttttacctttttcattcatttcatatcttttttttttcttttaataaatgataatttttattactatgttggtgtggtttgagaagcctaattgtctattcaacaggactgtgaatcagaagttgacacattaaagagttattggaggcacacagtaatgggaaggaacattctgaagcagaaaactcctgtgtgaattcacctattgttattgtgagtttcttttacctttttcattcattcattccatctttttctttaaataaatataaatctttagaataaaattgttttatcctcccacaattataactactttcaaatcataaccctaaactttttcgcttgttaaacattttcttttttgtctattttaatcatacgtgactgacaaactgcttatgtcgtaacactatttatataattcaattaaataatttaataaattgattttttatttttaattagtttgattttaattaatttgctatttattagtttgattttaattaatttgttatttatacacgtgtagttgatgtgagaataactcagtgttaggaatagtagagggtgttgggtgtacaaccaaagttccacattgtctaaaaatggaaaagatcttgagtatataaggatgaacactatctccactggaatgagttgttttttggaaaggtgcccaaaaacaaatccgcgagggcttaggcccaaaataggtggtgtctgagtgggattattcattactcaaggggatcttgagtgttggatttgaaagtggtaataattgataggtgataaatcctgtttattcatttatttattactgtgttaactgtttgaagaatgtaatttt

SEQ ID NO: 37242 - DNA, 4033 bp, Cannabis sativa
aatgtaaaataactaagatagcaacttaattagataggaaagtagggtttgttgtggagttgcttagttccatttgaagggtatttatagcatcaattaagggtcccactccagtcctgctcctttggaactctctctctctttctctctcttttatctgactaaatacaatagtcaaccaataatctgcgcatggcccatgcatataatataatattttatgtgtatatatatagtgcagcccacgttcagaaactgcttgtttctcttcaactcaatctaaccacccaaattaattaatctaataccttcatcactacttccaattaattaataaaaagaaaacccacaaattaactggaactagtactactactactagactactagtttaataataataaaaaaaaaaataatagtcacttgcactgactgatcatgcatatatgactaaatttctttagctatatatatatatagtacaagaatttaaaaaattaattaaaaaaacaaaataaaatgtcgtatgtgcagtcgacccaaaaattagagggggcgtaatttattttttttgtaagacaagcaaaagtataatttagttagattaaaactaatgtcttatctaacgtaaccattacacaaaaattaatactattatgtctgtaaatattatcttctattataaatatgagtattgctatctagcaccttctcaatatgtcgcgttacgattagctagcaatatttcaaaaaaactattatattaaattatataagatctgatacttagttaaatcaatagcgactggtaccattttgcatttctctataaatatatatggtaaccatgcatgcgactgcccgtttcccttctacgtgggtccgcccctgtgtgagaaaaagcattttctggatcccaccaattcccccaagagaccatttttgtcgatcgtcgtttatgtatggatggacgacttagagagaatacgttaattaaggtttgattcagagaatatttaactttccaaccagaacccacctcaccttgctgaaccgcaccatcttcattcttattttttatatatatatgtttttttaatacatgtctaaaacaaaaaacaaaaagattcatgaatagacaatagtactttgatgattattttttgttcttacattatagtacttagttccattgcctcttggattagctgtagagtcggcgcacgtgggttaattaaagaatactgaacaagaacaagactgtcacgtgtgggcgcatatttatatcaactgtattgctaacggttaaaaaactgttacactttaatattactttgatcattaaaattaaataacagagaaaagaacaataagtacgaaagagagagaaattattaagaggttacaacattatttgtactaacactatataaatataatagaagactagagcttagacacattacaattaccaatgtaacaaaatgcatgatcattagctaccatcttataattaattataaccctaagacattttcagtgtggtgtaaattttatagtaaaaatagctcaatatatggttcaatattatatttggcccaaattttattattgtgctccaatgcacaagatgtaaattatcccccaaaattaacatagtcattacattattattagaactataagtgaacaaaaaaatgctaaaaattgatacgtgatacaaccaggtctgtgttggctgctgagattcagtgttgccgccgggggttgtttatctgagttagccaaaagccttacaattcaaataggtcttcatcttgttccttgtattctccaatcgaactatctctttgagtaatcgaggtcgtgaatcgaaatcacattaccaattcagactggagtagtttcttggaagagcaactggccactgatagcttcatggcatgtacttctattcatgtcaaaaatgagtgtcataaggtagctcaatgtttggctaaattagccttctcttttggttgtaactaagtttagattaggggcttttctgattgtgcatctgtttgtgttaaagcagatttgctttcccttgtttagtttcaaaaaaaatgccaaaaaaacttttaattaataaaaatcattatttaattagtggcaaattagtaaataaataaataaaaaaagtaatattattgtgataaattcaatacgcaagtatacgtatcgttcataagtaattgactaacaagactgagatcgatcccacaagaactgtagttacttaccaaataattaaatttctaattatatatttggtgagaataatatataattgagaaaaggaatttaaaatctattgaaaaagaaaataaaaataaattaaagtgcaatttaactatgattaaaatttaaggtgattaatttcaattgaatctatttatatggtttagcataatttaatttccaaattctaattttcatgtgataaagaattaatttactaaaaacacttatattcaggctataactaggtcgacatataaatctcaacctatatataaatttttttacttttgtgataaatttaaacacataaaagacattaggcataaaaatcctaaatgctacacaaactatataggtactctcgtcctatatatcgaaatctatgtctattttactatagcataatcaacatcacttctcagattttgcattgaaatcatataatatttaattggtgatcaagcaattaaaagtaattaagtacgaatgaaatagatgtacataaaaaattagggaagaactaaatcatattaaaaccaaaataaaagtggtgtttggttggaggtaataaaataaaatgaaatgaaaaggaaacactcttcattctattcctttgtttggttccatattgaagtattggaatatcattacaatagaatcactacaagaaatgtcacttttaccagcacatgagttcgctactgcactggtaaaagttactttaacttttaccagcgcgtgcattgtgcaaactgcgctggcaaagaggtcaaagttttaccagcgtacatttgcagtggttaaaatttaacttttaccagcgcatttacgtactgggaaaagtcatttttgccagggctttcattttatgctggtaaaagttttaataccaacattgatttgccaacccccttttgccaacacatcacaagtaaattttattttaccagcgcaataccaattaacttttgctagtaaaaaaatgtgctggcaaaaagtgacatttctagtagtgaatggtctttctactattgattccattttgaaatagaaggaaacattattccaatgcatgatgagaaaaaatttaataattttttattcaattttttatgcattttaaattttattctattccattcatattcttattctcattcctattcttatgttttcattcctcccaactaaacgccaccaaagtgtcaaacaatctccatcaacaccctaataaaaattttagctactcatattcatttaaaatatcttataacaattaagaacataagaaaaatagaagaaaaggaagaactctttgaaaaataaattttgaaagtcttcaacacttctcccttctaattttcttactcccaaactcatcatctggaaagtattgaaaaagagtctttatatagctaaaaaagattaaaaaaaccaaattttttccagtttagaataggcaggccgcgacactaccttatagtgtcgcgacacttgaagcttgatttttggcatcgagttttctggtgcgatgactgataatattttggctataactcttttaatattgctagaaattcaacgattcaagatattttatagagataaaagagagatctagaacttttattcacaatatttttcctcaaaaagaacgcatcataattaaaaaactgcttgaagctttagacttgattttcaatcacattttgtaatttttataaataaaactaatgataattttttt

SEQ ID NO: 37243 - DNA, 4915 bp, Cannabis sativa
tttgtcaacaagaaaatggaacctgctgttggatagactttttgttaaacagtccgcagtttgatcatgggatggaatatatctgatgtcgagttcttcggcaagaactttatccctaacaaagtgtacatccagcttaatatgcttggtcctaccatgataaacaggatttgaggccaaggaacttgctcccatgttgtcacaccaaataattggagtatgattgagaggaaattttatttcctgcagcagagatcgaatccaggaaagttcagcagccacttgagcaagtgccctgtattctgattctgtacttgatcgagagatgacagcttgcttctttgatgaccacgacactagtgagtctccaaagtaaacacaataactaactacagacttcctgtcatcaggacaagaagcccaatctgcattagtatagcctgtaagagtcaatctgtcattgtatttgatgtgtaggctgtgatcttgagtgccttttaagtacctgagaattttctttgctgcagaccaatgaacatctgttggtgccttcaaaaactgactcagtttatttacagaaaaacttatgtcaggcttggtgtgagtgaggtactgaagtgctccaattaagcttctgtactctgttggatttttcatgagagtaccatcttgaatggacaaagttttgcttactgtcatgatagtgggataggattttaggtgtgtcatgttgcatttctttaagagatctattatgtatttttcctgagataaatacattccagtctcatctctgtgaacttcgattcgaaggaaataatgtaaggtgccaagatcctttagagcaaacactctgtttagcttgcttgtaaactgtttgagtttttccaagttgttacatgtgacaattatgtcatcaacatagataagcacaaacacaatattagtggtgattctgtagaaaaataatgatgagtcagccttagagttacagaatttccaatcaagcaaagtgtgtttcaatctgtcgaaccatgctcttggagcttgtctcagtccatacaaggattttaacagcttacaaacataaccaggatgttccttatcttcaaatccagcaggttgttccatataaacatcctcagtcaagcatccatttagaaatgcattatttatatcaagttgtctcacttcccatgaccttgacacagctatggttagaacgattctaatagtgcaagccttcacaacaggactgaatgtttctccatcatctataccaggtctttgactaaagtctttggcaacaagcctagctttaagtctttcaacagacccatcgaaattgagcttgattctatacacccacttgtttctcacaatgttcatggttggcaattttggaaccaacacccacgtattatttttctttaaggcatacacctcttctcccacagctttgttccaaccagcatgagctaaagcttctgctaatgaactgggcagttccagtttattcataatggcagtttttcctatgtaagtcttaggcttaaaaatgccagacttagctcttgtcatcataggatgagttggagctaagggagcaacagtgggggcaacagattgttcactgatctggttttcatcttgctgatcattactttcatgttcctgttcaattatgttatcaccagtattttctccaggaatgttagtatgttcaaaaacataactgctgtcatgatcatcatgtattccctgatcaaagtgactgttgtgtgaaggtgcttcattgctatcaagagttggagtactatcagtttgaagaggatagttgtgtttggtttgaggttgtggagattgtactgggacatttacagaggcagaccaggaaggaaaatgaacttgaataggtttttctttatgaaaattgttaagaaaaccatgcttgaatggaaactcattttcattagaaataacattcctagaaatgtaaactcttcatgtactacttaagcatttgtgtcctttaaagttttcactataccctaggttcacacatttggtggagtggtactgaaatttgtgtgattggtagggtctcaaacaagggaagcaagctatgccaaaggttttgagatggttatagtcaggctttcttgaaaacagagtttctaagggtgagatgttgcctaaaactggtgtaggcaatctgtttataagataaacagcagtgaggaaagcatcacaccaatatttaagtggcatgctagcttgggcaagaagagtgagtcccatttcaacaatatgtttatgcttttgctcagctcttccattttgagctgaggtgtgaggacataaatgttggaaatcaatgccactttctatgacaagtttcgaaaagggttggtattcaccaccataatctgattttagctttttaatttttctgtcaaattggttttcaacaaggtttttgaactgtgtaaaggcttgaaaagcatcagattttgcctttaaagggtaaagccaagtgtacctactaaaatcatctatgaagtgaatataaaacttgaaattggtatttgacataataggtgcgggaccccaaatgtcagtatggaccaattcaaggggaaattgagctttttcatgatttaacttgaaaggtaaagcatctgacttgccatattggcatgcttcacaaaaatggaactcactgccttttaaattcttaacattcatttgatttaaaacaaggtttaaaacatgattggatgggtggcctagtttcctatgccacttatccttgattgaattaaacttagacacactctcagtcacaggctgagttacattttgacttaaaacagaagataaaagcagaaaaacatgtgggtttaggctgagcagaggagacagaagtggtgttttggtgggatgactcgacacatgtggaatcaaactgatagagtccttctttaagcttcccttgaagcactttcttctttgtttgattgtccttcacacaacaatcatcagatgagaattcgacagtaacattattatcaacagttagtttagaaatgctaacaagattttttgttatgctaggaacatgcaacatctcttttaaaacaagggaactaccatcatcagtaggcatgaaaccagaaccaatatgcttgatagataatttattaccatcaccaacaatgagagaatccttgccattgtacttatttttctgattcagatttgcagcttcagaagtaacatggttgctggcaccactgtctgcataccaagcatcatcttgaagcatttctggcgtggcaacaaatgctgcagcattctgtgctggtttgttgctgtcattagtgtttccaagtggtgttgttcccatttatgactcatcatagcggttgtaacaataagctgttgaatgaccatatctcccacacacttggcaagtgggttttggtcctcctctaccacctctgcctctgccaccaaatctgccacgatttccattgttgttggttcctcctctgcctctgttgtttccttggccaaagtttccaccatttccaaaagcacccttgtttgcaaaattgcagtaggagaggcattgtttgagtgcttggtgtttctagaaaaagaactaagtttatccaacttgctatcaaaacttagcaacagatcttcaaggatctgccaagttgttctctctcgagcttcaatttgcagaactatgggcaaatattccatattcaaactagataagacattagaaatgagtaatggttcagggtaaggatcacctgccagggctaaaacatcagcccattgcttcttttgcttcaaatgcgcagtcatgttcatagatcctttcctgacagtttgtattttatttctgtactcatccattctagattttaaatgagcaccaaacagtgcttctagactactccacagatctgcagaagttagagatcccatcacctcagtagcaatgctctcagtcatagagccataaagccagcccattaacagctggtcattgacaatccactgttcgaattcagggtttatctcagatccaacaccctgctgttcttcaacattgagaacaggtaaaaactcttctggtcttgatctggctcccatcaagtagccatcaagccgatgtcctctagcaatggccataaccattgtcttccacaaagagaaattgttcttatcaagcttgagagcaaatggctaattcaatgtgctcccaaagtgtggaacagagagagtggaggatgaggcaccatacacaattgaagtctggttagcaacattgctaccagcttgagctgaaccatttcctggggtttgttctccagtggccattagaacgaattggtgctctgataccaaggtaagaaaataggaaaatggtaattggaaaaatcagctcaataagctgctgtgcaaacttttcattatatagcctctagggcagcaatagtacattctagaataattacaccttactcccaaaaggttaatgtacagacaaaagaagagaatattctctctgacatttataaccgaaaagagagagaatttgtacagagtgcaatgattggaaaatcgtgcaaagaataactaatttacataaatgacataaaggaaatagcaaaagtgagaaaatggtaacaaatgacattttcattttctaacattatgaataaccaaccaatgaaggtacctaattctctacgaacaagacataaagtgatcatctaatcggcctgaccgactgaacaaagatgactcactctagatcaacgaaattgattttcttgttagcctataaatagttgttcatttcatagaaatgggtgttgggttttatgcccta

SEQ ID NO: 37244 - DNA, 7487 bp, Cannabis sativa
gcggccgccaatggtcgattcgaggtgagtgatgagtttttggtttcatttcttttcttctcttgattggccttgatcacagatttttgctttgtttgtttcttgggaaaataatgacatgggttttttttggtttcgttgacaaagtaggttctttccatgatcttggatcggtgtggtaacccagacattctgaatcgtcagagacaagtatgttagtgtatctttttgaaatcaagaaacatacttttttgttttgtttgcattgatttgcaacttttgtcattaatgagttgttctatgcttgatttagactccattaatgctggctactatgcatggaaagatcgcttgtgtacagagacttatagaagcaggagctaatgtaagttcaaatacgttatgtatttaccatttaaacgattatttcgctaaaagagccattgatcgagtactgatcatcatggattgcgtgtataatgtattagatattgatgtttgattccgtaaatggaagaacctgtctgcattatgcttcttactatggtcattcagattgcttgaaagccattctctccgctgctcgctcagaccctgttgcaaattcttggtgaatactctttctcgcacacatgttttctcccatttttcttttatttttcctggttagatgattaacatttgactttttctgtatggtaatggcaggggatttgcaagatttgttaatataagagatgcaggtggggctaccccactgcatttagcagcacgtcaaagaagatctgagtgtgttcatgtccttttagatcatggagctcttgtatgtgcatctaccggtggatataggtaatactctatgttggtggatacggatgttttatcttatcaagtgatgatcttccacgatccatttagattgatggaagttccatttgcagctatccaggaagtacgcctcttcacttggctgctcgtggaggttctttggagtgtgttcgtgagttgcttgcatggggagcaaataggcttcaactagactcatctgggtaccctctttgaaccaaaattccaaatacataaatgattgcacattatgctctaaattggaggggatccttaagatgaaaatacagttgcctatctcaacattgtgataaagttagttattttaaagtaaaagaattttgttcttaaatagagacttaacattgatataaaaaatataaaaaatgaagctttgtttttgtccattgttaattcaagcagaaaaaattgccattgaaagcaatttcgtaacaaccccaccaaaaactaaatataagtaaaatcaaaataaatttataataaaactaagtactcagattaggaacaatggagagtggactagtttatgcaggatgacttgtatagtaatgttctattcaactatcgcaggagaataccatttacagttgctttgaagaacaagaatcgggcttgtgcagctttgctgaacccctcagcagcagagcctcttgtatggccatctcctttgaagttcatcagtgagcttaatccagatgcgaaggcattgttagagagggccttaatggaagctaatttggagagagagaaagctatattgaaagaggcagtctcagaatcatctccttcgaatcctgatattgagattgatgataatgtctctgaggtaatttgttctctttctgcttttatttgaaatcatctaacactgattacttggaatcaaatttagtgcaagtcttttttgaatattgtttaggagtgtgtgaatgtactaaattccctttcttttttgtttttttgacagttagtattttattaaaggcatttgaatacgtttgaattcttcctttaggccccctgttgacatccatagcagaaaatctgtacccttatacaaacagttaccaaaattcaagctagacatattccagcaaatattataccagaatttttttaaggattttctcttatgcatttggggtttatccgtttatgaagctaattgctgtttttttatattttcctcatttaattagtaaaacagaggaataaaattttctcttgagatgcttgtcctaagtggaaagtccaaaaaatattatatatattccttttatttaaaaaaaaaataatttttcctttgtattaacttcggaaaatatttgaaacaggctagcgaggttgagctttgctgcatatgttttgaccagctgtgcaccattgagatcagaccatgtggtcatcaaatgtgtgctcactgcttactagccctgtgctgccataagaaaccccatttaatggcaacatgtgctgcagccccattgtgtcccttctgccgaagcagtattagccaactagttgttgcaaacatcaacaccaataatgagagagaagtagaaagtagtccttcaaagccgaggagatcaagaaagtctaattttagtgaaggtagcagcagcttcaagagcttatcagctatgggctcatttgggaggatgggtggacgcaattcaggaaaagtggctgctgaatcgagtgaggatgttgacaagccctaaaatgaagcttgtgatgtttgtttttttaagagtaatgctgacaatccagcggatgaactctcccagactttcttccaagggaattgcttggatcttgttgggggaagtgagtacaagtctttgaatacaagtttagcgtgatctcgatttgctaagcatatacgaggattgttgcatcttgtttcatgctttgtttttattttattttattttagattgaagcagcagcaatgcttctagagttctccttttccagatccttatgtgatccctatatgtaacaatcattaaggctatttattatcttttgagagaacaagtctatgagcactgtaaaaaaaagtattgtctctcctttggccatggaaggaagagatgaacaatcttaattatgtctattatatatcaccctcctttcagtttaggaagaacagtttcctcgcagaacagaagtatggtagcaaatataactttttgcaaccctcgaactattatgaagaaattctttgcataacttagccaagttcaggtcagaagaaggggtatttggtttttacttgtgagtttcttgagctgtggtcagaggacaaatgtttgtctctgttttcattgataaaaaatagactgaactgaatgctgatttacatttatataattttaattgaaaatctagctctacaattgtttctgtgaaaaaacaagagagtattgtattgtgtatgttgttgtattgtgtatggtcctagaacttgttgcacacactaatcactatgcttggcttccaaaaagactggtttgtcgaccaactttccgaggcaacccaaaattctgataagctttgatttcaccacctagccctgctgtcacaataaccatcccccacgcagttgcttggatactttgacttccatggttaccaccaatgtcaaaccaaggccaagatgaagaccatgaggaagatggtgttgctcctgatgccgatatagatggtgaatcaccataccttattgtctctgcttcggaattgaaggactctccaacatagccacattccatttgagaaacttgaccaagctcctcttctggctgattgttctccaacgacgaagaggcaccaggagtacctttcttgggcaatggtggtaaatgtcgtttgctattacctgttggtgctgctgctgctgcagcagaggagacttcatctcgagtgggtgactcaggagctgaaggtgaggctgaatagcgtttggagtggcgttttgaatgatgtaatgggacagaagggggatcgcctttgatggtacctggccatgggattgctactgaaacgtctctacattggaaatgctcatatgatcttgtgttaatgacgggtcttcttcctgagactggttgcctagcctcttcacgcttccatacatatacttgagagtcttcacttgcagatatgatatatttcccattctcagtgaatgctgctgttatttgactacttgtattgcgaaatcctgtttgttgttatataaaatgttcaatatcaaaagaaatgagttagaattataatatccttttactctttcattcggccagagataactgagtaagagtaatggaggtacctttgaacttgtgaactgggtttgcaccatccactattcttacccgagaatcagcagaggtaacaagcaattcagatggatttgtgggagaaaactggttcatttataccacttttgggtgtaagataaaagtttgaaaaaaaaaagaagaaataaattaaaattataacattattgtaattacctgaaaacctgtaatctttttggcctgagatttcttcttggattgaaaatcaacctgacttgtttgactcagtttgcaatctgggtccaccaaagacaatccaatgaattaatgaaaccaaaactaaactaaatcgaatcgattatatatatatataaaatatatattttggttaattttttatttcaaaatttttatatgtatcaaattatgctcttgaatgtcaggtcgttaaaaatttttcttgaactattgggattgttgaatttaaagactttgtctaagttcatttaattttgctaatatagcgattgaccatatacaaatcgtgcctcccgaactttaatatttacaaaattatactcctgaactttaatatgtattgaattgtgctactaattttcatacaggttagactttttttaatataattgagcaaaaatatttaaatttaacaatctcaatagttagagaaaaaattttaacgaccaaaaaaatccagggcacataatttggtacatgtcaaaattcaatgacaaaaatctaaattagccttatagttaaggtgttcaggaacaccatgagagtcacattctttgtcctaccttctgtactgtacatgcgacagctacctttgtgtgaaccaataaaagcaccctgcaaattatgagaaaatgttaccaaagatttcaaaacaagacaccaaatttttttttctcatacacatttttaaaacagtaggtaaaatgaaatgggaggtgaaccttgccatcaggggtgtagcaagcagcagtaaccatctcatgaagatcagtccaatccacaacttgtctatcgggtatgttccaaatcctaaccttggcatcaagtgagccactgatgaagtagtcatcattcattggattaaactgtatgcaagttactgccataacgaaacacaaaaatcaaaccaaataatcaacatgttacatcacaaccaatccaatttcataccataatcgttgtgagcaaacattcttaaacaactcttgctttctaaatcccatagtctaacggttttgtccattgacgatgaaagaagcaactgttaatcgatcacaaacaaaaaaaaacaaaagatgttcatgttcagttcaggttaaacacaaaagaaattagaaaccttttacacataacatatacctgatctcttgaccaagacaaatccagaacatcatccaaatggccagtgaaactgcaaaatggtttgtctgagagagcaaacaccgtttcaggcacgtgaacatagtcaggaatggtattggtgccacctcttctactagatgaccctttccctttcttcctcctctccgatggcatcaaaggagcatcagcaagagattgtggccgctccggcgagttacaaatcgagggatgaaggggcgtattggcgttcccttcctctctcaatgacataatcccacactcctgcacttcccacactcgaactatcctatcttcccctgcactcgctagaaaatgggcatccatactgaacttgatacaccagatcgagccttcatgggcttgaatctcttgacaacaatgcaaagccgataactccttataagattttcctgtctgccgaactttaatccaatccgaactagcagtattggagttctttgcaggcttattatgctcagccccagctgcagcaggcggtgggggcaatggtggcagagcctccctttctttctcacaaatgaatccactcatagaagaagccacaccctttatgctatttttgagaagagcaacacctcttctcttgctcatcctcaaactccttgatatgtaagaattagaaatacccactttcctattactcccgccaactctgctgccggtaacgttttcgcgacgcattaattctttaacgacgggagaataaccaacgcacttctcgaactcttccatggtgagttgcttccctgtttgaaggtcactgagcctgttccacatcccatcttcgccatattcattgacgataaactctgtccctgtatctaaattcttgataaggaagaaagccccaaatctactagaggaaaccaatgaagacagagcaccacgaccaccactatttctgtgcctgatcgaacgtcctacgatggtactcggatgatccctcggcgaaactcggatcgtatcggcataagggcatatacgagcccttggagccaaaatggctgagtaagttctagtgatcctctgttttgaattcataccgatcatatcttgcagccgtagtttctcgagggtaaaagactcgatatcactatccgaacgagacctcacaagcacaaccggaaattgaggagacggcgaagacggagaagatgaagctgaaggcgaagggtcttgtttaggatcaacgtcggagcaggttgcagcattgttttccggtttagccgcgacgacaatgctgctaaccctcaatagatccttctccgctgccaatcccattccctgaagcaaccgtttacgacgctccttgatagagcctggagcagtcatccatacatcgtagtttgcagcgcctgcaacagagacgacggctgaggaaggagtgttgggatcggagaagttacgtaggaaatcggcagagcgagcggttgagacagtggaggcgaaggacatgcgacaatcgtcgaagccatcgtcgtcagaagaagagaggtcgagatcgattgcgagtgcagaggagattcggtcgaaagattcgaagaagcgatcgtcgtcatcgtcgtccttgagagcgtcccagttcatggtcaaggtcctgagtcgttccatggtggcacattggggcggtggctgagacggttgtggagacattgaagatggaacgaaaagaaatgattttgagtgaatggaatgaattttagagagaaaaaatagagaaagagaagtttgttcgttaattataaaacggttacgtagggaaatgaatgataagcattcctaccataattaatttaaattgaaaaatagaaatgattttaatcgtaatatcgtttacatctcctcacgtcttttactagtttttttttt

SEQ ID NO: 37245 - DNA, 2484 bp, Cannabis sativa
gacatagaatgcacgatttccttggcaacagcagagttttctgcaatgaatcgacctttgataaaggcagtttgggcaggggatataattaagggcaagattggtcttaggcggagcgcaatgatcttggagatacatttgtataccacgttgcaaagagcgatgggccgatagtcagatacgaggttcgggttttccttctttggaatgaggactaggttagtgtcgttgatgaagaatgggagttccgaagttgtgaagaagtgacaaaccatatcaaggaaatcatgtttgatagtttcccaatgggagcggaagaaggcgactgggaggccatcggggcctggggccttgtccaaacccatcgaggaaagggcttttatgatttcttctgcgacagggatggcgagaagatcatcagagagggcaggcgtagagacttcataggaccagtcataatgcagcatgcttgaacgcccctggttcttggaaaatatccttgtgaagtgtccgacaaaggcacgggcaatatcatccatttcttccagtttgtgaccattttcatctttgataaattgcacatagtttcttcttctcctggtcactgtacttgccataaagaacttggtggctcggtccccgtctttcaaccaagaaactcgcgatttttgtctccagaaaacttcctcacgggctagggcctcatcaagagaatttctagctttcgagagagactcgaagtcacaatttaaggatttttcgatctcagaaagggtggaacgagctttggagatttgagtagagagattcctgaactggtttttgttccactgggcaaggtgctttttcgtgatcttgatttttcgatacatgtttatcatggggttgtggtgctgtgcatttgcccaagcatttttaactacccaaaagactcgcgggtctctttcccacatcagctcatatttgaattgggcgttggaacagctacgccccccttcggtatccagtaaaatggggctgtggtccgagttcgaagctgataggtggtttacaatagctttaggccaggcaagcctccaatcaacagatgctaaggccctgtcaagccttgctcttttcaaacaagttccggatggggatcggggtccttttctgaaccaagtgaatttgactccttggaatcccaggtcaataagaccagtgcggttgacagttcttctaagatcgaaggaatatcgcccgatgttgctagaagaggagtagttcaggcattcgctatccagaagagttccattaaggtctcctattaagagcactgggagggtacattcactgatgaagttgccaatactgttccagtaggactctttttcaccataagagggagggccgtaggaccctattaagagccatggtttatcaggggggtcggatgtgatacaagcaatgatcttgtttttgtctgcgaaatgtatggaacatccgacaccatttttccaacacacactaaggcctcctgctgaccctaggggagggacatatgaatgattgtagaaatgtagttttgacattaaagagttgaggttttcatttgagagtcttacttcagagagaaccaagacttcgggatcaaacttccggataagctccttcagttgtcgaactgtcgctgcattcccgagaccacgacagttccaagctaggactctcatttggatggtggagacatttctgggcaagtctccacggccccaaattgaaaaacctggcttttttcttcattagtctctgaaatgtcctgaatggtgcacgattgtgtcggcttatttttacaatcaacaattacaaaatggttgctgaggtcgactttgaggtcaatgaccttattttcccaatttgctcgtatggcgttctgccttttcctggcttcactcttttgttgctttttttttgtgaaagaattggagttgcagccaagggaagactttgaaggacgtccccttcttctgggagggggggatgtctcattaggctcagagggggttgttgcacggggtgggaggttagtcgcagacggtcttcctcgtcttcttttggatgtagaggccgaagaggatcccggggagtaagcagggacatgacttggttcagcaagaattgaagatgcagatgcttcacatgtaggatggtcaagtggtgttaatatttcagcagaggccttaaaaggagatgggcctatggagataccatcaagggctttccttttctttgggccaagatcactttccaaagatcggaaatcctcaatgtccagcaaggggttaaacaaggatggctcacgtaggtatttgtcaactgtgcccaatccagttagggccctgtaaccagaagtccataattcttttgagggccatgggagttcatgggcctggcttccaagaaggttgtcatagggtctgtgggcctttcctcctcggcccaaac

SEQ ID NO: 37246 - DNA, 4555 bp, Cannabis sativa
gagagagagagagagagtaactaagtagcgcattggtagagtcacataacataataaataacttttgcatactatcaacccaccaacactgtcacaccaatgcctagttatatcacatatttgtagagccacatgcatgcatgtaaacaaaatgcaaagcacactttctcccacaagaaaaatacacaggagaaacagcaaacaagatttagttcaagttaaaagcaatacctgccaaacatcaacaggttttaaaagccaagacgtccaccagtcccaaggtttaagaggaccaagagtgtagtggataacacgaagttcactttcatttaccatccactgcatgaattatgcataagcatcagagaatttaacaggagagacatgcacatgttacaaactagttagtaatatatatatatatatatatatttatataaatttaatgaataccttgttagcgagcatgtaaagacccacatctgcattatatagagtggaaagtcgctccatttcaggtactggtctagacttcaatacctcttgtgataaatttggctcaaagagatgggcattgggaaagtcagagtaatatgaattcagaaacccttgatctcctgaaaaagagtcatgtacaaaaatgttatgacaacatagataggaagattgatgacagtaggatctattccaatgctagaatactctaaaagagaaataaacgccacaaacatatggtcttgattggcagataaaaaatattagcaatagcaatgtcgtgaagtgtcaacaactatcacagaaggaattactgtacctccagtataagattgtaaagtgttcactttgctcatcatatcatcaaaaactttttgtgatggttctactaccattacaccagagttcaatctctcagaatgcttcaagttagcacagaatttccggcatttaaaaagatcctcaatactttttaccacaatagtatccgcatcaagatatacaactgcaatcaaattaggggttattattaaatattttagaaaaaacattgattcaacttattgtgatactatttttctgccattaacataagttcaatcttcttctgtttaaataactgaaaacttgcctttcttgtagtcagtcatgttaaatatttttaactttgtgtagacaccccaaaaccttgttggcctcacttgatttggattttccaacaaactaatctttttcactatccacccatccgcctgtacaaataaaataatatcaaaatcaaaataccagtcacatattcctcaaattaattttacttcttttgaaaataggttccctcctaacactacaatattacgagaggaagaaaactatagcaattgctatgtaggtacccagtagggactactccaacttcaaacgttgtggtagctaaccacatgcctgacaatttaaggtaacccttttggcttcaaatgaattttacttacgaatattgtaaatcaaaattagcttatcatactagatagaagtgttttttattgaaagacaagagtaaagtcaccaattcaattaccttgagaagtgtcatggcataatcggaaacaccatctgagaccagaaccaccatatccttggttgatctggtatccttaatcgatttcccaaggactcgaacccccaacaaaaactcatctccgtacaggagtgtgacataagcctcatcggttgttggatgcaaagatccagaaacagcattcgatggaatcaaaactaaaacaagtgttactagcacgaaccatgcctgcaccaatctcattatactttctccaatttttcttaagcggtgctgttcagggaattggaccttctatttggtggaatattttaaaatgaaaattcacacatagccattcaaattctgtctgttaaaatctgaaaaacatagcaataaacaccgcaaaagtcagtcatatgtatcagagagatgaatctacacacaatttacacttaaaaagggtgtactgtactgcaactctaaatatgaaattagtaggtgaaaatgtatttttcttaaacattatttggcttgagctgagtgtacgaaaaccagattaaggaacaggttgtcaagaacagttcaacaaagaaaataatgagtaactaagccgcaaaaaagaactagagaaaaacatacaaaacccaaatatgaaggtttcaacttcaaccaatatgatagaaactatatgtaatataatatagcaattatagaaaatatacctccgatctaataaatctagagacaattgttgttgtgctgcagaagttgagactgaaattccaacttaactcggattcttttcaaacacatgcaaagcgtcaaagcctaagaatagaaatggatatcaaaattaaaaatttatcgctgcccattaaccaaatgaaaaaaaaaaaggagtattaaaatattgtagctgcacaaagtgaaaagtttatagatgttacacgttgaaaccaatggactaaagttcaatcccaaaaacaatgacaatatcacatgaatcctaaatacccgttggaaagaagaagtcttatctgacctgataagctatcattgttcgtcaagagaaaaatttatattatgagagtaaatccataatataaggcaccacgaggtactaatggtgggaatttttttaaccatatcagcatattatgctattttattcatctacattaccagcatattatttcattttgttggtctaaactatcttggtgatatctcaacccaaaatcgacagaatgcacaccattgactacattagataaaattcaatatattggtcatttctaaaaagagtttcgtatcatactgacaagtctagcatgccatctacagacttacaacatcctctaagacaacacttcctatgaagaagaaaaaagataaatcatgatagattttagatatgtattaaacttgggttcaatactttatttacaaggctctgtgtatgaacaagaaaatattggagacactcaaatactcatcaaacatgcaaacaattaacatttggcatcaaaatgataccgtagattagataatgttaaattaatgcacaaataagaaataacacaacttactcaaagggattcaaatattgataatgcttgattgttatctgattgccccaagtaaatttgcaccatcgagctttgcaccttctaaattttgaaacatgaaaaatcgaattacatactgagattaaccgattatataactaaaccagaaaactcaagtaagacccaacattattaacattattaacactggctagagatgctttaacaccataaccgatcagaaaacacccagaaataacatgaatctgttaatcaaccagaaaatcccaacaacacatttttaaactgataaataaataaagaattaacaaaatcagattcaaacaaaacaacccaaatcacaaaaaaaaatagaaaaaaagaaggaaaatgaaaaattagagagagattgaaccagagagatgtgaggggtctttgactttaacgttcgctcaaaccaaaaattccagtaatcggcaatggaagaaattttcgatcgatcaaagcaaaagatttcttgagtcaggtaaggaatagggtatcttatgctatgctagagatcgagtagaaaaagttgaagctaaagtgaaggattaagtttactgctttgatcaatgaaactcatgacgaacacgatcaatatgaaattccagccacaaactgaagcttccaatcaaactgtaatgatgcatatgaaaataaaaaccacacgaacatgatcaatacgatgttgaattacctaatgacccagaaaattatttcctcagataccgaaccacgatgttgagtgggtgccgccggcggtggttgcagacgatctcttctcagttcgacgttctcccaatttcgatttaggaattagggattggaattcggaattacgtattttaattttaagttactgtctacaccgggtcgggtcggacctctgatataaaatttgtcgggccgggtcgagttaagcccgattcaaccgaggaaattatattatataccctatttaatttatttgttttaatttttaccagtattttcatattctttaaaatatactcacttttatatatgagatgatgtctcaattagactctttagattaatgtaaattataggctagacttaactagaaagtgagagtatattaggcaactcacttaaaaaaaataagtatattttaataaaatataataaaaagatattttttattaatgaatataaaaaaaaatatatttttcaactcattccatccttataaagcctgattgtaacgggctagaaaccgccctcacaaggcgggccccgactcggctcgcgaaaaaagtcaaatttccattcttagagaaaatagaaaggaaatttttacatgaaaaatccattttacacaatttattacaaaattactcatacacgcttatacctacttttttacttacaa

SEQ ID NO: 37247 - DNA, 4282 bp, Cannabis sativa
aagaagaagaagaagttaatttgtcagaaaaataaagaaaatagctaaatcaactatcaaacaaaaaaaaattaaaataattttctttcctctcgtaataccaaacaagtggaagagaagatatatttctattctttcctttatttatttttttctatcatctttaatttttctttcctccctaacaaacatagtgtagtgaaggaaaagataagcagtactgataagtttacatcttggtgcaagtccactgttacacctaatcagaaacagtgttccaaagaccagggtaacagagaccgattctaaaagataaatcaaaccaatatctaactatgatatactaaaaggataacaagagtacatacgtgagcaaacacacgctggatgatgcttaaattttctcacaaaataaaaacaaagagagcatagagtagccagcttacacaagataagggattgagacagagcattgacattaagagccatcttctgtgttttgaccacacagctggacaaagagagtgcaaaccattctgagaataacagaagcaatcatcagagtgaaagaagaaaattgatgaaaaagaatatagatgtttatactttatatgatgaaaaagtagttacaaaatatcataaggtgacccactcagcaaaattaaatcaaataccatgaaacaaagcatctttagacagtagttttaataaaataaaaattaagaaattatcatattagctatgttgtactaactacaacttgtttacagataaattgttgtcaaattccataaattagctatgttgaaaactgatcatgcctataaagtatatagatgacaactactgcttcttatattcatttttatttgtattctctttgagctaggctgcctaaccctacaatatttggggccaataaactacaattgaaactacaacaattgctattgtaggtatctaggagggcctcgaacctcaatcttgggggagcaaaccaaatgcctaaccatttgagctacccctcttatagttatcaatacacatactaatcttagaagaaatatgtggaaggcaatacttattataacatattctgcaatttaaagaatgcaaaagtcaaacgtattataatccacaaattgatttttaagcaaagtatcaatgaaaatctatgtaaaaaacatccggggctaggtcttaatttttgagaaaaaaattttaaggtctgtgaagaggatgacattgagcataccttcctatcataaccataccaaagcaagtgctgctttgataaatgaacaggtaagagaagagttgcatcacgaacaaaaagtactggaccaagctggacaaggaagagagatgaattgtcattccgtgaggaggaagtggaactgttgtgggatgcttcaaacctccataagtctcctcttgcaaccaaagaactatccacatcacgtgttctactatcgtatgtagatgtgaaattgacaattccctgcattcaataaaatagatttaaagtagatataataaaatgaacttttacagcaaaagaacgttgtacatcacgtatttatttgtttattaaatttccaaacccaatggaaaagtaccgattaaaatatgagaagtatgacaatgcttaacactatcaccctcaacaaatggctccccaccaagaaaactactaacaatgagcaaaacagttcacaaatctcagaaaatctgttaataacataacataaattgcgaagaaacaaccgttggaattattagtttcttttttgcttcaattatgcttgcctatgtgcttttggaatcaagcctcaatgtaatgtcaaggaaaggaaaaacatgagaaaaatgactactgtatacatgagaaaccaatggtccaataagtttctgttgtgctattcagggagagaaaggaaaaaataggaacaaatgactttcttgcattccataactaatttgataactccacccaaaaagtaataaaaaaaaattgaaagaaaaaagaaagacatttctcatatacacacaaccagacattttgcaccttcacgtccaagtgattcggcagtcacaactttcatggcatacatgatttagattacatcttaccgatgattacaaatgtacctgaggtctagcaaggtaaccagccgtcctcgtgttaaagccagccacctcctcatccaccactccatccacaccgttttcattctcaacaaacccgaaatctcttaacctatcagtcagcggtcccagttcttcctgaacaatcataccaacatcagctctctgcctgttgttatcaaaatccattcggattgtagcaatcgaattatcctcttgccaaaatggtacaggcaacatcctgaagaactgttgaaccatcccattcaagcccgctccgagatccgccccagcttgcccaattctattgccaatatcaagaattgcagaaacgccgttgattcccgagctttcagacaccaaaccaaagtcccttttgccaaaactatgagacggaaattcaagatcaaaaagcttcgaattttgggggttgggccacggaaaagggggaggatttatgtgggactggatcaaaccggtgaaaccctgtgtcagccggtccgccaggtcctgaccgtgtcgctgcacttcctcccaagcttcgaacgacctttctaccgacatacttgtcaaagtgaattaagcccagatttcctttatcctaataattcataaaaccccctcttcataacttctgtgccagcatgagctcaaacgtatattagcggatttaggcgtataacttataataaacaaaatcaataatcgaaattcaagagctccaataacaaaacaaaagcgatatctgtgaacttagatcttgcaagcttctcgaacagtgcccagaaattctaaaataacggtttcgagctccaaccacagcgggaaaaagatactaaaatagcgtttcaagtttcggaaatagaaaagaaactgaaaaaatatatcaaataaggcacaaattttgaattttatctgggatttgaaggttgagagttcagattcggaaatctctaaaacttcccaaaacaaaaacaataactttagggagtttagtttgtttccctaaacagataaagtcagaaacagcagggaaagacgggaattttatgagattgagaaaaattactaagtgtgaaattagggtttgaaattggggacagagaagagagaaaagcagaggacgggaggagagaaagagcaagcggagtgaggccacgtaagccagacgaaggtagggatactctcatatatgtattgtgtggctaagaccattaagatattattcgaagatgcaggaaggaggaattaggtacgcaacaaatcagagcttcagaacacaaatgttgtcgctcttgaccattaatacaataaaataatgaatacacaaaaataacagattcaaatattacaaatagtatggaattttaaatattttgacagggtcagttattgatttgtgattcaaaaattgtattttttaaaattatgttttggtaacaaaaatttaaattttgtaggtaaaaaattatttctaaatatctgttgtagtgtgatttaatatctttgagttttaaaaaattgaatacgtcattaattgagaatctcaaaataaaaaagtaagaataatttgaaagtttttggattccatgatttgaaaacataaaaaatataaaaattgtgttttcattttttaagcctaactcaaaataatattcaaattttatttttgaaaacactcaatcaatcaagaattattaggtggaccccactattttaattttcaaaaacataaaacagtttttaaatcctaaaccattttcatttgttgttatagttattatttatacaaagtattatttttataaaattttaggttaaatattttttttattttcttactgtaatttataaaagtaatacgaaaataataaaaaaaaactgtataaaagtaattggaaaatatcatctaaacaatatcaaaataacataaaaataatatacaaaaatattgtgttgacttgaaaatctggactagacttctaagctacagtcactcgctagattggcgagaataagaaaaattataaagcaattaatgagagacacaataatttatagtagttcaccactatatcgcgatagtaatgggactacatctacttcaagattttatttctcacgagatagtaat

SEQ ID NO: 37248 - DNA, 2248 bp, Cannabis sativa
aaaaaaaaaaaaaaaacttaggagacataatttgatacatgttaaagattaagagaaaaaaaattctaattaattagcctttatttaattaattaattatatcatcaactagaagctatatatagctataggaaaagtacaaaaccctaccctaaatttctaaaagatttacaactagacatgccactgcatagtatcgatcatcaattctaatttataattaattagcataatctagtcatatatatatcaaccctagataatgacctaattaattagtataattataaatctatgtcgaagaatttacatacttattttgagccttgcccagaagttgtctacactaatcccatcatgtattagattttttttgaataaaaaaaagtgtgtacattttggccatataataattgaatgaagaagctcttaaagtatttatattacaaagaaaagaaataataaaacataatattttttttattattatgtgtttggtgaaatggtgatgagggagaggctgacaattgagctgtgttttgtatgggttcactgtaaggatcttaatttgtgaaggtgtatggttcagtgcaccacccaaaaatattgtacagcaataattaaagtgacctatcatgaagttgcttatttagactagttaacaatggtttatcttgtttgaaatttaatacttatagtgggaatttgatatgtattttacatgcaataatatgggtgatatatgtcaattaccttccttatgaggatacatgatatacagtacatttatatatatatatatatatatatgtatgattgatcagacaaagtgggatttggacccatgattagattagtacttaccaaaatattactgggaaagtttatagcataccattctaaagagatgttttgatacattttctatctcggtaactagtagttagggttttttagtttattttttttataaatatatatgttgtagttatttaaaattatttctaattttttttttaaaaattgaataatgtaccatactcaaaataaaattcatatataattaatttttttcatacacatgaataactgtttaaatcttattttaatagatttaaatctactaaaactgttaagataagatatcatacctattttccataattatatgaaacaaaataaaatgaaataaattttttttattatattttatataattaattaataagtagaagagctatacatacatatgtaggtaggtctctaggactcatgtatgtacattttgaaaagcgttccaaattatttgcatatgtcagtgcataacaaaataaaaagttaattgagctttttttgtgaaaaatcatatatccacattattttcaaacactacatgagaatggtttcagttcatttcatattaaaataaaattaattatttaattaaagcaaattaatttttacatcaccatcccaaagtacattctctcttaattactccaaaattttatgcaatcgtaatataactatcacgaagtttatttcatcatcaaatacgtaccctaaatatttttatgaatatacatatatgtatatttaagtatatatatatagagaaatgctagagagcactactggtgcctagcaccctcctacgtatcaatatcgctattggtgcaattaaatatcgggtcccatatagtttaatataataatgtgtatgtatgtattggaaactatatagtactgccacgcacatgtgagatagattgcatgattgaccaaatgatattatatataaatatattatgttatatatatatatatatatatatatttgctactatttatttattttattttgtaatatgaaccgacaagggattctaatgctgccattaatggaggagacaacatatggattccctgttgatcttttgcagcaaactgtttctttctctctctctgtctctctaacatatcataatatacaaagaccattctctcattaaattcactcattttactatttgtagtttcagaaaaaaaaaatagtggacttcataaaacatcatacatatatttaatattatatataatgctatatagacaaccccactatatactaactattcaaaactcatcatcatcatcatcatcaaatatacatatataaatactcattcatttacctctctaatttattttcctttgctttctcttccttccttctctctctctctctctc

SEQ ID NO: 37249 - DNA, 3815 bp, Cannabis sativa
atggatacaaacgacgacaaaaatagtttggctgctgtgttgcattaagagttgttttccattttccatgtctcctttgtcgcattaattttcatatgcttgtttatttaatatacaatccaatgcttatttcgaaagagacgccttattctatgcttcaccaatccaataccaacttttattttttcttctccaaccagccattaagaattcaataaatagatatcatatttttcattattataatttcatactttaattcaataaataatataagaattcacaaattacccacaatttcattaatttggatacaaattgtcatactactgtagtaagattagaatatggtcaacttagtgacatgtttaatttttgtttagtgagaatttagttattacaaaaaaaaaaaaaaaaaaactagaaattctatcttctccaaaaatatatatatatttttttttcttctcgtgattaatgtcccaaatttaatttttttttttatctttaaatcataaatataaattttgtaagaagaataaaattataaataactcaatacaaataataataaaatggaataaatttaatatataatttaatgtgattgttgtaatatataaatatttaaaaggttgtccaatgtaggacaacgttaatctcagactcaaagatacatatttgattgactcgcgcgctttgcctttacagttcccaggtattgagttaacccacgtacggatcaccgaacttatatacttaacaaagaaggaaacgcttctacacctctctctatttttcatttcttttgtttttggttccctgtaaagtttcattaacaatttatagaaaggagagaaggatttggctatggaatatttgaatttctccaaacggccatcatcgccgctagaacccggtacttacacagcgcaagaatccgcacgctacccccaccaccacgcgcgcggcggggcgtgcaatcgcaaggatatcgaaggtaaaataccgcgaagagcgttgactaggtcggggaggtcgagacctcgacggcggtcacctgagggattcaaggtcttaccgggacaggtggctttgcgattgttctgcccccagtctatgatcggaggccttatcgggagttctggtgccgtcgtgtctcagctccggcgagagactgatactaaaatccactgcgagaattcagctcccgggtcagacgaaagagttgttttggtcatcgggtcaaggttgcctaataaaaggatcgtcctgagtactgaggagtgtgacgtgtcgagcgctcaggatgcgatgcttagggttttggagagaatctggactttggaggtagagaatgagggtgttactatttcggcttctgcttccatgcgagtggtttcttgtagattgctcgctgagaagtctcagattggtgcggtgatgggaaaaggagggacaaatattaccagaatgagaaaggagacctctgctaatattaggatcgcctcagctaggcaagagggattagacaaagttattcaggttcgtctatcttgcaacattccctgtttgattctcaggaaaatgatacaatggaaaaggaagtgggaaaaaataaattacattttttagaacatacactgttgattgacccattgttgttgagtttatcgttaacactggtgacaaaatattccatgagcccacataggatgaagaaatggacacgtacaagtttgaatttccacaaaataaaaaagggatattcactcaagacttataataagctgctacttatgacatgtaatgtaaggaacgtatcattgttggaataacatataaagatggcatagtttctttcctacaaaaacaattgatgtgaatgtacatatgtatcttgaaagtaatcttatatgtatatatgaacaacaatgtttagttcctttttttgtgtgtgtgtaataacagattattggaactgttttggctgtaaagaaggctttcattgctgtttctagttgtattcaagatcaatctaccctagaaagtgaggtcgcctttttgaacagatctacagagtgttcttcccgtgggatgtttcatgattctgagactaatgctgagattttcccaaatcttagttcgttgttaccacaaacttctgttaatataaacactgcttcagttgactattccaaggcagactccgatggagtctccaacaagtatggcacaaagaatacgcaacaagaagttatgtttcgacttatttgctcaaatgatacagctgggagcgtgattggtagaaaagggtccatagtcaaagctctagagaatgagactggtgctggtataagatttgcaaatcctaagaatagctctggtgagcgtgttattactatttctgcatttgaggttagccatactacagctttgaattcgttaaaaatgattgtttatctttgaattctcattgattcccacatacaatgtctttcgattgttggtcatagtttgctctattttgtttatttctttttgcaggacatggagtcagagtactctccagcacaaaatgctgttattcttgtgtttgctagaattgttgaaggggacattgagaaagggtttttattagatttcagtaatggtacaactgtaacagcaaagcttctagttgcgacagatctagttgcttgcttgagtgaaaatgaaagtaaggtcattaaagaaatcgaagaagcatctggtgctgacatacgaatacaggatggaactctacaaaatcaagtggtacaggtacaggtacagaatcagtatgtccttttccttcttatagtaatgtaccatgaatgaccaaaaaagtgttgtttttgctgaacatgctcacaataaattaatggtacttgagtttgtaaacaagtactacttctagctataaaggtaaagatagaatgtgtttcttcaatgcagatcactggtgagtatataactgtacaaagtgctctatttcaagttactagcactcttaggaatcaccttatgcatcgcgaggtccttaatggcatgggcgcaaggagctccttcgctactgatgaagctttgttaacaagtctgagaaaccgagttgtactctctcgtagtccaggtgcttttaaaccaaagctacctcaggttattattttattcattcacctattttgaagttatcaatggaggcagaattaacacatagaggtcgatattgtacaatatatatgtatatatattaattttagttgagtcaacataaattcacacacattgatgttactcttttcaaaaatacatgtactaaattgtagagaaaaaagttaggacatgaccactcctaatcctcctagataacgactttctcattgctaaggcacctaagcgagtcaaaggatatccattgttggaattggtcttattgcagaatatgaaaacagagtatggcaactacaacactgatgctggggatgctttcaaaagatatgatgtgaatcttgaagttggaaggttagtactacataaaacagcttgaatttgtacatctattttcatgcattattctttgtaaattccgcaggtttaaaaggttcaagaatttgtcattctctaaattaaacatgcacctcccaagtgctatgtaacataacaacgatgtaacttttctatttagcagtaaccaacacaatgtagcctaatggaaaatgaactaaaactattttacagtctttggaggcacatgttctgtcaaaaatatcatctttgaatttttgtgcagtggg

SEQ ID NO: 37250 - DNA, 3983 bp, Cannabis sativa
taattttgtcaagtgaaatattcattaaaccaacaaaatagcttcccgtagaagctaatttcccaaagttggtgttggccaacttttgcacaaagctgaatttttttttaaatgattaaaaaagctagttttctaattttatcaaacacattttgaatgatagcttcttaaaaaaatgcgtctagctttcttaaaaactatcccaaatgcaccctataattaataatttacataattaattttattaaaatatccaattctcacataattaggttggcaagattataaatctcactcatttatgctctaaatacacatattattttatatctaataaaatatgtctcattacacataattagattttcttgagatattacatcattgatataattattacgtacatttttaatcctatattaatggttcataattaaagaaaataaaattattattttactatttagttatctcttgttcctatagcgccattaactttactaatgaaagttgtgtcacaactaatttgcgacttgaacgctcgtaattttgtagtaccaaatcttaatctaatagtgtaatgactgtatatttagaatatggattagtaggacaattaacattaattaattatattttatgattatatgtgattattatatattgtggtctctatttttaagaaataggcattagagttatattttcttaattttagagactttattaaactttaagtgtattatagatgacatgtgtgaaaaataatattttataatttttgctcagtaacgatagaaatgtaatgatttgaccattagagtcacatgaatttggtttagaatcttttatttagtgagacaatcataagtaatatttagaatatcgagtttagacagggttgtggtgtttgaccatattacgttaagtattgagataacttaagtggaaagtaaagggtaattttagagttttgtctaagaggatttttatttggatttaatggattattgtggaatagactatagaattctaatttcattgatagaataaaacatatagataaccattattcatctaagtacaaaacaaactaaaaaacaaaaggaacatcttcatcctcttcttccactttgcttcggccctaaaaaccaaggagcatagccatttttctccatcaaattcttagggaatttagcaggaatttacgggaattgaaagctagaaccaaaggtaaattcttagcatctttcttcttgagttttagtggttttttttttcttaaattaagcatgcaatagttgaaaagtggttctgttcaaaccctagaagttgtaggttgtttttttgaggttcattttagttattttaagcttgttttaaggattgattgtggtgttgagcaagtttaagttcaagaactcaaactagactcaacaatggtgatttttggaattatgagttatacttgtgtttattgcttgaattgtgtttattggaccctaattaggtgttctagagagtatcttgagatttggggtagatttgaggttgaaataagacttggtatgtgttgactattggtttgtatggtccatatcagagttagaaaagaaaaagcagattcgataaagaaaataaatttattcaatatgaataataagtccaagactctcaacataatatatatatagattaaatcaagacttaagaaaagaagacaatgcctcttgtagtttatcaggggatcatcgctatcttttagtataattacgatcatccaatccaaaaagtttactgaagaattcacaccacgatcttccaagtcagtctcaccacttaggaatagagtgggctattagaatccataggaggaacaaatttatgtattatactgtattataaactcatgagacaatataattaagatagggtagatcacaatctcacactacactacagtgtaggtggcgtgtgagatgaggagagagagagagagagagagaggcgtgcatggagagagagagggagtgaaaaattcaattcctattttctctttgtttatctacctccttatcgtttgttttgtttattatgatgtatatatcctatatataatgttatcaataaaccatttaattaattcttttaaaataaaagaaaatatctaatttgatttgaactcagaattcaaatttaaatataaatatctaatagctgattaatagaaatcaattaaaattattttattttattattatattttaaattaaataaattatctaataatatatttaattaataatataaagataattaattaatttaatttaaattattttaactaataaaataattaaacaaaattaatacgagcctttatatgtcatcctacatgtgtgggctaggcctacacgtatgagccatatgtggcaatactaatgcattctccccaatagactaaaggaatgtatgattgaaatagaagggatctagcaacattaagcaaatgttggtgtttcctctctaccattgagttttggtgaggtctttgaacacaagagtgatggtgtattacgccaagggacttaaacaactctatgagttgaagttctttgacattatcagacctaaatcccttaattttcgcattgtaatggttttgaacaagatttatgaagacatgaataactattttggcttcagatttgtgtttgagtaagtgtatgcatgcgtatctagaacaatcatcaactatggtaagaaaagacctatatccttcatgtatcatggtatggaaatgcttctaaatatctatatggttaaatttaaaacaatgcttgctgaaattatgattagagacaaaaggaagtttcctttgtttagcataatgacaagtagaataatgaaaattcatacacaaagaattattaaaatccaaatttttattgataggaaaagacttgatacatgaggggtggcctaatctatagtgccacaaggtgtctacatttatttttgaatcagaaaaagacataatagtaggaaaaaattcagatttcaagtaaaagaaattgccatatctttcaccagcccattccaattttttggttcctcttgatgtcctgaatgacaaaatgatcatcaaagaatgtaaatgagcaatgagtgaatgtcatgaaagttgtaacagacaaactatactaaaaatttggaacataaagcacattggttaatagaataagtggtgaaataaaaatagaaccaacacatgcaatttttctagtagatccatcgggtaagataacagaagaatatgaagaattggatttaatattatgaaataaattaagatgggagacacatgatgtgtagccccaatgtcaattatccattgagttttggaaatacaattgttcttatcagaaaaattagaaaccataggctgagatggtggactgtgagagttgtcactgtggaatttctgagcaaggaaagccataatctgttggcactgattagatgtgagagtggaaaacgagtcttgacttcctccagatttatccttagcagcatcatcatttcttctagtaaaattggcagcaactttttcttgtggagctttattttgagttgtgttgtttcctttgtttgggaatctgctacgtagtctgtgaccagatggatagccattgaggcgataacactttgccatggtgtgaccattgagtccacaataagtacaaataagcttttgtctctgagactgaacatctccagcaaattcatcagttggagggaaaacaagtttctcaacatcagcatgaacaacaatgattcctctttgtctttcctcttgaataatggaagcaaaagctttgttgatgctctggagaggatcttgcatcaaaacttgagatcgagcttgactataggactcatttaatccaacaaggaactcaagaacacgatcctcttcttga

SEQ ID NO: 37251 - DNA, 3805 bp, Cannabis sativa
agagagagagagagagagatcagacttagagctagggtttctaacttgcactttatgacttagagcctatcacttatggcttcaaacttagtgttttagggtttggttaaggctcttcatataggagagcttaaaccattcgattaggtaaaataagttgatatttacatattaaattagtaaaatacaaatgactaaaataccccttaaaatagatatttttcctctatttttatgggctgttaaagcccaattcccagtctagcttgttgtccacgtgtaaagctgtgcaccacagtcctgccaggccaatgtctggctggccatgcatctgtaagatgcatgctcgccgaccttgtgttgtctagaagctggccaacctatgctagccatagagccggtcaagggttgctggccaacctccttaaggtggttggttcatcattcgacatcctgtttgagtgtcaggactcccctttgattgaagtgctgagtagattacttggcctttttgttggggcaatgtattgccacttggctgatattggccacgtagacatgtcacgttaggtgggaaaaaatcaggataatatcagtaatattcctatggttctctaattatgttctcaaaaaataaagatgataaatttccctacatggcagtgcatgcaattccaattaacaaagactcaaaaaaaaaacccccaaaatcatggcatattaactataaccctctacccctaaacctatttaaacaagtaaaactagcaaatttctgagaaaaggagtacttacttgtggtattaggggtcggggtgagctgctcgcctaattttgtaaagcctccttgtgagctcatcggagtctctctgaaagtccacaaaagttaattctagagcgacggtaaatagatcagcatattgaaatagttcgttgaacaacttagagccaagatgagacattcatcgagaaatttctaggtttgggagaatttttctctataagagatttttaaaaatttgaacaaatggataaaagggccaaacaatctatctatgttttatctataacaaagcttgtgatctgtgtgccactaatccagggctcaaattaaatatgagaaaacacaaattccaccatccaatagtacaacaatatcagaagtagcatttaatgaaatcctaaaaatcaagggaacgtgtatttgtggtgatattcccctcaagtaatgcactgacatgatcaccagtcagtacaaaacctaaggcttcacgtgccccaacagactacatgactaacacgtaccaacaattgcttgacacgtagatctcatcaatagaatacaaaagtttgggcaattccacaatgtctcataatagaatgccaagaagccaatctagttaatggccaaaaatacgatttcaaattcgaacaaagataacaagcctctgtgactctcaaaccgcaaaggcttagggataaatattattcatgtttctagatagatagctacgtgccattacaaaggcccatctaggataccaagccctttcactgggccaataagatttaacacacgcaatcatccatctaggatggggaaaactttactatggtttaatttctatgattgctttcaacaacaaatatggacaccaagtctcagttcaacaatcaacacttaacatgaaaaatagtgtgaactcaagaaggataccctcctcgcccatccaggaacacaatacaaacatgcatttgggatcacttattgtcctagaaactaccccacatctcactcctcttacacgattttgagaaatcaaacgacttgtcccctccatcaggccttagaaagggtcacatcaaaaaggaagttgcctttttgagcaaacacccactattctaacactctttattccccatgatgactcatgccagccagtcattgtcaacggtacgaccatgaacgaaaggtggctcaatctaaattgggtctcacctaccagctcaataactcaaatattattctattttaccccatcagttggattcttgcactaaaaagaatcctaatgggtccggatcatttcaaccaatcaacaatttgcctacatatggcattaacccatcatggaaagggttagaatttctagtgtccaaaaacgagaaatataagtttaaacaccatatctaagagcttagtagcagtgactcgtagactacggttcattaatgtcctaaccacgtaaaagttagtgtctttttttcttcttaatcatactatatttagcttactatttattaaatttaattttagaaaatctcggtaaacaaataacatttacttatcaacaacactcagtactatttaaaaatatctatcattgaacattcacatatacaaatatttaaacatttaattaatatcaaaataaacaatcatctattgaaacattttagcaatggtattattcatctttaacaacaaattaactattttagcaaatgtaatattcatcttcaacaataattcattaattgaatttttggccactgacaatctatctatttgttaggtatcaaattctttaaagcaaccgatatttcatcttcaacaaatccttaaaattcaaagctttgattaattttatgtacatagaaaaaatcaataaagtttattgtaagttaaattacaaaattaattttaattaatttatgataaggtacatgaataattgatgtaaaaataatttaatatatcttgagaaagacatggtaattagtataagaaagatttatgaatagtcaactgctattgaacaatgtgatctcatattagaaagcctaaattaaattataataacaacaacaaaatatcatagcattaaatatgcataaataaagtaacaacttaatatataatattttttaatgaacaatcaaataaatcatatcatatcgaaaaaaaaataacatataaatacatttaattgtaaaagaaaatagcaaaaattgaaaaatataaaacataaaaatatcaaaattgaaaaattaacaatagtaattattttatccaaatatcatattcttatgaaaaaattaaaatatatatatatatatatatatctcattctctacaaaaagtacaaaatatcaatcacattatttagtaataatattattattaacgcagattttcattaactaaatttgagactcatgctgatagttcaacatagaaaaaataaaagctatagacaaatacaaatatgaacaacgagttttttacgtggttttgcagttaaaattttgcatagtccacaagtcaatcttattcagatttctgagtatttttttcagggcctctttcataagagtttttttcgtccttcttttgagcttgtctgccactatttataattacatagtgggcaattaattacaaagttgaccgaaataaatttatagcaatcatccctaaaattgtggaatttgattacatattatgtagtgttaatacggtttatgatttgtaaatcgtatagctgtgattttcctgtttttactgggtcgaaactatcgtgtattaaatacgtctttaattgttgaatctggagctgtctcgacagaaacttgactgtagtgatcccaatgacgagctggaactattcttctttccaaggtcgacaagatatgtcttacatcaaccacgtgtatacagaaatcttctgacttgccagggttatgagcgtcactcccgttagttggatgaaactataggaagtttcctcatagcgagatggtc

SEQ ID NO: 37252 - DNA, 1843 bp, Cannabis sativa
gaggtatttcgatccttatattcatatagtgtatatgtttatttattccgcatgttatatacacatacatatattttatattatacatataaatgtctaacacacatatctatataaattattttgtttgaacaaattaaaatatataaattatgtagtcacacctgaagcgttgttttcaaggttacaatttacaaatatatatacatgaaattgttattgtaaaacccaaagatatgatgcataggaaatggagcttgattagtctctcaatatatattgaaccaaattctttggctttatttaatgtatagtataatatatatatatatatatatatttatataaacatatgagtatatttataacaaataatatatatagcatggattttggaatccatgtatatttatactcgactccatgtgcttcctagttaactactagcaaagcaatcatatagaatctatcaaataaacattagtttatttgtttcaaatgaaaatacattaatataaaccaaaccattgtttataactaatgtctcattaaatactagattttaaataaataaataagcaaataaaaatctagtacacatatatatttataaatatatacacacacaaatttgtaaaattttatgtgttgtgggagattatataaataagagaggagatattaaaattatcttttattaagtaactataatgagtgtaggaaataaagcattccaaaaatgctcctacactaacaccacaaagttcaaaaaaccgaggtcaattttgacatttctctcttgtgcggatcaagagagttttccctcaaaaccctatcccctttaaggtagtacaaagcctttcttttgggccacaaaccctagcagcccttttctttctcttcttctctctaaccctagcagccacttcctagcagcagccctctttttctttttagccgaacttctcttctattccttgttgcaaaactttgtagcagaacaatactcaaccactgctgtgtttttcttcctccttcagcccttctaatcttctttcttctttcttcttattgcaaaatatagcagccgaaccttctttctccaagctttaaacctgcagaaaaaaccaaagaacaaccgaaaataaaaccagcaaagaaaaaactatagacaccacaacgattgatttcagagttccctctaaatcagaggtacgtcttcgtcaagcgaccttcaaagttgcttgagtcttcactatcaaaattagtttcgggttacaatggttttggagattccaagctacaaagtcagctggtaatctcaatggctctttctctctttttcttccttttatttttggtttgtaaacaatatctctcactaactctctctgtttttctctcttatttctgaggtgattctacaaagtaaaatggctgctgcaactcacaatggctgggtcgaatgtcactcatcaaatgggcaggttgctcctttatttatagtgtttgttgactgggattttgttgtgtttttgaactgagaaaatagttataaaaactgttattattttccttgtattgctgaatgttggttagagtcttgagatattgttatttacttttttattgtaaagagtttaaagatctaagcctataaaaaacagaactgactactccaagagttataatggtctgttgaggcttgtaaaatgtcttattttatttcttcttgtaacttattaatgagacagttagtatgggaatttatccaacaatttccacctaaatttccatactaacagtccaaaaaagtctatgcctttgctgtatttatttgttg

SEQ ID NO: 37253 - DNA, 2376 bp, Cannabis sativa
tgctgaagacaagactgctggtgtcaagaacaaaattactattacaaatgataaaggaaggttgagcaaggaagagattgagagattggtacaagaggcagagaagtataaagctgaagatgaggaagtgaagaagaaggttgatgccaagaattcattggagaattatgcatacaacatgaggaataccattaaggatgagaagattgctgggcaattagaccctgctgacaagcagaagatcgaaaaggcggtggatgaggccattgaatggcttgatgggaatcaattggctgaagttgatgagcttgaggacaagttaaaggagttggagggtgtttgcaatcctatcattgctaagatgtaccaaggtggtgccggtgctggtgatgtgcctatgggtggtgacatgcctaatgcttcttctggtggagctgctggtgctgggccaaagattgaagaagttgattaaaaatgttttcttgattgttgaagttgtgttttgggattctgctgttcttgctctgtttttggatgaattgggtgtttgtgtttttctttttctttttttttttttttttaaggaaattagtattagtaattctgttttgttatgattttcagtcttgaaaaacatatataatgtacaagtttttcattgtttacttagattaatgatataataattgttcacaagactttatttgtgttgatatcaactgaagataaacaatcttggcaattagttttttaggaagaaacaaaatttaaatttgtgattagtgacgaactttgcaagcaaactacaatttaatgtggtttacaataccatgtattataatagaaggctgtcgttttaataagaaactccaccttatgacactatatagaacacctataaaatggttatgcaatagcaatacaatgagacctgaattcgcccagtaaaatttattcatcctagtctacaattccttccttgaccataggccatggatttgttttatatgtatgtttttattttttttgtcataacatacttgttgcttaattgagagtttgagagtaatagttccaaaatcaatcccaagtgatcaagcaattgtttggtaccagtgtagactgtagatccttcttgtgattccaaatatgaacttccatcaactttgcagtattcttaaacttacttatgaatctgagaacatgtgctgatgaagataaactgtttgtgtggattttagtacccatgttcccaatagtagaattaaagactaaaattgaattgaagaagatgaagtagggaagaagacaatgaagatgtaaattactgtaaattagttaaattcttaaaaagtttacatttaacaaaaatttgactaacaagctttcttaaattctgaattggataggagcctaacgaaatacaccatcaaaaacatatatcacagacttttccacctttcttatgtgtagctaacacgtaaattgacgagcttaatttaataatttgagaaaaaagtatcaaaataatccacattatttatgcataatattgatttaataattatcacatctaacgacaaatggggttttgaatcgagcaactgaccagtctacattagtctttggctctttgcaacaccacccctttgaattttatagccttttttctccaaaggtaaatccaacagtaccacattattacaatatactttaaaatgtaactaaaaataatatataacaaaactcgatttcattacttctaattgaaaaattagaaatgaaatatataaaaattagaaaagaaatatacatctataagattctttttataaatagtaaaagtaattagtttattatataatcaatctaaatatatataataattatttttcttgctatatatatagtatagggtgtttgaacagtgtagaacatctaatgagaagttctgaataattttcaatataaaaagcaatattcaaacaatctattttacacgcgtgtaaaaataaaataatcacacgtgtaataaatgttaaaattttatttttgacgtgttaaattttttcaagttttttaaaatcttgccgtatatattaaataattataacgtatatgatcataagaaaaattttaactaaaaaattatttaggatactaaaacaaattaaaatgcatcgatacattccttttaaaagaatacattgtatgattttcctatagcataatatttgcataatctcaaagatttttcaattttttccacttaatttaaatttgtattttgaaattacatttacaacaataaagaaagggaaacttacaaaaatactagaatttgggttaacttttacaaaaatactgttacgcgaa

SEQ ID NO: 37254 - DNA, 2395 bp, Cannabis sativa
aaaaaaagaaaaaataattaagagagaagaaaaatgcctggctttcccatgtacgccgctgttatatatgtatatattcttggtcgacgaaatctgacaaagtaatatataacatataatattcctcatcaccatatttatcagcttgagtagtacctcccaaaatgagtgccaggaaaactatgtaaagcctttggagaacaaaattacttgccatgaaaatacatgtttcttcttcttcctcttcataataactcttcttctgatgatcttcttccttgcttttaattaatacgacctaaaaatagtaggaaatattagatagaaagtactagaagtagaaaaaatttctgggtttcatagaaaggaaagaaaaagaagaataagaagaagaaagaaataaaatgaaaaggttgttcccaagaagatgacgagcgtttcccgttaatgttgttttcaaaggtagagggtttaaatttctcaaaggtgggtccatataataataataattataataattaattaaaataataatgataataataacaagatagaagaaagaagatagaagaccctttatgtttcacacgttgggagtgttctctttgtcttcttttcccctacaacagtcaatgacttttaggcccttcctcttcatctcaccacaatgactttttcttttttttctatcttatttttatatgttattataaatattaatattaataatactttttggtgttttctcaagaaaatttagctttatttatgaaacaatataaatccaatctttcaatacttcgagtcaccatcctcctagctatatatatcatgagttttagaaaccgatataatatagcgccgggttgaacttgtggtctttatatatgctaaaaagaaattacatttagtttttaataatttgttctcaaaattaattttttcaaattcatttcctcattttacaatctctccctctgttattgtgtccaacataagtgttatattgctataatcaagtacaagacagagtctattttttttttcttggataagaaagttaagttcctgagtttaaaattaaacgtacaattccaatataaccttttttattcatattcattaatatgctaaccaagttttcagattttgaaataagtatacattttctttttcagttgtatctctacttttttttttttttttgataaattagattcttgtatattttgtttttgcttttttgacattagaggaggagatttgaactggggacatctttttgtgaaaagaattgtgaaaccattagattatatctaatctatcaccatattcttatatttttttattctatttcaaaacttaagagttttgtttgtacggcttaagggcttgaatgtcaaaacaaaaatcttaagacttgaattattaaatgaaatgaaattcacggtgcatttatgctaaatatcccatatatatatatgtcattccatggtgcgactagtttatcgtgtttttgtgtacaagaaattatggaaatatttgtttattaaatcctactacgaattattattttaaattttaatataatttctttggtcaccgttttatttgtcttggtctaatctttccttcattgaatattggcttaaatttttggaataacaattaatgacattgatttatattaaattgctgggaataggtgaattgatgatatcgacgaatataagagtttatatgctttttcaacggtcttgattatgattccacgccatcattgatggcttcatttattttcttccacttctcatgatttattaaaatgaaactgaaaacaggctacagctattaattgctgatatattaattaattagctagaaaatatacaaattaaattatatatatgctagttttcaattgattttggtaaataatatattgatatatatatattattgttggtattatttttatagtaaagtaaatttatgatgagttcttgttttgattttaatggcattggtaaatgtcgttattacgtacaattcaaggcatctccggtggagagagtcattgctacgtattagatgacaaaaagaagaagaagaaaaaaggttgccatatatattattcggttgaatttaactttgccatcggcgcctcttattttaactgcatattcgtaaatgaatttaatgtgatcattcttggtatatattcaattcaatatactgattagttgaaaagagagaggcacaatatattaacctaactttaaaggcaaaaataattgtacaaattaatatcatttatgaacaaaagacatctaaagcagagaagatgatatttttaattattttttggttactcctataaacttataacaaaaga

SEQ ID NO: 37255 - DNA, 6411 bp, Cannabis sativa
tttctctttcaacttgggcttttgatccactttctcttttgggcttttgggcctactctctatatggatccatgtctaatgggctcactttgcttggttgaagattcaagaaagaaacaacaaccactaactaacccattttggtatataattaattaattatgtcactttaaaaatgagattttatccgtttcttttcaactttttagtgccttgatttgctttctacaataaaattatttccataaaacacatgcacagcacagctgtctattgaaatcttttttatttttagacataaataaatggcattaattgaaaattactcatatatgatatatacataattaaaaagaaaaaaagcaaagggtcctactattacagttacataattgactttgacacgtgttgtttgtgtagtcgtccaaaaaaagttgagtattgtgatttggtgacagttgtcactcctccattggataaatataaataaagaaaaaagtgtcagagacaaaacataaatagaatagactaatgattatagtccacgtgtcaggagttagtcctaggatgaagatcatatataacacactttcagtttttttggtcctaaattaataaataatgtaactgcaaaaatcagattgatatacattagattctttgtctgttttcactcttcccaactataaaaacaaaccgcttcttttctattctatatatataaaacttagcacttgactcaatatataacacattcaaatcaaattcaacaaaaaccaacttggtctgattttctctctctctgactgtgtctgaaatcaaaggaaagcaaagatgttcatgaagaaactagtggagaaagcttctatcaagaaggtatgtttctttctttcttcttcatttcatgattaacatacatcaaaatgatcatgttatggtctggtctggtcttgtttggttgatctgttctttctttttctttaaatgaaattcaaattagatttgttttgagatgagatttgatgaaattaagggtgaaggatccaagaagaaaagctttaataatataatctaatgtataaggagaccccaccacaccataccaaataccaatccttatattattttactatttccctttctcttttgtctttctcatactcttgttttgaatttgatgatgttctcctcaatctttaattttattttcaaccaaccaatctattatttatctttaaatgattaaagttgtcgtttttagtaagagaaatagtgtgatatcactattaatacaattaagtgtttagttttatataattaccacttatgccaaatagcaatattctttcaccacctagattcattcaaagtcaaatgtccacgtggtggccggtgctatatgttttttcccttaaaacataaaacattttagtacaacaaatgagattgtcttgtcatgtcttgtcttgtgttcctctgcatagaaccccacagcaaacaccctacagactcagatgaatgagaatgtatattaagtaaaaaaagatgttgatgttgatggggttttgttttgaaattgaaattgaaattgtagacaaatgatggaggagaagccagtgtaaaagggtgtgatgtagagccaaggcttgtattccaccatggaataccttcaacatcttcactctttgcttatgatcctattcaaaacacactagccatttctaccaagtcagttttcaatccttcaaactcatatcatctccttctttcattaacacatcattcattcttaacttgttaacaacctctcactctcagcaatgatggccgcattaagttgttcggaacacacaatactcaagctttacttgttcaatctcaggaagctcaaccaaccaagtttctccaggttttcatattcatcatgttaatgttttcttcttcttttcataaacttggaacttcgttgtactgatgagaattttgtttttgcatattaatcagtttttccataataaaggcattcttgtcaatgtaacatccaagaacagcattgaggcaagtcttttttagtttcattcataagatttagtcatgttcttgtaacaaagttctgagcaatgatataggtttgggacatcgaaaataaaacattaactcatgtacttccccctctgcaacaagagattacttctttcgctgtgctgcagcaaagccaattcatgtaagcttttttactataactacgtaggccttctgaagatgaatgcattaatgtgttttacttaaaatatatgtttgcagctatgttggagacattgctggtaatgtctcggttgtgaagcttgataaagaagtgtcgcgtctagtacaaactagttacaacatacccttttcagcttctcatggtgagacattcttcagcaacttaatattttgttgtttatctatgatgatgatgattataattaccaagtacatcaataatctggtgtagggaattccactaaagtttctggtgaaaatgctgctgtggtcagtattctgcctcaaccaatggctgaaagtaagaggtaagtactttctcagcaaaccttttcggttggtttttactaccttatgttgtttctagctaccaatgtacttattttcactgcagggttctcatagttttcagagatggtttgataacactatgggatatccgagaaagcaaagtctcgttcacaacaggtggaaacttgttccaggctctacaccatgaagcaacaaaagccacttgtgcatgttgggcttgcccatttggaaccagagttgttgttggttacaacaatggggagatcttcgtttggagtgttccttccatctcaaacttatcagactcgaccgctattccaaatgctccaatatgtaaactcaatgttggatataagctcaacaaggttcctatagcttcattaaaatgggcttatgcagatgggaaggcaagtagactttatgtgaccggtgactcaaacttcgattgtgaaaacttgtctcaggtactacattgatcatcacacttaatcaaatgcttcaacaaagactttaacaactttgatgataatgcttaatgaatgatgcaggtgattctgttgaatgatcacaccgaatctcgcacaatcaaacttggccttcatttgcccgagccatgtattgatatggagataatctcaaacaccaatgagcataacaaacatagacaggattacttcatcttgctggggaaatcaggccatgtttatgcctatgatgattcttccattgaaaagtatcttctacaattccaatccaggtcccagcagactctcccaaaggctgttatggtgaagctgccattttctgattcgaacattactgcagccaagtttattacagacaatccttgcttaggtttggctgatgaggtatgcaatattatgtactcatcataacatcaacactgaacaaactatatgataatgattctttgaaattgtaggaatatgttatggtggcaaaagatatgccacatatgttttctttggatgccaagccaagagatggatcatcatcatatcagtttagtggatttttaagggttaagaacttgtacataactggacacagtaacggagccataactttttgggatgtgtcttccccagtttttgttccaatcttttcaataaaacaacaggttaacactttaacaccttcatcttattgtttgatcacttcaaagtgttctataatggtgtcttttgaatgcagagtgaagatgattcttctttgagtggtataccaatcacagctttgtttttcgatggcgactcccggcttcttgtttctggagaccaaagtggaatggtaagctctattctccttcttgattaaggaatcaaactctatgttatagtgtttttacaagtaagctgaatccacaggttcgaatttacaaacttaaacccgagccatatgccacagagaacaactttttgtctcttcaaggtacacgctttaattacaagattttgaggccatgcattgattattacagcactgtgatgtacttataaaaatactgtcttgacaggaagtacaaagaaaggaaacagtcatgtaattcaaagcattaaactcttaaagaccaatggtgctgtactttctatgaatataagccacaactcgaaacatttggctgttgggtctgatcaaggaaacgtgagccactttcgaccatttccttctcttaacttgtaatcagtttccatgaagttgttacgtaatccagttcatgtgttctaaacaggtttcagtcattgatatagagggtccaatcttgttatatcagcaacatattgaaagtgaaatctgcactggaatcatctcactgcagtttcaaatctgcagcttacatggtttcgagaagaatgtgctagcagttgggacaaaggattcatctgttttagctctagatagtgataccggtaacagattaagcgcaacaactgttcgtccaaagaagccttataaagctctattcatgcatattttcggtaagtgtatttgaaagcattgtaatatatataatcattgaactggcttatagtgaaatgaccattgaaaatgttaaattagatgggaatgctgctgaggatgcagtgccaaagcaaccattactgttgttatgttctgagaaagctttgtatttatattccttcactcacatcatacaggttattattagtagtcttattcagtttctaaagtaaaacttagacagatttcattatgtgttgtctttgttttttggttttagggagttaagaaagtcatttgcaagaaaaagtttcaatcttcttgttgttgggcatcaacgttctatagttccactgatgttggcttcataacccttttcactaatggaaaaattgagataaggtaatagtcagtttttaaggaacaattatattactgaggttcatatttctatgattgcaagtgaaaaagtgtgtatattgagcctaaacatatgtttgtaaaatttaaggtcattgccagagttaagcctactaaaggagagttggataagaggtttcacatattccagtccaaaaccaaactcactctccaacattacagtatgctcatcattagaaggagatattgttatggtaagaattgtgatatatagctctttcattagtagttgagtttcaacattaacttcttttcttttctctatgtgcagatgaatggtgatcaggaaatattcgtcgtctcggttttaagtcacaagaaaatattcaggtgaaccttatctacaaatcccaacttcagtttcaaatgcatttaaagcctctaactttctctttgcttaattttagacttttggagacttttagccaagtctaccaaaaagatctagtggtttcgcaaggacttgtatcagcaggacaaatcatccccaaggaaaagaagaaggtacaagattttacaatggtatacaagcatacttgacataacattggttgtgagactaagacttctcactatctatatatctggtttgattgcagggtatatttagctctgtcattaaagatattactggcagtaaatcaaaacctgcccccaatatcatcgaaacagaagatgctagacaaagctttaaagagcttgaaacaatcttttcaacagataatgtacaaggtgatgctcagcatagagataacatagctgtggatgaagatgaggttgagttggacataggtaaatttagttaccttaactctagctatatatgttcttcttgagatagtaaatataatttgatgttcttgtctatgaagatgacatcgatatcgagggagaaaagcctaaggaacataatattatggctggtttgaataaaaaaaacctggctaacaaatttcaagctttaaaaggtcagtgtggtatatagctcaatggtgttaatacctaactttgaagaacttgcatcatgaaaattgtccaacttacaggtaaacttaagcatatgaaaactaagaacgagaaaaaccctaccaaggaagaacaccaagatgataagcttggtacagttgatcaaatcaagaagaaatatgggttttctaaagctggtgtaagtataaactcaatatttaatgcttcatcttctcatatctaaaggatctaaaaaggtcatatttttgaggttgagaaatggggcacaaaatcatccatagttagaacagccacagaagtcattgcagctataatcccataacaatatgtaagaattgcaattcattcatttgtatttggtgacaggaaacaagtgatgcgaaaattgctgaacgcaaactgcaagagaatgttagaaagttg

SEQ ID NO: 37256 - DNA, 4848 bp, Cannabis sativa
  modified_base (3268)..(3274): a, c, t, g, unknown or other
  modified_base (4290)..(4291): a, c, t, g, unknown or other
tgctagcaaaagttctataccaacattgatttgccaactcccttttgccaacacatcataagtaaattctattttaccagcgcaatactaacttttgtcagcacaaaaatatggtaccaaaagtgacatttctttaaccaacactaaaataaatcagagaattaaaaaaaataaaaaataataataataaatcaataggagaattaactagaatcacaagacgctgttcttttttaatgacgatcaatagtgcacccttaaaatttaaaaataatattatttttattagttgacatttaccacaataaataatgccattttttttatgaattaaagtacttatataattgcattctgaacaattaaagaaataagggaaaacccacagccaagagatttctcataaacttaaatggacaacatgtgatagggttgacctttacatatgtattttctttcaaataaaataaaatatttaattaacaatttgaattggttctaataataataataataataattaactaataataatggtaaaaaagcaaaagtaatcttaaatacacacttaaattacacacataataacacaaaaataagaaatattaactatttatatttatattttgaaacggtaccacatccattttaaatataggggttgtaagattgattaatataacatattattgtatacaaaaattatataatttaatttgtccaaattatttcagcggaaagaatatatatatagtgatagttatataatattttatcaaatttattttatatgtaataatttttttttcaaaaaaaaaatagttaagtaatactataattaaacattgcatgggaaaggaaacccccatcgtattgagaatgactagtccactgagttacagtctagcttgactacaattacgcatctcctttgaatttttgtcaccaagaaataaaattattggttctgtcttagccaaaaaaaaaaaaaaaattcctaattttcttcacacgatcagtcgatcactaaaatttattattactacagttttaaaggctttaatttaggagtggtattaggctttgactaatgcttcaaactacaaccaatttagcatgaaactcaactacatattaaaggcggtgctctttcgttgttagaattaaacttttgtagttgaacaaatattagggctgttcatagaaattggaaaatcgcggtttaaattcagaccgccacaaattagaccgtaattggggaaaccgcttttggtagtttggttaatccggaccgtttacggcgtaagagttcggctgcggttcgtaataaatagtttataatatgtaattgatttatatatatatatatatattgatttatgactatatgtataattttaaatttttttgtgtgttaagttttttattacatgaattttaaattttatgttatgtttgacttttgagaatatttttatattgtcatttatatgttatagatatattacttatcatgttaaatatatattttgaaaaataaaattaaaaatttaataaaaataggataattaattaaaaaaatatgaataattatacattacacttaaattgtagtttcgaactaaaccaaaccgccgttaatggttttgtttggtttggtttcaaaaatttattggtctggtttggtttttaatttaaaaatccgttatactggtttggttcaaaaaatatgaaaatttggaccaaaccaatccgtgaacacccctaacaaatctaacctatatgcttactacaaatttttcatagctaaaaagaggaaacttaatcaactaaataaaaaaactatatataattatggtaaaaaaaaacatatgggcttttgaaatgcattccatataacgggtgcactgatcattcttatctatttcaccattaaaaaaagcttttactctaatttcttttatagccgtatatatttaaaaaaatttgtcatatttattcaaaatattatgaatttttttagagaaatttaaaataatttacaatacgaaaagtaatgtctaaaaaatttatttcacacacgtaaaaaaattaaaaagtcacgtgtgctaacaactaactttttctgttttttttcagttaaatagttgttaggtaaggtagttagttgttgtttcatttctttgtttctgttatgtaccaaaatctctctatataaataaagatggggtataattgtttgattatcttttgctaagctaatctcaattaacatttttcttctttactctgttttctagttttgtacttctacattgtatcaatcgctattgcaccactacaaaacaagcctttagaagccctttttttcagcaaataaataaaattttaaaaaaaaaacacctacgaagttggttattttgtaataaccgactccgtaggtgataatttttttaattttaatgaaaaaaccctacagaggccgttattttgtaataaccaactctgtaagtgattttttagatttaataaaaaaaaaactcatatggcgtcggttattacaaaataacggatgtcatatgtctttatataaccctctctgctatcgtcttcttcaaaaccctaaaataaccagtagcccttcttcctttcaaacccacgaaaccctcacccaaccaccccatttttccccctatttcttcatttttcatccgtttttaccaattattttttaaatcttgcatttttcatacccaaaaatatatccccatagtttgatcgtattttagtcttttagggtaaatcgagcttagaggtggtggttgtggtggttttagctccggctgccgcttttagtggagaaatcgttgaatctcaatgtccattaaggtataaatctaatctccaatctttttattaatataaattgctttatttgtaaatttttttagggttttcgcatattattaagattgtggtcttgtggttgtgcatggtggctggattttggttggtattagtggtcgaatttgggtaataaggtaaaaatataaattttaatagtatatatatatatatgcattttatgttttattgaatgtgtattgtatgtatacatattttgtaattgtatgtatatgcattgtattgtatatgtatacatacaaacattataattacattgtatattttttatttattgtatatgtatatattgaatattttaagacaataattttgttaaatattgtgaatgagaatgacatannnnnnnattaaaacaaaaattttaaaaattaatttctaaaaattagtttacaaattaattcttaattttatcatttttttttctattttcaattttattcacgtgtttttattttttttagtagctattaaatagctagttataattacttgataagttactaattttcattcctattgatgtatttttattactaactatttactcattatagtaactagtttgtaataaataattagttacttggtgttgatcggtttgtagctagctcgaggtatacatttactaacttcttttattaattaatcatgaatgtttagtagagtttgaatatcttaaatatttatctatagtgaagtaggttctgtgatatattgtactacggtcagatgggtggaataatatgcacgttagatgagtttgaatatcttatatattcatccgtagtgaaataggttctgcaaatatactgcggtcggatgagtggtaaatttttgtattgctaaatgttgttgtgattgttttatattattttagattgtgttttgttgttattaatagctttaaattttttgggaacattcaattatagtccttatgctgctgaaattttggtagaattatgactagtttatactatacttagttactagttattaattccgtagctctctgagcgtttgacgcataagcctcacaaattatattgaaataatattttagaatacctaaggttgaataaaatatcacatcaactttaaacataccaaagatgcatcataaaactcaaattaaagtaaagataattatatttctagaactagaaccctaaattctattatcctagattctattaaaataacaaattaaaatattgtacattatttattattcgaaatactaattattatatgtaacatatcttaaaaaattataaaaatgatactaatatactagaaaaatacaaacccatattataaaatttaaatatataaaaatattaaattatataaaaattaaannattacatattatttattattcaatatactaattattatacaaaacataacgtaaaatattataaaaatgatgctaaaaaaaatacaaacacatattataaaatattaaatattaataaaaagataacataaatacaaacacatagtaatataaatgtgtatttatttaactttttaatttaatttttatttatacttattatatataattagtaaacaacccttgcttcacggcggatgtttaaaattttttaattatatatatgaaataagttatatattttatttgatgattgaaaaatataagaagttagatgtaaaatcaagccaacccgatccaacgatttagaatctgggccttatatataggggtgtttataaaatagccgatttaatccaatctccacgatccaatccaatccaatccaatccgcaatgtgtggatatccgcacttgtgagtattggattggataagaaaattcaaacttcgcacttgtgcgaattagatgttgattgacatgtaaaagtaactgttgcccctgattttgtccaaaata

SEQ ID NO: 37257 - DNA, 2610 bp, Cannabis sativa
ctccacacaacacatttgtggagtgtataaatccttttcaaattagcattgctggaatataacaaacgaggatccccaacctttatgacacagtttttccagcataaataaatatgcttattctattactataattcagaaccgttggccggaaacaaacccacataaaagcacctaaaacattttaaaagtcatatttttttggagtacaactatacttctttataatttaattgacaaggccagagttacaaccaagttcttggatttattactacttttctatatatattattacatcgaataaccgaaaaccaaactggctcttttatgtatgtatatgtatagattacatgagaagaaaagggtgtgtgagatgactcagggtgtcaacagggagcttccttcctttatcagcacaaatacactgccggcatctccccttgaaattcgaagttcgccatcaaggtatgtggttaacagccacgattgagcattgttgtttgagattggaatcttcagtggtggttggttggagaaggtcttcacaacagaagaagctgtatcttgaacagaggtgatcaagcccttgaaaggtgtcagatcaattttttgtcccagaaattccacattctcaggtaccactattgagtctgttagttggggagttccaatgatgccttcctcaaacttaatctgaaccaagagaataaaattcttttagaacatactcgaaaaccaatggaaacattctaattcagaaaagttaagatcctctccaacagtgaagtgatcacaataaaatagtcacaggaacaagtcaaatgatcagatttcaaagcaacttatttgtgccaaactatcaattgcttagctattagtctcatagctattaatgatataattaatcagaaataaataacaaagggctaacaagaaaatgaaactctaacctgtacgcgcttgggacttcggacttcaaatttggcattggtagtaatggaggttgtagttaatggaccagcaaactgaacagagttctgaactgttaaattctctgaatcaattgtttgtgatatctcctctatctttactaatggcagtgtaccccttgacaacaatgttaatacacctgggaaagatgtatatctgtacagaggaaaaatattaaacgcataaatttttctaagtaacagcaataaaaatgacccacaaatatttgaccccataatttatcttgaggggagggctacaaagctatgaaaaaacaaaacccttgcagataaataaacatggctgtgttaaggtcatcttgtagaacagattataatttttttaaagtaaattaaaattcctatcacaataaccattctaatcactagtacatattttctgaagttcaataaatcaatgtacttaaccaaaaagaaattcaaactaaattgttatcttagcaaaaaaaaaaaaatatagcagtaatgaaagagagagcttacgcaagaatccatttcccgttaaggagaggcaaggcttcggtcggagccggggtcggattctgggcctccaactgcgtaataagttcaacaatctcggccctagtttcactcgaggccttaagcccccgatcagtaccgtaaaatgaatccaccaaagctttcttaagattcgcagtttcggacggctcaaccggcgcctcctcctcggccaccgccaccgctgatctttcaccgaccggttcggggccccattcgtcatcgtcagctaccctgactcgaaacacaggtcttgccttaccgaattgtcgggtggaaagtttgggtccctctgaaaatctggaagttactccaatcgaattcggaggaaccgagagtttggattgttgtcgcggtggaaccacagagcaggtcttgcatgggaactggtttaattgagaaacggaggccatgatcaagattttcctagctacagagaagcttttagtttgctaagtttacagagaaggtgagcttatctatggcttcttagaacagtcactaactaccaggaaaaccagagactatagaaaacgttttttataacttggagggagaagccgtactcgtattaaacgaaatgacaattgtacccccttcacttaatatttttgtggtgtgttggtgagggtagtattgggtttaaaaggttagattagtgacaggttcatagatacttgtcctgcttttgacacgtggacgacgactaatgggtctacaataacaactggaatttggatgaaggaaaccaaaaatttatttttgtaataagaaaaaaaaagagaaaatatgtggtaatgtgagactattgattttctttacgtggcctagtctagaatcttcttcaataagtcggttcttttttcgtctttggcttattgtgagcattcctattggttccacaaaatatctaaccgatcgttaatttgaaatcaagagttcaatcttatggtatattcaaaaaatttatccgtcaattattttattatttttaataaaaactcaattcattgagataaatttactgttatagaaaaatttaaaaagagcaatttgcggcgaaacccccttatgtttt

SEQ ID NO: 37258 - DNA, 2465 bp, Cannabis sativa
atcttgggttaattgttaatttatctaacacaaatgacatagattgattattacgaatcgcttgaactgcaaccatactatcagtctcaatctctacttcttgcgaagacctactcttagcccaactgtgagcctcttttacgcccatagcttcgatagttttagcaggataacatccaccgtgataaacaactttagcttctaagagtttaccagagtcatcccttgctacaataccagagctatgtcatagctctgttccccttgaatcaaggtagcatcaacatcaatcttaattttatttgtacctggtttaatccaatgctcagcgccatctccattaatcccaagagataatgaagatagacagtatagttatcctgagctttctgccattaatcaagagttgtaaaagctgagcaagaacctcatcgataaaggagatttttttcttccaaactttgctatttttggctttctaaattgcttagctgactgtaccaacttgacacacaaaattaatatcaaatcgatcaaaaatgccatccaaccaattgccgactatagtcacaataaagttatatatattcaaaccgagcttacactagcaagtcttgacagaagagcatgtaagaagagcatgtgatatagattccaagtgggtagcacaaataggacacgctggtgaaatatcaacatgctttgaaacaagttgtaaacaagttaataaacaaccagaaactactctccaatgaaatttttaaccttgggtggtatcttaagctgccatagtttatgccgaaaaccaaaattatcattccccattcgagcttgtttgtggttttgtagcattttataagcaaacttaacagagaatgcacctgtagattcaccaaaccagaaccaaaaatcgtcgaaggtatttgatcaagaatattgacatgaatacccgatccaatagtacgtctagctctcattctcactaattcttgtgcactccaaatattgcgccaaacaaaactaggattacatcctagctttgctgtcaaaaagtcactatagaaaaaataacgagctttataaaattgacccaccagagaagatggattacacagtaatctccaaccttgcttggctagcataacaagattaaaatcatgcaaaatacagaatcccataccaccgacttgtttgtgaacaaccatgcgatcccaagacatccaaatgataccctttcctttactagaagttcttttccaccaaaaatgagctatttctgtctcaatgacaagttcataaaggtaagagaaacacactcatagcatatgttgggagtgattgcaccactatctcaaggaggatctccttaccagcacgagagaggaatttaccgtcccaactattgatccaattgatgattttattttaatgaagccaaggatagcatttttaatccaccaataatatttggaaggcctaagttgaggcttccatcaagaacttcagccatgctaagtgtagtacaaatttggacccgaagagaggcttcaatgttcgcactaaaaaacaccaaagacttggaaacattcactttttggcttgaagctagctcgaaagaattaagcagagtaagaacactttcagcaagtcccaatgaggcttgacaaaacaaataactatcatcaatgaatagcatatgagtaattgaaggagccctccgtgccacacgacaaccttgcaaaatacgattagcttcaaacttcggaatcaaagacgaaaaaccttccgcgtaaataataaaaagataagtagaaagaggatcgcctttcctgataccacgagagggtaagataggtcccataacatgacttccgtgaataacagagtagctaaacagatgagccacaatgcatcacaagagaaatctatttttcagcaaaacccatacgagtcgtaacagtccgtaaataatcccactccacacggtcgtagactttgctcatatagagctttaaggccataaaactttttttcccttttcgtttgcgctttaaataatgcaacacttatcacattatcagaaatgagacgactgagtataaaagcagtttgagtatcagagataacatgataaataagaccatgtataggtttagcgttcaatcatgtcatctattaaacaacattaaaatagcaaattttgacaaatatcaattattggagagattttttttattgtgatgaatccaaaaggtaattaattattgggtatttttacaacaatactcatcataatagttgttatagttcgggagagaatttttttccaaacactaaagggacaataatattaagagattaaattcatatttgtctttattttcataatttaaaaattataaatgagagaggagaattataataggccacaaaagaatcaaaacataattaggatatgaatataa

SEQ ID NO: 37259 - DNA, 4701 bp, Cannabis sativa
caaagcctgccctgagattgggtgtgcctttaagagaaaaaaaaatatcgggttctttatttaaaaaatatgtagtattttcgaaaactacttaaaatatgtataattttaagtaaaaaatattttttttggcccctaagctgagtgggccctaggcgcgggcctaatccaccttaacccaggcccaaccctggatcaaatatttatataagttggtttccttaatttttctaattttgctttgttatattcatatgtagaaatctgagtttggtcatgaaattataacagatattcatttgcagtggaggaacttattaattatgccaataatatctgttgtaaataaaatcaaattaacttgaaaaaaaaaaataataattgaagataagaactctattgcacatagtaattaaataaactcatataatttggtttatattaagaccttgagcttttcattttttatgtcattgtttacaatatttgagtaacaaaagcacaaagttgaatacaacttaaaaaactcactttctcaccaaccaaacactcttaattgaacttaagagtccattaaagcattctcagttttcatcttcattgttgcatatcattgatctgcaaatatattgatttcaaagaaagaaaagaaattgagtacttaaatttcttaacttaaatgaagtaaaattagaaataaaagagaaaaatttaagtacctttgggaaaaaatgattttgtaatgtcatacttcttttcgatcaattcgaataagcgatacatgttgaatcttggaccaatcttcccctgttcttctttggcatctaggagttagtaaagggcatttgtagatttccaaagaagtaagagtttgaggaaggccttcatttggtaagcattgtagttgagagcattcttgaagagtcaatccttgaaatgaggtgaggtgttgaaagccttcgttgtttagagctttaagattctcaaaacatgagatgttgaggtacctcaaagtagatggaagtagcccttcttccgggaatgaatctatgtcgacttcatcatgataatttcccccgaaaggcgatccatagagtgtgaagttaacaagtgatgaggcatcttgaagattccaatcaaatcgtttggcaaagagagcactgcagtcgcgaaaatctaatgattttaagcttgatggcaatcccattttcgagaaggattttagtctcgagcaagaagagagttgcagggtgtcaagggagggatatgcaacatcaatatgtggatatgatgggaatacttgaaccatgtcatgacattttcttattgtgatttcttccaatgatggaagataacaaggaggtagtccaacacttaactttctacaactgtttaaactgaactttttaagacatgggaaaacactacattcatcaacaaatgaccatccccacttgctcattctagacacctctaaggttactaagcattgaaatggcttagtcaatgaagtaatagaagaaggcttatcatctatgcttagaaacctatcaaatctatatatttgaagctctcttaatgaaactagttgactaaatgatggtaacaagcaacaattagtaagtattttaagagatattttggctaagttacaataagatggatgtgctacccatttaggcaagtttgtacctctataaccttcaattgtgagtttcttcaagtttacatgaggttggagcgcgtcaagtacttctctatcttttatggaatcatcagtttcgccgtcccatatcaaaataagctcgctaagatgcttcttgtttcctaagttggcttctttagcatccattgcatccctcacattctccaatccaacaatacacaagcttccgtgcagatgttgtaatgctcctaactctttgatcctagagccatcatttttcgataaaacaaagtcactaagcccttgaagattggtcaaattgttcatttgtggcggcatctctttcaaaggtgtgtcgcgaatcatgagatgacgcaagttgattaacttcgaagtgttggttggtaattgtgtaagctctttgcaacttgacaacaacaatgtctgcaaattgtacaacgaacaaaccgaacaaggtagttttgtgatctttgtttctgatagatccaaataccttagatgctttagattgccaattgaatcaggcaactctagtatagaagattgagacaatgagagtgctctcaaacacccttttccatttagaagccactcataagcccctttttgtgtcaaccttggcttggaatagagatttttatgtgacaatggtaatgagagaaaggtgcgcaaacatttggctttgaatgaaccctcaagtttcaccaaatcatcgaaacctttcatgtaagataaatggcgagttttgcttgtaaggctattgaattcttcaaatgtgtgatctataaaacaaaactcaccagatactcttatagctaaatcatgagtaatgtcatgcatgaagagagttgattcatcccgagtcgaatgttgaaagaaagaccttgatatcaacgcgttcaagtactcttctccaacatcttccattctttttccctcttgtggttgcaaaataccttcagccatccataataagaatattgtcttcctttcactcttgtaaaatgcataatctttaggaaataatgagaagtaagcaaagcatcgctttaggtgtcttggtagaaagtgataacttaaccatagagctggtagaatgttgttattctggttttcttgaaattgcaactcccatacattactttgtaggattgttctccattcttctacatttgacaccgatcgcagaagacctgagattgatttcaccgccaaaggaaggcccttgcactttctaacaatttgcttgccaatatctaccaactccatttgtacatttgagccaagattgttaaaagcatgtcttgaaaatagttgccaacaatcatcatcagacatagtttgaagatcatacattggagtattgcccattttcaacgctacaactttactacgcgtagtcacaataatcttacttccatacgcaccagattcaaacgagcttttcaacatgtcccacaactcgtaattctcattccatacatcatcgtgaacaaaaagaaatttcttccccgtcaaaaccttactcaactcatgttgaagttgatgtacatccctaatctcgcatttccttaaggtgacagactccaaaatcgtctttagtattttgaaaatatcaaattcttctgagacagtaacccatgctttcaagtcgaaatgtttttgaacacacctctccttgtaaacaagttgagcaagagtagttttgccgacgccacccattcccactataggaataacagatatcctatagcgagtgtcaccaacatcatcacacaacaacaacttaacaatagcttctttttcttcattccttccaaaaacactattttcttctaccaaaggggaatacaatctatatgatggtcttttttgatcaacttctttcaaaccaagaaactcagtttgttgtattagattattcaaagaaccaagaatttcctccaactcaaaccttacattattctcaaattgtctaaacacatttgggaaaatgctcaacaacttactcgctttgctcgatccagtttcgcctttctccaactgaactctcaaagcttcagacttgatcttgtccataacatgatcagcatcataaagaagctgtttaagctcatcaagccacttcttcacattcgaatcggtgagttgtttctcctctgcatcatttagcaacacagcagcagacaacaagctagtcttcaacttcttgattagtttactaactaatttctttcctctaaagaagttaacaacttccttagaagccatcctattaaacaaaacatcaagaaaactacagagaagagctccaccaatagctgcagcctccatggatttctcttcttgaaaaaattgaaagcttactatgacaaaaaacagaggaaacagagaacaaataaaagctcatcaattttgaaaagtctttttgattgtttccaagaaactatagctattattttcttattaaatgtgtggaaaaaaaaaaaagcaaggtacatattatcttcaatggacaataactttttctctgaatggtctttgtttaactaaagacaccttccacccaccatcattttcttaccctaccacactttagtgcttctcatttcttgaaatatctaagccaacatgtgattcagatgaagacatgtttacaaaaagctgttaagaaagtaaaagaggacaaaatattttgtttgattgtggacaagaaaaaaaaatatctacatgaaacacttcaagaaagaaaaaagttaaaattttaagaggagtggtactgtcaaccttctattacaatctcttagttaactttcgtgctcgaaaatatatgccggaacatttttttcatttttttgtagcagtgttcgttatatgcttacaacatcattcttggaaatttttgaaattttttgaatagtttacagtaccgaaaatacgtttgaagttttttcaacacgcgtggtaaactggaatatcataaactttgctttcggtattgtaaaatattcgga

SEQ ID NO: 37260 - DNA, 6356 bp, Cannabis sativa
  modified_base (6286)..(6314): a, c, t, g, unknown or other
atgcaatgaaggcttgaccaactctaaaacacttaaagattgcggggatttcttggctggctagctattatcatgaatttgtagcaggttactcaaagattgctctgccattcactcaaaaactcaaaaatgaaaagtttggttggaatcctaaagttgaattagcatttgtagagctaaaataggtcatgatgcaagcatctatccttgcagtctagatttttcaagccatgtactatagaagaagttgatgcttgatgcttttggctatgttttaggaactatattgctagaacagagactagctaccaactacagccacacattggttactcgagcaagacaaaaatcagtatacgggaaggaattgataatcattgtctttgcagttcaaaaatggagatcttatttactaggcaaacggtttgttgctaaatagatcagcaaagcctaaagtaattgttggacaaaagagtaataggagccaattaccaaagatggatttcaaagttgaaggaatttgaattcgacatttaatatcgcacaagagctagcaataaagcaagagatgccttatcaagaattcatgagaatgtagaacgagccaccctcatagttccccaattgcagcacttggatcaactataccaactcaattggtatccgagttggaaatgcttgtagagcctgaagctatcttagatgtcaaatagcaaagggagaacaagaagtactcatcaaatggagaaatctacaagcttttgaggccatttggaaagagccttaaataataaaacaccaatttccttcgatacaccatgaggacaagatgaagtttggaggagaggaaatgatagacccgtactaaaatatactaatgctcgaaaagataggaataagaggagggacttacaataaataggcttccttatttaagcaataactaggaatctccgtataagggtaatttgtcattttatgaattgtaattaatttataaatagtggagtaaggctctaacttagtcaaaatttgtttagattttgggagatcaaaagctctagctgggagagatccaaacctctcgaaagtttggaactttatttgtatctcaaatttttcataagcaataagagaagggatttcagattctattcaacattcatctttgattgggaaattcctataagaaaactagttttaaaagttgattgacatacccttatgaaaaagaatgttgattgacatatccctagactcatgagaccttaagggtctgaaaatggtgcataaacttctgggatgtaccagtccaccacagtttggtcatacttgtttcaaaggctaaaaaaaagcacccattagtagccttgtctaagtatcttagacaaggattagttgtgaagcatgagaagccaatcatctcattgatgtattgaaagaaaagaaaaaaaaaggaaaaagtgaaatgatatataaaccagatgcttttgactaacatattatctctttattttctaatcacgggacatctttgtgaagaaaaaaataaataaatgtaattcacacatcgctatcatgccttattacaatatggggcgaaaacacacacacaaccgataattttactatgactttcacttttaaaagaaccaggcacaacacagagtacaagcccgtgtgagaaaatcaagaagaaaaaagaaaacaaaccttggaatccgcatagtgcaatgctttccatactttgcatgaaagtatacagtacgatcagtgcatagaaatgcaatcttcgaataatcatcgcttagaatctgcacattgtaaagagcaaaacaaaaagttaataacatgagaggaatttgtaggatgagattataatatgacattcacatatggatggtaagttaaaaagaacaagattactaaattagcatagtttttgcctatgtaaataaagtacctgaaaatcaattatctctgagtccaagtgtctttcgaacttcattgaaagctggcttaactcatataccttcacctgtggaggatagatacctatatagaattattacatgttagattatttatgtacttattcactcactataacgacattatcacaaaatatcagatatagaagaaaaacaataacatgtaagcacctgaagccatcaaataatctccatcaggggttgccttaatctttgttgttgcagtttcgaaccacaagtcctgaagcaaggacaccttatcatgatcctctaacaaaccaaaggaagaaagatacatatattacaaccaatcagctcaaagtcacagttttcccattccagtaaagtttagggtttaggatttaagcaatacaatattatcgtttgctctttcaacattttcaatgaaattccgttcaaagtctccaaaattagcagtgattaacgaaattaaaattatcgaaaaagaaaaagaggacgccatgagcaaagtttaggagaattactttgtttaactctgcgtggaactttttgattcttatcaccaatccagctggggatggaacgttgctgagaagttatggtgtatatatcgaccccattaatggaagcatgcttgaggtgctcacccttgacacccccacgctgtcctttcagtatattaaccattgtcgcttggttatgtagttgagtgagggaacgatttgcgaacaaagattaggaattttgtcgtgagtagtcaacaaggaggaagacagattgtatggagagatgcctttaatggtgagtatggagaaagcgagagaaagagatgaaagccctttgggcaaaggtttaggaatggcggcaacgaagctgcaaagaggaagggtttaagaggtcagggcttttaagaaaagaaaatcaaacgcaatcaacatgtttagaaatagtaagcaagtgaaggaccgatgtgcaaatacaaatagtatgcaacgaagcttcaaagaggaaaagggttttaagaggtcagggtttctactagaatcaccctataattttttcttttcttttttttttttttatgaaaatacaatatatataaaccttaaaagtgcgagcagttaactttgagctgagttgtgacctagcccaatacgaacacacggtttatctctctactagttcttaacaatggtgcggccatatgcagtgaaggggaagaagagaaagaagacagtagagaaatatgacaaagaagaagaagaagacgatgcgctagagttagaagatgaacaacaagaaccggaagcacaaaaagaagaagaagaagaagaacatggtgactcagttgaacttgagggaatcccattagccccatctacccaaaagccaaaggaccagcctgggcttatctttattcttgagaaagcttcattggaagttgcaaaagtgggaaaggttattattttcttgagtctaatatgtctgtgttaatcggtttagaggtatcatgtttttatgctatttattctcatccttaactgttaatttttttttccagacttaccagcttctgagctctgacgagcattcccatttcttaatgaagaataaaaaaaatcctggagattacagacctgatattactcatcaggtttgcctaaaaatttctcctttatttatgagatatagtaatattggggggtttatgagtatgatgttttctgattttctgggtatttgtgattttatcttatcataaatagtttcatctgttaccaatttataaatgctctttctatttcaactgagattagcaatatttgcagtgtcttgtagttagaatttttattttcttccttttaataataatctccaactttgaaacctgtaggctctactaatgattttagatagcccacttaataaagctgggagattgcgagcagtgtatgtgagaacagagaaaggtgttcttattgaagttaaaccatatgttcggttaccaagaacttttaaaaggttcagtggtgtcatgtgtaagtttctcttagccgaaattgggttttacttgtatttgtttgttccctcattttgtgtcaccctcttagatgtttgtcaattcttgtcaaaaacttgcagtgcaactcttacagaaacttagcataactgccggtggtaagcgcgaaaaacttttaagggtgatcaagaatcctgtcacccaatatttgcctgtcgattctcgcaaaataggtgagttttaaactcagacatactttccaattgtttgaatgtttgcttgttttttcttttattcttagtagttacagtaatatgtttggattgcaggcctatcatacagttcaaagaaattggtgagaatgcaagactatgtcactacacttagcgatgatgcgaaccttgttttcgtggtaagaaagtaggcaagttctatgtatatttgtttttgaagatgaactttcatttcttaataaatttaaatttcaggttggtgcgatggctcacgggaaggttgaaccagactatgttgaagaccacgtagccggtaaaacaaacattagccctttaatttgttgatatgaaatatgttattaatgacttatagatatgggtgttgtgggtatatcttgtgtttgtgccatttttaagtaatctgtcaactgtaaaaaaagaaagaaataactcttccccttgtggctgtttaaagcatcagaacgtgtaaggtctacaattggcgattaggaatactactcgagagaaacttacatataataatgaatctacgctaattgcattgtaaagaacttgatattgttgccctgaacaagagtagcaggagccacattactaccttgaataagtatttcaaaaagtagttgattgttgtatgaaaattcctcctttttattgtttatcaacagagtttattgatcaggcaaatatattactagaaaggttgaaactacattctttgatttgaccatgtatctttacaaattttaacactgacctttatgtactaattttataggtttatttatttttgcagtttctgggtttcctctgagtgctgcatattgtactacaatgatttgccaggcattggagaaaaagtggaatatactgtaatctgtgtccttccaatcatttgatttaatttcaagtagtttatttgttcttgaaatatggttcttcttcttttcggtgtagaaagataaatagccatttttgtccttgtccaagaaacgtagtattgagtattttattattattggcaatatagtttgtttgtataaaagtaaaaagaaatgaagcttacttgcaagacaatagaagatggcaactgtaagacttgttttatatgtcattcaattccaagttttgttagagataaacctgagagttttatgttttatttctttattaagaacttgacggcaatactaactcaaactacacgtttatttagttacacttaattctacaaatctaatttttttgtagtaagttattttgaattttacttttgttttgctcattttcccaccgtctaaatacctcacttaagtgccatttttgtagtggtttatgtaatatttagagagagagagggagggagggttttaccacaaattaagtgtaactaaatgtattgccaccaatatccctaagaagtatacaattatggcttctttcaaatggggatttctgtttcataaattggtttaaaaggaaacataactctgaattttttagcttgtggaagaggaagaaataaaaaaaaagggaatataaaaaacacaaattgttattcgatttcaggacaagggacacttggcagaggatgagaagcattggtctaaatagttgctaattaaatctccttaattagtcaaggtcactgaaaagctatacgggtttgggaccttagagaagaccaagttcattacacttggaagccacttgagaagtctaacacgaacaccatttgaacataggaaactgaaggcctatcatgaagcaagagtcagatagtccaagcaatggttatacttttttgatacaggatcagatcttgttccctacgtcagaccatggtagtgtgcacacctcgcctttgaatacaccttttttgcctgacggcttgcctaggcgtcttattttcaaggtgcaaccttttggcgacacgtgtcctgtaccacaatggtcccattgtacaacctcctcatcgcaccagaaagaactttcttaggggcccaataatcactattttatatatctattctatatannnnnnnnnnnnnnnnnnnnnnnnnnnnnttatgagaaattcatgggttactttttatttatatttaataa

SEQ ID NO: 37261 - DNA, 2448 bp, Cannabis sativa
aggaacatactctcaaattgagaactttcattacccttttaaaaactcataatcagatctatgtaactaaatatttgcaacttgaaaattttacacagtttcaaaagttcggggcacaatttggtagtcaaagttggggagaaaatattctaattagcctaatttataagaaaaaaggccaaattaccggcagtggtggacttgccgacaccgcctttaccagaagcaacagctatagcatgcttaattccctcaattttaagctccttacttctcgtcccctgataacccctaacacctccgagcctcttcaaatgcaaaataatcaaatttcacagccaaaccgaatagaggaaaagggtataatctcaagcacaaaatacttaccgagaaggacctcagaagctccttcttcatctccaagtcctaaaaagccttcaaacccagatgtaattatgattattttaatccattgaagcaccgtagacaatgaaattcattcaaggatcacagaacacaagccaagtgaaattaaccaaaaaaaagaaaacaccctatcagaatattaaacagagataaacacattacagagagagcaaaaaataaacctttctagttagatgagagcgacggaatattggaactagattaaaagggagaccattacagactttacagttagagctgtgaaagagaagaagaagaagaaagacaggaaaaagattgaatttttctcgtttcttagtcccacatcggaaaaaagaaaagtacaaaatggagccaggtaggatagatgaacattcttacgtggcagaattggacacgctggcttctgctgacgtggcaatagaaaagaaataaaagaagagaaaatggacacgtagccaactcaaaatccactcatcttcaattctctaaccacataaaattttctttctttactattttcccgagaaaattctgataatttcaaacaatggttagtagtactgtggctcaagccatgattgcttcaaacgcattctcttgcgcatttcctacccagaaaagcagcagcttctgcaactttggtagattccgccacagatttcatcaccctagaaattcccggcttcttattgctagagcttccgtcgctgaagatgaagattgcaatgacgaagaatgcgcccctgataaagaggtaaaagatttcctcttgaattgagggattttattttttgggatgattttataattgatttttcatttgagaaagaattgaacttggaatttttttagcccaaagtgaaatgagcttgataattagtaacagtggaatttctcatttgtgtaacctgcaaataatctgattaattagaatattaactgtgttttgttgtgaatatttggttagattattgttaattaaattatattgtttagctaaaccacatgaatatgataaattgttgtaaattatgattggagggaatgtttagaactcacttttttttttaaagaataagattaccttctcatggagtaatctcatttccacttgaaaaatcatatacaacaagggaatgttgaagattactattcccatgaaaagataacaccataccaagtggttataaatgattatctcaatctcaagtcgttttgataaagatagaatcagagaacttgtttttatagtatttggattgattgttgatgtgtgtttgggttgaattcgagtgaaagattgatttcagtacatgtttgaaataggttgggaaggtgagtgtggaatggttagctggggaaaagaccaaagtggctggcacatatcccccgcgaaagaagggttggactggatatgttgagaaggacactgctgggcagactaacatatattccgttgaggttagtaatttcctgatactttacttacaattagtattgttttctcatgttctttttagcttttgtcactaaggactgaccttaattgttgcacaaaagaagattgaattgaatggcttatctcattgttcattctaatatgatatgattacttgggtgaatgaaacaaatgacaatgagctattcaacaaccactcaagagacagttatgattctctaagttaataatgtccatgaaaatctcagaattggcaattctgtcggcaccagtaagccgaatcgaggtgttcgctacattgcaagccctgtttagagcatgcgtttcacatattttggaatgcagcattaatttagagaatcaatgtttcttgaatgaaggaaatttttattaacaaagacttgaaattcatatggaagatcataaaggttatactttgattcatgccaatctgatatggatagagcactaaacagaaaaaagctgttaacaaatggattttaatgagagcagctggttagagagtgaaaaggttaagtttagactctttctttgctgtt

SEQ ID NO: 37262 - DNA, 4248 bp, Cannabis sativa
  modified_base (1252)..(1253): a, c, t, g, unknown or other
aaatattattatagaaaataaaaaaaatttattgcatacagttaaatgtatcataaaagtatacatcttacaccataataaccaaacgatgtaaaatcaatagttaaaaaaaataccctaccagtagaaaacttttactaaatcctaccatagttttgctctatatatataataacatctttaaacaattcagtggaaaaatcttataaataataaaatttaagagcaaaatacatattgattatattgtttttaataaatacagtcggaacttcagcaaaaaaaaaaaaaaaaaatacattcggaaaagcacaagatccaaaaatccgaaaggaataaaaaatgtcaaactattaacaaaagaatgaccttcggcagtttggggagagaaacagggttttcctaatggaaaatgatttcttttttggagtgatcaacaattaaaactataacgtctaagataacgcaatttcatcaaaaacaacaaaagaaacaaacaaacaaaacaaatttaaaactgatttcctatatcaaaaaaaaaaaactaaaaaaactggagattcagatttaagacctctagttcccacattttcattcagaaaggatacaatcttttcgattttagtttgattccaacacatttccaatgtagctccccaaacagattttgtacacgtccttgtggtaatccagagatcataacgcagaattctacagtacatacatttcccagatctcttgatctgaggcttcaaaatggtgaactacgaagcttacattcttcacgatgagtacaacactccttcagatcggctaggtacgagtgggcattcggtaaagcaaattaagcgctgaatccagtcagataggcaacaaaataagaaaggtcgtctgtgcatgtgtacatggtatgcgatgagcattaagatcagctagcacttggccttattactatcgagtacgctgtgcagatggaaagcttcaccttggtccccatttaaagatcttctctccaaacagcacgcagtcaactgtctgagtagcctctcaaggtacgaatgcaagaaactttgggaatctttcatattaggattcgttgacaagatcattgcattaacagtgtcggccacaacctcacgttgtgtctcttcgagaaggtaccctactgaagactcgtgtggccgttgatatgccaacaaagcaacacagtcctacaaaatgaggattttatgtagagagagagagagagagnnagagagagagagagagaggagtaacaagtaaaatttgctaaccttaactagatcgtcaaactcagggaactcaaaatattttgccaattccattcttccgtatttcacagcctcctctagtgctccaacctaattatcatagttacactcaacgagaataaatatatacttgaagaaacaaataagatggacccgaaagaatgacaatgcatgttcccaatttaattttaagtgacagtaacagcaaacaggaaataggaatccaagagatgcagtgatacacctttatttatttatttgcaaaaatatcaggataaagagtacttgactttctgtaagagtaaattcaacgtatttaagacaacagaataaaatcatactcgaattaattcaatgaatttttgacagtgaagcagaaagcaagttgctgatttatcatcctgcagaaagaaaaagtgactcgttataattaacaaattctgataaggttaataatgacataaaatcatcaaataaagagtgcaaagaatcaaagtttagaaacaatatggtgtgtcacaatcagaacatggattagaaaatgtgagatgtatcagtgaatccaacatgaaagtgtaatgacaactgcaaaacaaggaactccattcagtaatcaattagaattactgctaagatgccattcacgatgatcaccatatgatgaatgataagatcaccataacccaatcagaacaagactgaaaaatagaatattctcccctggaaacatatggccctaatgcacaacatagttccacatggcagtagctcaatttcttgggtgggctgggtgagcaataattgaaagtagtccaaaattcaagtctaagtaaatatatctcatcggaaaagaaaatgcattgtgtaagactatatttgcagaactacatcagctggaaatatggatatgaaaaaagtggtaagtctcttttgtaatgtaagatgcatattgcaatgaaggagcaaaaatataaagtcacctgaacaatctggggataccactcacgaagttttccaagtgcagcatcaatatctccattcctaattagcttcattcaaacaagcacatcaaaacaatatcatattagaaaccaatatatttttacgaaggaaagaaaattgcaaaatggaaggtatattattaaagaatagtgatcaaatcccatgatacatgtacttgcatatgataggcctagtataatgcaagacgtaggtgatgttaactggagtattatttgggaataatagggactggttttagaaagtgtatttgtctaaaatcagattacttcgggaaggtttcataggacaaatagaaagactgagcgtgctggagttaatatttggtgttgtgtttcaaaccttggctctaggagagaaccaggtctctctattacctgtggatactgtttttccttttttaattcaataaagcacacttcataagtcctcataatatactttatgtttgttatctgtaagtatatcaatttattagaccccacatatgggtagaatataataaataatgaggtatatgggctattgtaatgagggggtgctgggaatgagcatgaataggatactactatacatataagggaaagagaatgagggcaaagtcaatagagcttgactattatgacttcaaacaattcaattataagcagctaagaaatatgacaaaattcaccaagtagttacaaacctgtctgagaatctttctctgactcaatgcatatactatatcatgctcatcaaacccattttcttgagctatgtatattggaggaacagtacttttagtagccgtgtcaaaagaatgaagtgtatcttcatagccataatattgcaaatatgagcgcacaagtctggttagcaaatgcaaatgtcaaactcagtactaacatgtatagaggacattatggatgagcttcacttcaacattgaagtcctcagatattgtaaatactaagagctcgtttagtataccgttttgtattgtgttgtattaatattatttaatacaatacaatgtttggcattgatttgcattaatagatattgtaaaattatactttctttacttcaaacttgaccccaaccccgacctcgatcctagacccgaatcccatctccggcctcggccacaaaccccgacccgaaccagaaccccaaaccccgaccttggacctagtccggggtccaagttggggtcgtgatccaggtctaggtccgaggtcgggtctgggtttgtgtccgaggtccggatccgagtccaagtctcgatccggtcccagtccgaggtcaagtccgtgtttgctaccgagtccgagtccctaaccccataccctttgtaaatattattatataagctaatacggatcatttgttatgtattaaataatataattcacattgtattgaaattcatagttgtaataattaatacaatacaaagttttatccaaacatagtattcttgttatttaatacaatacgactcttatacgttataccaaacgagccctaaaacaaaaaactggacatactggttagttcatactcaaaagagctagagtaaacttacccatgactaacatttgttggtaaagacattttatcaactgtcatttgtagcttcatcctctcttgtacttcaaactcctaatcatacagcaatgatcaaattagaaggaaaacacaatttacaaacttagagagcaatctactatatcagatatggcagattttgtttcgctttgcagaccatcttgaatctgaacttgattacaaataagaagacagcaagaagaaaatctgtatactcaacaaacacgtctataggaaaataaaaatttgacgttaaatcaagacattctcatttagtaacatggagttctttcagggaccacgcttgagttgtgtagattagatcatatcgtgaataaaggta

SEQ ID NO: 37263 - DNA, 1466 bp, Cannabis sativa
tctctctctccttttgatgataaaatttagaaaagcctgtgtgtatggatagttgattgtgagctttcttacttagctctataacaatacaagaaaggaaaagaagcaaaatttgttaggagaaagaagtcaatcagtcatggggcaaggcaatccattatttttcccatcttttgatgaactttgatattttcaaccccaattggctattttcattttctttttccttatattaaaaaaaataaataaatcattatcatcattagtaggagagttgcttaattattctttgctttttaaaaagtcacctctttgcttgtttaatttcccattatgtcctcctcctcaccccatcatggtttgaccaccataactctgactttctttttaagtaggcttagctggtttacctaaaaaataaaactcttactagttatttatgagttgttatgaccaaataaatgaaatctaataagagttctcgatattgggaattatgttgtattccaagttcatctttttatgcatagtctctctagtagtggggctgcatgggcacagtagtagtgtcagcatagatgctacagtgtttttgtacacccaagaaaccttaaatattattttaagcatgttctcatctcaccttgctttttcttaaaagggggatttggattgggatgttactccatgatgattttggaaagactttcaagatgtacttttttgtattttattctgttgaaaatcagtgttatttaacaacttagttagttccactatactagccagtagccaggtagaacaagtgtagaaatttgaattaaagttgaagctgttatttaataaaatttctaacagaattgctaaaaagcaccactggtgcctagtacccttctcggtgtcatactgctattggtgtaattaagtatcgagtcccatataacttaagaaaataacttttaggggatatcgctaaccaatcgtaagaagccacatagctcattttctaattatcatctaacctgagaattaatattatactgatctgtacatgtgacaaacatttttacttaataatgatttttgaaacattagcaatgtgagtttttgtaaaattagtgatatgaggttttttcacattgggttttaaatatggcatctttgactttgagaacacgtgcaattctcgcgtttttttctcctaatattagggaggagggattcgaacttgggacttccggtaaggagaggtgcgaaatcactagactatgcttatgagtgtcagtgactcgcactttttgttttgataggaataatggtttgctgtttgtactttgttgggttgtagtcaaacattacgcggaattggagcaaagtgttttattagaagaaatttacataatagatgaaaaatttgaaaaaaaaaatacaaaactgtttttttcttgttgttgttttatagttgt

SEQ ID NO: 37264 - DNA, 5670 bp, Cannabis sativa
  modified_base (38)..(57): a, c, t, g, unknown or other
catactttatatatgtttaattttataatcgttttagnnnnnnnnnnnnnnnnnnnnaatcaacatacttgtgagtagattgaagatccttgtaaaataatttccaacaaatgttggcatgggattggagttaggggtgttcataaaaaccaaaaaatagaaaccgaccatcaaatcgaccagactgtaaccgaatttttagtttcacattatcatcgaatttggcggtcgatttcggttttggtatttttgacatggcggtctgctttgatttttgaaataaaaaaatatttaaaccaacaaactgccaaaaccaccaaaaactgcaataaactgcccaaaactgccaatccaaaaccgccaaaccaaaaaaccactaaaaactgccaaaaatcgtacggtcgattttgtacggttataatttctaaatggttggttacggtttgtaaaataaaaatcgtaaccgaccggtcggttgataaaaatcatgtctatttttttattactatttttctttctcttttttttttattttttttcttgatggaaattaaactactatgacttgaaaatgacttgcctttcaaagtagaataaaactaataacttacaagtttgctatgtttatcgtcgatagctcgactcgatctcgtctttcttccatatacactaggtcaacgagatgaattacaacagcttgttcttcaaccgttgactcataatatgactttaattattgaccatttactttgaaagtctttccaatacttagactcacgacttctaccgcaccatgagaaaaaacttttgtgaccacaaatggacctatccatcgcgactttaactttcctagaaagattttgagccgagaatgatacatcaacaccttctaaccttctataaaattcttttgatgaatgttcttgtcatgaaaagccttggtcttctctttgtgaattccaactcatgcaacttaagcattatgtgttgtccagccacaatcatgcccatgttatatttttttacagcccaccaagccttgtgttctatcttaactggtagatgacatggttttccatataccaatcaatataatgacttacgaataggtgtcttgtatgcagtacgataggctcacaaagcttcatcaagccttgtactctagtctttttggtttggattcacagtcttctcaagaataagtttgacttcccggttagagacttctgcttgtcctttagcttgagggtggtaagctacaatcatcttgtgagtcacactttaacgagtttgaaaaaaggattggacattcacctaaaatgaattttttgggtttgagaacttttcacctaaaattttgaagaatggctaaaagtgcaaagtgatttctttgagtcgtatttatagtaaatctgatgattcacgtatctctaatccaagggctcagattgaatttgaaaaagcacaaatcccattaatccaatagtacgggaatatgaaagggtatcattaatgcactcatcgaattcaagaaacccttataaatgatgacattcatctcgatcagagtgctaacatgaatcaaccgccagtatggtacccaatgtgacacataccctaattggccatgtagctcacacgcgctaatggttacctgacatgtggggaacaccaacaaaatacaaaaggtctagggtattcccaaaataccccaagcagaatagcaagaggactgttcagttcatggtcttgggttgtgtctcaaatctgaaggaaggtggcctgtaactcctgagccacgaaggttgggggtaaatgttgttcgtgattctagatagatgacatttaggtcctaacaaaggcccgttacggatacgaagcccattccctggcccaaagcggattacttactcaacccatctattgagaacgagcaaaaccagactggcggtccgattccctgatcacttccaagtgatgaatccagacaataattcttgaatattaattttgtacttagtaggaaattaatgtgaactcaagaaggataccctcagggatcattcgagaacggaatatgaaaaggcgttcgggatcacttggtgtctcaggggttgctcacataacacctctttgacacgatcctgagaaatctaatagcttatcccttctattaggtcttgggaagacataaaacaaaaaggaaaccacctttttgggcggacaatcactattttgatatttcttccttgcaacgacggcttacgcctcacatcactgccaacagtacgaccgtgtacaaaagacaactcaatccaatttggtcctcacctacacggcccaacaactcaaattatattaataaaaaattgtattttactccatcagtgagatttttacactcaaataaccctaatgggtcaaaatcagtccggtccatcaaggatatacgcctataaatatgacattattactccatataaagacttgaaatttctagagttcaaaactaaaaaatatattgtaaactccatagccaagagctcaataacagtgactcgtggactaaggatcattaacaccccaaccagcttgtctcattttattttaatatttctttatttaggttaatctttcttataatgggtctccagaaaacctcagtaaacagtaaggattcagtacctaacacctcaacatatttcatccacagcaaaaatatcgtattagacacaacagaatataaattgtatagttgagtagacttaattggccagttctcaatataacaccctgggttagctagagcctgaaagaaaattgtttttgatgtgttgtgtcaacacttaacaatatatgttgcttgaatttctagattacccttttctttattccatgaaaaccttgtgtaattttgtaatcaagaggtttgcttccacaagatctgagattcaagtcttccatcttttatagattttttggttagttccatgttttttgctttgacataaacaacaaaggagctaatcattgtgtaagtgtaaatcttgataggaatttgaacatcttctaagatgttcaatttgttgcatatttacatgaaattcagaaatacatttctgaccatctacgggcctctaagtttcttgtctctttagcatttcatcaacttttaaccttcctaaactctgttttgcttgggatgcttgacaatcaccactggacaattgacattcttggcacagtggtcactcacactaccaagaagagtcctgcaaataaatacgagaagagattttcagaaaatcaaactttgtaaaactcataactgagagagtaattaattggcaaccttttgaagaaaccatagccatgacttcccatgactaaagtgtcagctctaagtttctcaacagtatggcaaatcacatctttggcgtctcccgtcccgactttcttctcaacattcatctgaaagaaaaggctgcaggtaactatctaactctctatgttctgaactgaaaaccaagtgcttgaagagtagagaaaaaggcttactttgaccccagagtgttggtagactgcttcagctctttccattactgaatgcaccaattctttggcgtacttctccatcgctccaatggcatcagtggaaaacaagtaccctataaaaacatagtacactctagatctatttagtatctgcagaaccatcaataatattttgctttgttttagcaatagtaccaagaattgggattgttacaaacctgcagcatctaaagaagagtaggccgaaggaggaggtttgacatagagaaggatgagagtggtgttggtgttttggtcatttttagaagagaaattgttgagacaccatgatagtgcatacatgctctcttcactctcatccacagcaaccacaattttggtttctctccccatcatcttcacttccatagccattatctaaagagaattttcttggcctcaagatattgataacaaagaaagatttaaagggtatccaaatttatagaaaaggtagtagttggttttggccgttgtttataatagttttctgttctgaagcatgggatataaatatcaaattgagtgaagagtggttttagaacactaaataccattagcttagttatcaagtttagctcatattattaattgtgaaagtaactcattgaccaatggaaattggacaagttgccgagttgtgagataataatagagcttgagctatcttctattgttatgtacatcttgtagtcgtagtcaaaagtctataagcagccaagccaaaaaatttaataaataaattattcaaagctgccatcatgagtgagactcatccattgtatggggaagattattatattaatggtattgctattcttattagacattttaattgttcaacatcataagagtttatgatgacgttttaagagtatttaataattatttattaaataaaatatatggaatttaatattaaattcaaccatagatattgggaaccttgggtgtcatttaacatttcacttatgaggatctttaatgaagtgcttaaaaaatagtgtattattatattttagcacacttaaaaaaaattattattctaaataatgttctaagaagtgtgttaaatttcacacatgttaaaattcgtgtcaaatttaacacaagatataacattgtgctaaatttagtccgcaataaatattacttttatatttactataataccattaattattatgatttatcgaattttacttaactttacattttttattgagatattgacggcaaaactatctaaactatacatcctgtaatacataatcccacaaactaaatttttaaggataaaaccttccaaacttcacttctgttatggtcattatccttccgttacatttttacagttaagtactgaagtggtttttctatgtgtacacacttctacatgtgtgtgtgatattttgattgatccacgtaattttaataattataaaaattaattaaaaattttaaaataataaaaaaatatttttttttctttttctctttctttttctctatagagcccgatgatagcctcatctcaccttgccaccattatcactagagaaatgctgacggacacccatggtgcctagcacctttataaggtgtaatatcattattggtacaatttaatattaggtctcacttattattattaataaaaattatagagaaccgctaactaattaaaagatgtcatgtcatagaggtgctaggcaccttggtgtcccatagcaatgctcttatcaccaccaccaccaccaccaccattagcaccaccatatctattaaaaaaagaaaaaaaaaatcaccatatacaacacaaaaacaccagatttaattctatttgggaaagagaattaaaaaaaaccacagatctaactccacaatgagaattgtgggtcgatcagagttggggcttccagtatggatctcgacggttgaagccaccatcttgctggcaagaccatcacacttccaaagcctcttggttgcaaacagaacactcgggtctcgtgcaaagtataggtttagcaattttaattttaagaagttgaaagatgaggagaggttattatt

SEQ ID NO: 37265 - DNA, 3695 bp, Cannabis sativa
cgactcgacacccacccacgcacggtaggcacccacccacgacgatgactggctcccttgtcggctcagttcggcgtccggtgtccacccaccgcgactgttctcttctccgactggctcagcccaataggacccgaacccgactacacccaacctgaaaaaacccgacctgatacccggcgcacccgcacacccgaacaccgggtttggttgtgcacttccaaaacccgaagcccgaaaccctgaaaaaccgaaaactcgacccgtgtgcacccctatcttcaataactctatgcatcataatttgatcgaaaaattgataagtctgttataaaaattccaaaaaagaaataataataataaggtcattttactaattatttcataaataaatgacttttatataatgatgttaatagaattttgctaactgattttatttgaaaaattacattaatgaactatacaaatctttataaatttaactacgatgctctaattaaatggtgtgcaaaacgattagcggatcgcttgacaaaaattaaaaacacattattcaaactagaaagaatatattcgcactcggagatgcagaacctaaaaatagaagacatatccttcaaatttcaaataacttagatcgtgatcacactgtctgactccacaaccacacattcataacccgtctctttcaaccagctcaaatcctatttagccatgatagcctcagcaagaacaatgtcaaccacacatatctgacttgttgtccaagccaaaataagttgactcgaagagtcccgcatgacctaatcatactcatgcttgttcaaattgctaaagataactgcatcgatgttatcaaaaaaaaaaataataataaatgcatcgattaattttgattgtattaccacatggtgaaatccagtgctcatcccctttctcgtcttgtaaagagaacaaagatgaaccaaagaaactatctctttaacagtcttattcttatcattctaaacattatcattgcgcatagatcacaacgcccagcaaagcatagcaactttatgttttatctcaaaattcccactctgaaacctatcatgaagccatcctccaaaagaattgtccccaatctccactattgaaataccaaccatcctcaaaaagaattgtccccaatcttcactactgaaatacctaccatcatctagcatgcgaaagtgaaagaacaccccacaagacaatgtgaaatggattcaacaactcgtaagcaccttggacacaacaataagggaagatggacatgcttcacacctaattggactcgagtaagaaaacaactggaagtagtcttccaaactaaattcttaacttcaagaggaattctcatttcccacaactctttctaaataaatagagttgccaactccaaatgattctcctttaagctcctgaataagccgataatcactcttaaccgaataaacattagagctttcacatatccactgccagatatcattagacactgagagaaacaaaagaatacctaaaatgagcttaacatcctactccacaaagatgtctttaagaaccttttcatcccaagacgtctctccaatcttcataagactagagactttttgatttgctaaactaaggtgattaaaaaccacaaataaattatctttatttcgaagctatagttccctaaggatatcaatactcatccctcaactaacaaccacacgaccccttttcgaataaaagactaagctttatagatacttctaaataaaacttgaattacttttaaactctacatctaagtaagagccacaagaataatattgagccttaaatacacggttaattaaagaatcctgacgagaatgaagatgccaatcaagtttcctaagcaatacaatattaaattatactaattcacataatttcattatttgaaatgtattgcatttttgtcagaatttttaaactgtatcatagtagctttaggtcaatatgtcaagaatttgtaaaaaaataattattataataatgatatacgttccgtgttttttaattttttaatcacaaaatgaaaataaatttttgtttttcataaaaatgtgttttgtgaccacttttatttttcaattttaaaaatagaaaacaaaaatgtgttaagtaaagtttatttttattttttgattttatttatgtcgggtctaggttcggtgtcgaattcgggttaaagttagaggacgggttcaacgctaaggtcgtggaaggatttgagtccgggtctgatcgaagttaaaaatattgattcagaaaaaaaaactatttaaaaaaatattaaaagtgatttttttttttaattttgattatcaattaaaaaattgaagaaaaaaaacagttttatagaatatgtttttgaaaaatattttcactttttcaattttaaaaacaaaaaattgattaaaaaaatattacggtcacataacatatttattaaaaaaaataaataaataaataaaaaaaaaataaattggagacaaacgaatatataggctgcggagcgaacgacgatatttgggcgtgataaccagaaattctgaaactataagcagagaagagaaaggctgtttttgaaacatgtatcaccctactagaggcggtgttcgtggcggccgtgatcgtaagccctctttatattttccttttgccttttagggttttattatatctctctcttctttatcgacattgttacgcctctagttcaattatgcgaaacttgattataaaattaaccggagtttatttccatttttagaagccaaacgattttctttttggtttgattaattgagttttgctatcagtcgttaattgtatgatttatgtttcggggatttagaagaagccctaatttgagctattggttctgaaacaaattgaaactggaatcttaaaagtggaagattaaatcaattatttattggcattttcaagtttctcttctgggtgttttcttatgcgtagtttaggcatttatgttgcttgaatatgttttaaggacctgaattcattgcatatgagtaatgagttgatttcatcttcgtggcttttttggatagtatgtgttaaaatcttggttagacttaaaacatctcacttgatattattctgagttgcttgagtttcttaaagggaggaagatatttgctcatgctaacactactcatacttgatgttgaatcatacttccatctgaacttgttttaatattccttcttctattttgcttcttgttttattgtcggcgtgttgttgatttcccgcctttctttttttttattggtgatgaacagaatttacttgggaagatgtgaaagttgataagcatcgagagaactatattggtcacagtctcaaggcccctgttggaagatggcagaaaggtaacactcatgtcttggtactattgcatttttcctgagttttgcaaacttgttgtattgagtgtataatgtaagtgactgatgtttctgcaagcacctgtttttaattatttttgtagacttatctaggaagagatatgtacaatttattggtctatatcaccaccttaaactccaatggtggagtatggaccattagtaattttcacattacgctgtaataatgaaatg

SEQ ID NO: 37266 - DNA, 4670 bp, Cannabis sativa
agataatcgattatagaacagataatattggtggctagagaaattgaaactctctataaaacaacacaaaacactaatatttattatatattattcaatagcatatccaaattatataaacacacatattacacacaactccacaccatgatcagcataagtatataccatgaatatgtatggtgatgacacaatacacattcattatttttatataacatatataatctcttttattgagctcataatgaagatggtactatataatagtacaaagagattaattattattagctatacccccatgcaatagttttgaattggcacaagtcacctaatggtgtccgtgatggtgatcatgatgatcatgatggtgatgatctttctcatcattaactccatcaaacgacattgtttgatcgtgtccatgatggtgatgatgatcatgatcgtgatgaccatgatgatgatctttctcatcattaactccaccaaacgacgtcgtttggtatcctcctccaccacttcctttcgaaaatttgtcttgagcaagacagagagtactactcgtgcttagcaccaccatagctaggatcaccacaaacaacattttgttagtagccatttttcttgaaaaaaaattatttgtagctaactttgaagtgtattttgtgtgtaaaataagtgccaaatccttgaggatttatagtaaccactaaccaataaaggcttgcaacgtgtctctatatttatattttaatatatatatataaatatatatatatatatatataaatggattatgtagtttcttgtagttaaccatgttatagtaaaagttgtttgatgagtagggtttttggtgagatgacctaaaatgataacgtacctacatgtatttacaacactcaatgtataaataattttttttgaacaattcaatgtataaataattgattatgtacatttatatgttaaatgtggggtctttgaagagcacaacactcaatatatataatatgactatgagatttgggtgtgtttatcttcaaaactaaattaagataaaaatatttgacaatttctactcacaaaagcgacaaagtaaatcattaagtcatggacataaatttggaacactctatttaggattgacacaataatatgttcaaattttatttcaatgtgaagtttcttgaaagtcatatatgcatgtgtgttatgatatttaggagtgtaaatggatcgggtcgaatctgatccggctatgatccgacttgattcagatcatgtaaggattccccatgtctcgtctcgctagatcagatattcgtatcggatcagatccgacccgacttattcagatcgaatttgattcgtcctgacttttttttttttttttttaatattatatattaaaagaaaaaaataacatcaacataaaaacaaataaattacattgtaatttctcttacttatgaaaacgtccaaaaacatcatgtgacactatagtaaaaactgtcataaagagcgactttttttattctaaaaaatcttctaataattcgttctagaagattatttggcacgactagtcactcttgatattttattcctgatcactcgtgcttgaaaattgatatcaagaacaaaatatagcgacgtgcttgatgctaaaataattagaataaaaatgagttgttcttgaaaagtaaaagttgttccaaaaaattaagccatcgacttgatttttacacattatcaggaacgactgttttgttatcaggagtgaaactgtcgttcatgagatcattttaagaataattaaatttatttaaattaaattaaatattaaatttttgatgaaatgagctgtgttgttcacagtctctctgttgtattatatatatgcacagaacaagtatacaactaactgaattcagttaggaaaagatagttacaaataacagaatgtgaacagtaaaaactgacacctaactacctaactgtctgcactaatactctgtcataagcacacctcttaccaagcaccttgtgaagtattgagatctcatcaactggtgcagaatcagaattactagcttcattataatttttcttcatctgttccattagtaagaataagttagaaactaagagaatttaaaagttattcaatatatttaagaataaatttggataaacttatataatatttttagaaaagctcattgacaaaggtctttgattctttcgtatgataatcttttcatgtctctatataacctttgttgtgctatataataaaataaaaatggaaaattataaaaaaatttgtagattaatttaaataaataaaatgatcatattaacttacatttaatatatctttactttttttttgacatgaataaatctttacttaatcaaacattttaaaataaatcaaacaaacaataataattaaaaatacaaaatgtaaagatgtgaagcttgaactgggcctatataagaaaaatgggttagctcgagtaaaaagtacgacacgaaaaaatgagttgtcactcgtcaagaagtaaaatttttaaatttgagaagattgtcttctctattgttcttcttgtaactgcgtacataatatagaagtctaagaatgttttttggtttttgagtaaataagtcatctatattgctcttgaaacaaaacttttacaatcaactgtttttccaactacttccctgtctaaattctccccattcaatccttttatttacttcatataccttcttaatatctagactttgcaatctatttacaataaaattctttatacgtactattgacataattcttaatagtgggcacctcttcgtatcaaaggcatctattcctagccatgcaaaaacaaaatacacacaagtattgaggtgatcatcatatacacttgttttctgagattggtacctcgtcttatccagttaagaacaccttcaaactatggaggcatttcgtgttgtattattgtacacacattggaagaataaagatcatgtgactcactctctaagcatcggtcgtctattgaaacacctttagatcaatctatccttagtctttaaacgatattccaggtcgctagccaagtaatgtacctatgttttgggatatatacctcttccaaatggaagaggcataccatttttgatctccattatgggagaacaacttccctctaacctgactaatagagtatttactccaagatattagtttagctgcccttttgaaaaatacccagctattatttgatccttctcttgaataattttttaccaataccagctacaatcatggggaatttataatcccactagtcttcccttaatggagcactaagtaacaagaagatattaaagctaaaaataaaattctcttgctagcttaccaacaacaacaacaacaaaattgtaatgaaaatttgattacataggattgtttttttttgttcctcgttgttggaaggtttgctttgtttgattcaagttttagcatgttgttgtagtttgtacaatatattctttttagtgaaatgcatatttgtaattgtcgtgtttattggcagagggagaacatgtaaattgtggggcaaaatataaaacaattaattttcgaagggcaaattaataataattgtacataattttgttttcacatatatatctgaaaattcataaaaacaaaacatttagggaggactatagcctccatactttttaagtggctctgttactcactaaaaaagattatttagtgataattttttaatcacaatatatatttatttgtactaaatatgacttttactcataatataaaaaacattattagtgactaaagtatagtatttagatatgagaactcactaatttagtattagtcataatagttttagacataacaagtattgtgacaaaatgtatttagccacaacaaattgtaatttttgtgactaatatatttagtcacgaactttttagtcacaacataagaattattttttataattagtcataactttttctcttttaatcacaaattttattgtaactaaaatttggattattattcatgaaaatagaaaagatatcattaacaaaatcaaattttcaattcaagagcatatatatcttttaactttttaagtttaataactaaacttattactatggaaataacaatgattagggatgtatactcttctcttttttaatttattctcattgattatatcaccaaaatgaacattacttaaattatatagtactttagctaagactacaattactaggtaaattacatagtaaaatccctcatatgaaaacgtccaaaaccctctcatgggctatatagtattattcatgaaaaatcaccataacacactcaaacatggcgacatcaaaccctttcatactcttatccttagttctttctttgtttatcttcatggaaataaccttgactactgctaccaatctcgagggactgaaaaatttcacaccaaatagagatcctaaggatccaagaggtgttccttcaacgtcttttgtgccaaatggcaatccaacgtcttatgtaccaaatggaaatccatcgtcatctgtaccaaatg

SEQ ID NO: 37267 - DNA, 3682 bp, Cannabis sativa
aaaattggtcaagacagtataaaattaatttctgccgtgtgatagtatttttgtaaagattaagtcaaaattcaatatttttgtaaattttccaaaaacttattagtagatagattttatttaggactaatagaaccttaagcgaggttgttaattaagataaacctagtgcacaaatacaattaagattttatttatatgtgaaaaagttaagatataatttctatttttattataagtaaataaaattacaataaaattaagtttgatcaccataaaatcccaacacatgttttacataaaattgcttacaataactacgtacatacatatatgaatgaaatagtccacgtgaacatgattttatacacaataaatatataattatacataaacaaagatgaaaaaaaatagtttggtaaagatcaatggtacttatccattattcttattgacttggcagtggcagtggaagaggtggaatgctctgttcattcctgaagaaattttggggatcaactttagtcttcacatgaactaacctcttgaaattgtctttcccaaaatactttctaccccaaatacttgcttgtgtgtaactcgtgggtcccttgtcgttatttttacccaagtcaagatctctatagtttacatatgcacttcttgggcttttggacacataaggagtcatgtagttataaacacttctaggccaattgatactcccatcatcatcatcatctcctggtttttgaacccattgagcatagtagagaattttgtagaggtttccggctctatgggagaatggaatctctgattcagaaatctcattcattttcccaccataaggaaacaactgaaagaatcccactccaacatcttcttcatataacttttcaagcattgttttcaatacattctctggtatagttttcttcacgtagtcaagtttacctttgaatgaaaataaccattgttgagttctattaagcaagttttccatctcagctccaatagggaagccagcaaaataagaaacagactcaatccaactcatttcattacaatcttctcttttcaaaccaaactcaggaaaactcttttccattaatgaaagaagattatccactccaccaagaaacaatgacaagaattgagcttggagtataaccttattattttgcgtagaattcacagtcgagaacctaatcaagataaccaaatcatcatccaacttgtcagcaatgtattgccacttgttcacaagcttcatggtctcattttggcccaaatccctattaacaatgaatgttgtcactgttgatgggacataaccaatctgattttccaagcgagaacgattccaaagcttgctgctccaccaccacgtatggcccaaaacaaatcctcccccattgattctcgatcaagaatttttccatcaacattaactatataagcatcaatgatattatcagctgctaggccatattttcgcaccaaaggtccatagccacctccactaaagtgtccaccaacgcctaccgtagggcaaaatccagcaggaaagccgagatttcgacttttctcggcaatcctataataaacttcaccaatggtagctccggcttcaacccaagcagttttttcatccacgtttacgttgatagaacttaggtttctcaagtctattataacgaatgggacttcagaaacgtaagagagaccttcgaaatcatggccaccgcttcgtgttcggatctctaacccatgtatctttgagcagtagacagaggcttggacatgggaggcgtttgaaggtgtaacgataacgagtggttttggagttgaaggaaaggaaaattttaggttttgtatgttggagttcattacagacataaacgacgagtcgtttcgagtgtatgtgagttcagccaaaatggttgtgtttgagatattgtgggacagacattgaaggaagtcctcatgtggttgagaagcatgagtaacgataatgcaaaaagataacaatgataagaaagctaagtagtacttcatttttcttcgtaaagtttttgcctttttggtatgtacaatatcatataagtctgccatatttatataaagttattatatgcttgcattgacagagtagtattgtatgaatatatttaatatatatatctatgaaatttcaacgcgtataaagttcagattaccattatttgatctagttaaatgcttactcggatgatgatactaccagttcaacaattataaattaatactaacaagtgtgtaatttgtttttttaaaacggatttatctgtatatcttttgaatttctcgtattatcatcttattttaataatataagctttacgtaggtactttattcttatgtaaaaagggtacgcaaaattgaagcggacaaagccgacaagaaaatattgacttttttttttgaaatcaagaaaatattgactatatatatacatataaatgaacacacattattgtgtgtatatataacatatagtagtcaaataaaaatttagtaatattattcgttaaactcaattatggtggattggtagaagagttatatatacatattatatatatttttcgagaaatatatattatatattaaaactagacggtttgaacacattaagatcacgcttcaataatatattaaaatttgttaaaaaaatagctggatttattttttagatatctcttctgttcacaaagtgatgatattaattcaacaactaataattataaaacattatatttagaaagacacgtaatcgaaacatcaacgaagctgaaattcttttaaattgttcaattatgcaaatatatgtttacatatattaatatacttgtcctatatatattattatgtatataaatatatttaaatacatctgatcaaacattgttataaatactagaaatttggaactgggtcagccgtatttttattattttttaattgaacaagctacgtacaagttacatgctttttataaattatattttttattctattttaaacgaaaattcaatatcaatgaattattctagttgaactctaaaaacgaaattctgactttttttctttttttctttttctggtagcgtgattcttattaattcgtccaattcgtaatggttatcccggtttgatcaaagttaatttgtattttattactttttttttttttaaatctctgtaatgtattatttatttttaatacaagacacaataataattacaccacttacattgtattatttgaaatatatgatactattaaattaattatgtggatttatctcaccatgactcaatatttttatttaattatttcatattcaacatcctttttagaattctcataatatggtagctattttttattcactaatgactcattgaatctagggtcgattttaaagataaacaaagtaggcccacgcctagcacccaactctattgaggccgtgaaaaaataaaaattaaattatttatatatattagttaataatttatatatctatatatataaaagaaaacaaagaaatgacactttaaaatatctttaattatagttagttgttcttaattctcttattttttttaaaaacttttattagtttcataaat

SEQ ID NO: 37268 - DNA, 3891 bp, Cannabis sativa
  modified_base (2404)..(2404): a, c, t, g, unknown or other
cttaaatgaaactaacaatacgtgactcgacacgtacattcacctagtatatattaaaactagctagccagtgttaaaagactaaaatagaaaattgatttttgcttttttttttcacataaaaaaaatggttttgccatttgagcccacaggaatgacacatattccaatcttcttcccattattcacaaaagcaaagacaaaagtcaaaccacaccgtctcaattctgaacccaaatctcaagcaaataaggaatgggttcacacactgtccacttcatatacaaatgtctttcttttggccccaaaatcaaatatatattccaaataattattaaaaaaaaaaatccaatttgacccttcacaatcagaactctctgtctctctgtctgtctgtcaaaggttttgctatttgatctcctcaattagctgcaaaaaattaaaaacatagagacctgaactttattttccacaagaatagaaaaaacagatccttaggttaccaaaaaaatctaagtgggcaaccactctttacttttcttgtgaaaatatcacaaagggtaatctgattgacccttatttggttttgaccaaagggtaatataatagatataaacaataaactcattgagatccttttcaatttccatacccttttgttgccaaatcacatggcaccacatgatatatcaaatgagttattcttgcttttctaggacaataataggacccccaaaaactagggtggtcagccaatgcccccttttgagatctgttattaaaaaagatagggtgggaaatttgtaaaaataacccaaaaacaagtaggagtgtcagaagaaacatcataattagaagagaagagcatggacatagataggccatcttcactataataccaaaaactaaactcaaatttagtgttatttctcactaaaattattaggaagatattatagaccacactaaaatttctttttaatttttatttttagttttaataattaaataatagttaaataattaatatttcttaatataaaaaattagtattaaaattgtacatttttttatgttagtttaacactaatttagctttcaccattgaaattggtcttataggtcaaacaagattgagagtttaattgttacccaatttagttacttgcccacatacccaaatgtcccaatgtgattgtgtgcgttgtgtgcctggctacaccagtcccactcattgtggtgatcacttgtatttggacatataataatgccatatcaaatcacacccttttcttttaagttagttgggaggccaagctagtaatcaagattttgttggtttgggaatcattaacagttgatgatttctcgttttaattagataagtattatctttttcataattaagatttatctatttttgaagtgaaaatgtatgctctccagagtccaaacccataaataaaaataaaaatataacaacaatgaaacaccaacacaaaaatgaaggaactgtttccatattaacgtttgattgaatttttacctagtttagttagctgtcaaataattagaggttactcttgcttagtaatgatatgtgtaaaacacacaaattaatgtgataaataactttaattagtaatattatttaagattagtttcccttattcaattattcaaaatatattgtcatataagtatatcttaaatttatgtgtgcacatattattataaaagttttaatgtaaaattttctttttattggaagacacagacatttataaagtgtaatatgattacaagcaatgcctaattatagtttgatcaagtttttattattattattattttggtagagtgtaatttggtcgacctactcattagggtttttttagatttcaattagtaattcttatgtgcattttaattatttatgttatcattattttttaaagaataattagtattttttttcctaaacttttaataatacttaattttactctttaaaatattcagcttgttaaaaatcctccctaaagtattaagtttgtttcttttaccgttaaaaatttgacaaatacaaaaatttgctcacttttattaaaaaaaaaaaaatttaaaaattataatattctattaattctaaaaaaaaaattaataaaaattattaaaaagttgataaaaaaaattaaattaattaaaaaaatagtaagtttacttaaacaagttaaattattttttaaaaaaatattttcatactttattttatttataaacacatatcttacaaaattaaactaaaattattaaaaatctaataaataatttaaacaaacttatttatatttataaactcatatattaaaaaataaacaaaaataattaaaaattcaataanaatataaaattattttgaaaaaatgttagaaattaattaaaaaaaattatgtttacttaaaccaatctaaatttttgaaaaaaaaaaaaagatagaccaagtttgttcgcgtaaaatttaatttttacaaaaattaaattttaatatgttttttatatctaaatgaatttttaataaaaaaataaataattttttaaatcaattaattagttttaatattttattttcttttttaatatccttaattaatcaaaatgatttttttaagatctatattaaatttttaatatttactaaaaaaaaaaataaatctttctcatttttattttgattgaggaggtacaatttgatagttatcaaaatttaaagggcgaaattgctaattaataaagatatatcaacatttaaatggaataaaatgacagattttaactaaaggactaaatttttataaatgtaaaaaatttaggaaaattcttaataagtcgtatattttagggaacaaaaagttcactgtgtaatgtgattaattttatttgtagtgcggttatcattaggggaattacttcatatactgtttttttaactttgttttttaaatttacggtttgagtttctaaagtggtttctttggtagtttttatgtgggttgctatatgtaaaaatttaggaaaattcttaataagtcgtatattttagggaacaaaaagttcactgtgtaatgtgattaatcttatttgtagttcggttatcattaggggaattacttcatatactgtttttttaactttgtttttcaaatttacggtttggatttctaaagtggtttctttggtagtttttatgtgggttgctatatgattttttgttgcgatttaagttgcagcgctaattgcaataggggtttctatgtagaatttcgtgaaaatgtaaaaaaaaaaactatttttaagtgtaaaaataaaaaaatcctagtataaatattttatatatatacatttacttttattgatcatgatgacgattttgatcttttgatccttatttatgtatacattattatcaacaagcaaagaattgttatgagtatgtctatttatcaatatattattattaacaggaaagaacttatataaatataaatatgtttattggatttttttaatatataaattaataatttaactgcgattaaccttattatttcgcaccacacatattaattttcacttcagcacactttacatattaattaattatattttttatcaattcactgctcaagctatattgtactcatccttaatttcctagttacattaaaagtaaaagaaaaataatattttataaataaatcataatatataatcaatcatttttagtagatgttaaaattacaaaataatctgtcatttaataaaattaaatgttaataaaagtgaaaattacactacattactctttttgccttgatttaaaaaaaaaaa

SEQ ID NO: 37269 - DNA, 1517 bp, Cannabis sativa
ataaaacttttgaaacaaagtgaaaaagtatcaatgcaaaacacatgaaaattgtcctatcacaacaatatttttttaaaaaaaataaaaatagtggacatagattagactaattttaatttccaattttattttttttttcttcagaaaaaaacaaatgtcttaattaattaattaattaataataatataataataataaagaataattaataattatgaaagcgagggttacacacgagggtagtaaagaagtggtttttcccgttccgttttcgtcaaagctggtgggcccccacgtgttccctcgcacgcgtgcttaatccaacggttcatattcaatccgcaatagacggagattgttcatttctctctctaatccaacggctctcattttccgggtttgactcctcactgtctcgaaacccggcacatatttccataaaaatccaaacccattcaaattacataaatacccctctaaccaaacactcccttaactctctctctactctttctctctcttcaacctctttctctctctctctctctctacaaccatatcctgtgatatagatcttgttcgccagcgcaaatctagggaaattcatctgaacaactcatcaatccttaaacttcatcgtcaatacctctcgatcttcttagataactgtatgtttttgttgtttttttttaaatttagggttttgaacttgagcttgttctgttgtgtttttgagcttagatctttgtttttctttgtgggtttttgttgatttgattgaaaaaaaagtaccattttgtttggttgctgagaaaattttgaatttattttgtttgaagaagaaaaaggagtgagctttattttttaggttatatttgtgatttttgtttgtgtatacagtgaaagctttgattcaattttcgatgatatttgaattgaagaagaattgaaatcaagatgccttggacgtcatccctttcaacttattgcagcaaatgtgttcgtttggtggtgttctttcgtgttattctgtaatttgattcattttggtgagacccttttggattgtttatatatatatatatatgttatatgtataagattttgcttatttttagcttttgattctaatgttttattgggttttgcaggtggttgcttttgggggggttaaagtattatattcgatttgtttgcttgttctttcttactttgaattttacaaaagctggttggaggtgtgagaatgttcattgccatttccattaaaagatatcgagcagttaaagaagttggaaaaattaaaatgagtgtgggggttattgcttattaccaactgatgcaagtttgccaggtacaattgttactccctttttagcatttttctatgtttacttttgttttgtacttcttgtcaagcttagtatgttcattattgtatcttcaaagacaatattgtttatagtgtgtttaacttgctaaggttttggtatcatgttatcttgtattgggg

SEQ ID NO: 37270 - DNA, 5395 bp, Cannabis sativa
cagtaaaaaagtaaaaaataccgcatgacagtatttttgtaaaaaaatagcaaaagttaatataccatgtaaatttatctaatgcaattgccctctaattcgagatagttttggtgtaatatcacaccataaatgatgttttggaggcacattggagttcgccttacattgcttaattcgtcgaccaaaattaccactaatctcctttccccaaattccaaccttctcactacgatcactaattttttattgaatgtcagaaataacaccatctttttcagcactctttcacaatctgatgacacatcgaatccttagcccaagcattttcaatacgaaaattcattcgtagaggatttgacaccttccgaactgggtctaaaaaaatagggcagtagtcagaactagaaccctccagattaaacaacttttcttgcagaaagtcatcaagctaaagattggacaccaatgcatgatccaatcgaacctcagtccacctactagtgcctcttcccttttcccaggtaaattaatgacccgtgagaaagcacattattcgagttatcaccaaggaagagaggaatcatctttcagctaacgaattaaagtccaagaatgcatcctagctagcccccctatctggttcataatagaaaccagttaaccaccaaggtatcatacccaccacagtactaaactccacatctatatgacttttcaagaagtttagtaacttagcttcatcttgttgtcgccacagtaatgccaaacccccactcctctcatgaacatcaaccacaaacatcccttcatgaccaatctgacaccgcacccaattcactggggttaacttcaggatatcattgaaatatattattctagttgtcgaattagtttctcaaaactctttactaacttctccaaaacagtgagatgaaaaaaaaaattcaaaacagtttttaacttaaaaagtaatttcttatttttcatctttatagaaactaaaccatacaggtccataagttaaaatttatcaaacagagtctattttgttcttaattttacttttttttttttcatcatttcattttgatgtactcactttgattattatcaatactcaattgttcaaaaaaaaattatacatatagactttgcgaaattaaaaagattagatggtgcattttataaatgacattatcaagtacataaattctcatctaatcagccaactaaaacttcccccactctaagataagtattgtacgaacatttcttcttcttcttcccttttttttttttcaattaaaaaatttaatgaagataatgttgaatacaatttctttccattgattatgtggatttctattcaatttcaaagaatcaattttccaataaaatgatcaacatgaaattgttaaaaaaaatgaagggattcttatgaactactttcaatttctcttcttttattgatggaggctggttttggagctgtccaatactgcttgtacgctaagagtatctttaccctctcaaggggtccatcttcatggtctataattcttgtactgtattgcattgtatccataattcctttcaccttaacaatcatatccacatcatcccttaaaataacactaccttctggtctcaatatcctatccatttctaaaagaatatgttccatttcacatctgtaaaaataaaacaccccaaaaaaacaaatggttaaagacaaaataagaagatattaaaaagaaagatgtgaggttgattagtgattacctgtcctgatagatgctaaaaactgaatctgcgtgaatgaagtcgtaagttcttggataagtagacatggcctcgcacctaccataacaaaactttacagtaagcttaactatctcagataaagaatcgttgtgctgaaaaagtatgttgtccaatctaaataaaataatacattttaaaattggctttgtctggatgttagcaacagaagaaaccaatcagaagggcagtgatcccctgactctgtttcagctttttaaaacacagcatatgcaaaatccactctggattattgggatttggctgctactgaacagcatgaaatcccaaacagctaatatgaacaagagagtaagttgaagagggcattaccagttttggtaagttccaatcaatccacgctcgtaaatgacaccaagggtattagtctctgagtcaacagggataacattcataacccaaacaggatcattgattagtgcagcagcaaagcctcccaagtaggagttcatgtcaagcaaattccggtatcttcctcgctctgccaattgactgtcaatttttttgtaatatgccaatctcttcttccacaactctgaattttccatgaaaatctcaggtgtaattccagtcaaacttccactgcttatccttggaggcacagaagtcaacctttctggccatttagccacctcaccacctgccacttctcttatgtctgttacactcggcagtggggtcagacatttatccattttagtgtacctgggagaaaaaaatgtgaagaaaaaataaagttaaatgtaacgggcttccgatttttgttgacttggcaaactacagagtacagagtctataaaataataaaaaaagtaatcccaaagagagtttggcatataggtggacaggttaacaaataaattaggaatattgatggaacagacacctattggtctatcaaatgcttttgcaatcacaatgggtttggtatcacacttccaaagcacactctagaactagaacttttaaacaaacaagctattttcaaataaaagtggggttataattgacaaaacaaagcctaacaaaaaaaaaagtgcaaataaattagaacataataatgaaagcctttttcctttcacattaccatgctttgtctggatcctgatcttgacagaattttggtttcttgaaaaccttgcgattcaacctacagtggacatggttagttggtttctgccaaatggcaagatcatttttctgcttcaatttcttccagcaaaggcttttggcgacagcctcgatcccattctgctcagcttggagatcttcacgagttctattccagcctttccagtggttctcccaatttatggggggcccagacaaaatccaatatccaccaggacgcagaattcgatcaacttcaatcaaataaagaccatctgcataatccaacaatttgagattcggaatcaaacaattgttgtcccagacaatgtgagataagaaataccaaaaagatgaaagtttttgtaaatttttattaccatattggccccaaggaattaggcagcgagagcagtgagccatgtcaaatgctcttgaagggtatggaagtcttatggatgcaagaattccaattaatgcaggaactcctctttcaagagcaaactggacctgagcttcatgggtgtcccttggggcaaacgacactgccaagatgtccctggacagtaggtaagcaccccagcttgcaaccttttaagaaaaaaaaacacatcaacagacattattaacaaatgatttaaaaactgagaatttgtacaagcatataaaatatgtttcatttgttagtttaataaacagaatattaaatataaataaagaaataggtatcttagagagttcagttatgaaagtaagagtagttggcttgtgtattaagagatatgactaaaagaaacctgttctacacccaacccatatgaaataataataattactaaattaataaagtaaagagtaaactgcaagttttacttaattatttaattaatgacatttaactatgaggaaaacagagaggaaatttttcacattgacgaacatctctgccaaaggctgaaccaattgttggcgctcaaattataaaacaattatactcaaagactgtcaaagttcgttgagaaatgaaatgagtcagtcaattctattattcattacctagactttaccacaaagttgttacatgcatgacatcaacatattttgaattttggtgttgaaacaaagggtttggtgtccaaaatcaaacctgtcattgggttcctaagcgggcagttttcacctataacagacctaaatgtagctttcaaaaccaattctcgatatcagtcatttcctaataagctaatacaataaacggacactaccctaatgaattcgccatgttgataatgggtcttagtcttcttggatctgacaaagcttgccacatttcattttcttcttcaataagaaacattcataaatggataacacagccatgtgacacaacgcaaattaggacaacatatttatcaaattagtacaagataatataaagtaagctacttaaaagaacccatttcaggggaggaaaaaaagaaaagaaaaatctttctaaacctcatttcagaatgggataccatctcctcagcaaggattttttcttttataaaaaatttcacaattaaaacaaaagagacaaatgtatttaaaaatattatgtaaaaaaaaaaatcgacaaatctcttcacgagggcgaatttcagcagaaatttcatgtcccaaaaatatctaatataaaagccatgagtccccaaaagttgggtaaaaaataattattattttaataaatattttttttttcgaaaaagaatatatttaattttcacatgcatattttaataccgtattttatgataataaaaaaaacaagtaaattataacgcattttatgtattttcttgaaaacattcttgaaaataaaataagatgaaagaattcaataaaaaaattaaaaaaaaaaaaaggaacgtaccccacaaccagtatcaatggcggttctgatggagccgtctttcagattaatcaacttgccgatatcatcgatgtaggcatcggcgccgtttggaaacatcgtccctccgccggggaatttgaaacgcccattatcataatgtacccaattctggttcctcttctcgacagttaactccttatgaggaacattcgcaaaccacgctaatccccgactctctggccaccggaacggcgttctgtacccatacggtgccggaattctacacttcaacttctcctccggcgcagggcaatgcctctcacgataaatcagcttctccctgtcgaacttcagcgacctctgcacgtcctcgcatggagtgtactcgctcagcccgacggcgcacgctggaattctacgcgcagtcgtcgtcggcggagccagtggaagatcctcagcgcgatggtgagcctcgaagtcgagccgaccgattctcgtcaagttcgaatggaacggcgagcatgaggaaccggagacgacatc

SEQ ID NO: 37271 - DNA, 2067 bp, Cannabis sativa
ttctggttttaggtctggttgttaattgaagttagttatattagttagctgtcctaactgtacaagcgacttctgtcttgtaccttttttgagcctgagctatataaagctcactcattgtgcttgtaaataactgttcagataataagaattctctcttcttcttctccttctttcgttttatctttctattttgtaatataccattaatatttttttaatctttaatttattgatagttattaatgacattttgtcttttagatggatttatttttgtgccttggattggagcataattataaatgttctcctaaatatagtatttgttcattttttgtaccaatttagtacaatattagtgttgtataagtttagtcaacatgtcaatacgaaggacaagcatgacaaattaggttagagttgagatttcctctcatactaaaattaaagaagttgagttaaggttcactaattaaatacaccaatgtatctcacacggacacaaattgccatcctatttgtttcaactctgattggaagtgtaccattcctctatacatacattaaataattaagaaagagcctaatgaatataaatatcaaacgacatcaaggctctgatgatcgtttaggaagaattgatcatttgtaggtttggtaatgagtggatcctctaaatcatttattgggtgttcaatttgcatggatgatgaattgggcctccagtacattgcatacagaatcagctgaatacttcccagcacaaatccactaacatttggtatctacaacattaaccaatgaattcataattataaacataatcaaggacaccatatgcataagggtggccatggccaccaaatcttggtatttcgttttatttatttattcaaaatttgtagtttggccctttttcttccttttctcaactaataatagtatgcattatgacttatatacttaccccaacaaagtaatctttcagaagataagcataaacagtccaaactacactgttcaaaaataggataagagagagtaggaaaggcatgtattctacgctctttgtcaaaatgactgttttctgtataccacaccacaacacacaaattaacaaaaaaaaaaaaaaaatagagagtaattgttataatttcatcaaataatataaataaaaaattatcaaataatagaaaaaaaaaattaaaatgtatgttttaccatagatgaaagtggtgaagcataggcaatcatactgaagactgagcacaatgatccagcaaaatcgattcgagtatttccatgaagaaaaatttgcatgtacataattgctgctactggaaatatgacattaaaaactaccacaagaatcgcagtcctaatctgaaaacaggtcatcatatattataaaagataatggtactgaagataaagaaaagaaattaaaagaaggagaaaagaatattataccttcatttttggaggtgcaaaaagtaggaatatggtgagaaaaatgatctcaacaatagcaccatagacattcacagtgactattaaaaaaccatttgtcttaataattccatagtaaatccaaaagaatgcatttaataatttgctgatataagggatactctcaaattcctctgttgatctacgcttcaagattcgccaaaacacgtttctgtgaagaaatatatatatatattgagagattaatttagagaaattaactgattatttatttattcatttatttttttaaaaaaaaatagaataagtgaggtttgaattcttacgcaggagaaatatagaccaggccagacataatattacctaacataaaaagaaaaaaggaaaatgattaacataatcaattcattgacagtacaaaaaagaaaaagtgtgaactttattattgtgtgtacctagcacaccaaataagatagttaatgaagaagttgtcattctcttgttcttgatcttccttctacttgagtttaataattatcacgcaattaatttctactggtggattgttaattattcccagacctagcctctact

SEQ ID NO: 37272 - DNA, 4937 bp, Cannabis sativa
  modified_base (30)..(32): a, c, t, g, unknown or other
  modified_base (4114)..(4117): a, c, t, g, unknown or other
aacatacgtgtgagtagatctaagatcctnnnaaaataatttccaacaggaggtcctccccttgagaggtgatgccagtgctggaatctgcggcccgagtgtgggattgggtaaaattattgtggagcctaaatgataaaggagtccaggtccaggatttgtttctgtatgcttcaattgaagtggatatgatttggaaatcccagaatgataaggtacataataattccatttgtaatatcaagcattgtattgactctatttctgtttgttacgcaacctgtttagtcacccctctagatgattgggtcaagatcaactctgacgttaaagttagtagtgactcaatatgtgtggtggctttggctagagaccaaaaggagtcagttttgtgggtggctagcaacatcctcaacttctctggcccactaattggagaagttgtagcttgtttattagccttggagtcaacactcctttgaaaatattcgtttgtgataattgagagtgattctaagatagtcatcaacatgctggaaggaacttgttccatttggggtgttggtaactatatgcttcaatgtaaacatctctcaaaccttttgctcagttgtaattttttgtttgtccctaaactatgtaattttacaacacataatgtgattaagtgggcttttgccaataatgtaactggtattgttgatccgtctttcattccagataaactattttgtaatgaccatgaggtctaacccttctagcttttatataattatgcattttattcaaaaatatatatattattacaaattaaaaatatcacccattaacaataaattcaagaattaagcaaaaaaaaaaaacaataaattcaagaaaacgacagcttagctagagagatgacttatcatatactaattagcatttgttatagtatatatatatgtggcaattttattggtcaatcttattcctataactcgaatacgtgtacataacgaattaattgtcaaattattattttataccttattgctttcattagtaaatattcattaagacttggcaagaactcatgcatattttccaagaaagtttacaacaagaatttattatgccattaaattataaaacgaaaataacaaacatcaaattttaatgaagaaaaacacttgttgaatctaacaaaccatagcgggtggtgctggctgggttaggtaagcacatatctttattctatgttgtttgtttcacaatcacatctctaaaatagatttaacaaattagtcaactagcttctgtgattttctattgtttgttttaatttacttcatttctgttaaatgaaatatttataatattcattagtagccagctgctagcaactatttccttctcacctatttgatcatcaaaatttcttcttcttcctcctcttaaccattttgagctgtatctttgtgaatgaattcctttgtttatctcgtatatttctttctcttcattactttcgtcccaaactatgtaaaatgcttcaatatcagtgccaacgactgtgcccctttcgattgcgggaaattcaaagatctccactacccttttcgtaaaattggcgagcccaatttctgtggacacccgggattctctctcgactgccaatcagatgacgtccagatactgttcgaggaaatgtcccaacggtttcggatcctggatatcaacccgaaaggccggactctcaagattgccagaatggatatatctgattcaatatgccccgagaaattctccaacaccagtttgaattcaagtatcttcaattacacggaaaaagataaaatggccgctttgttatacgagtgtgatgagggtgattttcctttcttcataagctttccttgcactgtaaataacatatctacgtcctcttactttgtgatggaaacagaattggactctccaatttttccatcttgcaatgttagtgttatggttcctgttatggagaagtcgtttaaaacgggttttatgagtcaaaagctcaaagtggatgacgttatggaagaagggtttgaagttgggtggagctccatgggagaagacaaatgtgaggattgtattttgtcgagtggaaaatgtggatttgattttagtgtgaatgagttcagatgtttctgtcctgatgataatgcttatgcattaagctgtccaagcaacactatttctatcccacagcagccaccaccaccaccaccacaactggtcgtccccactattgataatattgagcctattgagcctgcaccatctgaaactgcaggaaattcaccaagtaagtacataattttttttattattatttttatctctcttcttgatcttatagaaaaattgtgtttatatagttaatgccttttatttatttgttgttctttttcggcatgtgtagttgtagtaaattctatgattttagatagttgtgtagcggagaaaatggttgaaacttgaaagtacatacattgaatcccatagcggagaaaatggttgacttgaaaatatatacattgaatcccatagcggagaaaatggttgaaacttggagtatattttttttttcacaaaaaaaaaaaaaatacacattgaatcccattcccataacaacgcactagcgtttggttggagataatgaaatggaatggaatagaaagaaaacaattttcatttcatttgaaatgtcattccaataaaataacctttccaccatttcattgcatgatgaaaaaaaatttaataattttttatcaatttttttttttatttattttaaaatatattccattcctattcttattcctattcccatttttattcatatgttttaattcctcccaaccaaaagccacctaaattttaagggctttttacacaacattttgaaattttgaacttgtttattttggagtagaatttttttgtaaagtattgagtaagttttatactagatactgtgttaagtttttcacagttgttctacgattattttttaattgttctactattgttttaattgtcctattttgttgttttacattgttttataaaaaagtgacattaaaattgtaaactctttgcttaaaattgtaattcccaattttaattatgtcttgataatatctccccttggcttacgggcctgcgcccaggcctttaattttgggcttgtcaaatgtgctctacaatacatggcacacaaactaacaatagttgatgacgtttagaaactccaagtcagtcaggcaaaactagaaataaaatcgggcgattatatattttatatttactggacttcaaaatcttaataaaatttattgaattagatataataaaattaaaaaatagttcataaataacttaaatgactaagtttaaaattacttaccagtgcaccaaataactttatttagtataaatagaccataaaggtatttatacaaaggcccaattttatttttcttagatttaggcccttagtaccggtttaatttcaagtgaagcagctgccctactgactccttgcagcttcgcccaacacatgcatgtaaatatattggtaccatctagcaaatgttaaaaactataaaataaaaaccatatttcatttagtctttttttttttatttatttaagcgtttatatattacaaccatattttatttggaactcgaatccaagacctccaacacacacacccatatttcatttagtcataagactaagatgaaagtgacattacagctacccgaagccgggcgacacccgtactagggcccacccgatccattggctcaagcctcaaggtgtttataacatatatgaatatgtagtgaaaaggaaaagtgatagttttgtgaaatttgtaaaataggccgaataatactcaaacccaccaattacccaaatagataattacataaaatattaatttttgtaaaatttttacattacgtttaattttttttttatattttttacggtattctataaaaataatacaaaaacaacaaaaaaactacataaaagtaacaagaaaataaataacatcaaaacaacaacnnnnaataacatacaaataacaaaaatttaacaacaaattaacaagagtacaacataaaaatacataaaaggaccgtattttctattttaataaaatcataaaaatgtttaaaattccatacaaccgtatttttgtaattgttttgttatttttgtgtatttgtgaaataatccatcaaaaccatttttttataaaaataccgtttttttctgtaaataaaatcataaaaatcataaagatgttttaaattccatataaccgtatttttgtaatttttttattatttttgtgtatttgtgaaatcatccctcagaaccatttttatacaattttttttttgtaaggaaagccatttctataatatttatttattttgtaaggaaagtcctttctatactttaaatacaacacataaaaaggcatattttataaatattcaaaaaaattacaaaaatacaattttgcggaattttaaatattgctatggtttataactttttatttactatatatactgactattgatgtttcatgttatttttgtattgtgatcttgttttttttttcttccttcttgtatgttgttctgatattgatttcctgttcttttcatgttgtatttttgtttttatattgtttttatgaataccgtcaaattgtaaataaaaataaaaaattgaaaattgaaaaaaaaaaattatgtaaaaatgtattaaattaaaatgtaaatacatttgtaaataatgtatgtacttaactgtaaaaatgttaaaaattttggggttttttcttttttacaccaatccttttttttttttttttt

SEQ ID NO: 37273 - DNA, 5508 bp, Cannabis sativa
  modified_base (2884)..(2884): a, c, t, g, unknown or other
agttcctggtaaaataacttccaacagattagccatgaggttaagggcttttacggtgcattgtacatgttcagatcaagataaactacgagggttggatctaccaggggaaaaagttgtaatctccacttttaccgcttaggtcgtcgtgtattaatattgtaatattttgaaaaagttttacggaatcccaaaataaattatgttcctttttgatgtattgtaaagttttataattacaagttattatttttattctatatttttaaagtttaatttccgctcttggctctagtaagtccccaattagcgggattagcatatgattaatcgttgtacgcggcgttcctattgttagggcgttacaacccttcttaaaaatacagattttatacctcttggtacctaaggcataacctaggaaagttctcttaactgatctaggttccagtttgtcaatagattggtgtacataagttgtacgcccaaaggttcttagatgcattaggtttggggttttgttgtaccacagttcataaggggttttcaagcctataattttgtttgggcttctatttataatgtaggttgtagtagctagatcttcccccaaaatggtttctctaactcagaattgaacaacaaacatctaactttattcaacaagattttgttcatcctttcagcaacaccatttttctctggggtcttcactgcagttttatgtctagtgatcccatactctagacacaacatgtcaaattcagagttaataaactctaacccattgtttgttctaaagttcttaacttttagatcagtttggtttttcacttgagttttccaaactctgaactgctttaggcactcattcttagttgctagcaaataggttcaaatacacttactataattatcaattatagaaaggaaatatttcttaccagagtgagtatgcactttgtatggcccccaaagatcagcatgcacatatttgagtatgttcttagttgtatgccttgctggagtgaacttcagcttatgttattttcctaaaacacaagcttcacaaaatggtaaggcccaaacatttaaattttcaatcataccttgtttgtgcaattctttgtggcattgtttactgatatgcccaagtctgtgatgtcacaactacatatctaattctagccctttcaccaaacttgcttctccgactggaacagtttctccttggagaacatataaactattgatcttttcacctttcattattatcagtgaccctttggtgattctcaagcttccgtgcatggacttgtatctgtaacatcttcaagtgcacctagagatatgaggttttgtcttaactccaaaatgtgccttacatttgtcagcaccttgattccaccatcatattgtttgatggcaacctttctagtttcaatgaccttaaatgaatgatcatttcatatcaaaactttacctccatcaactaatttataatcaaaaaataattctcgactcgaacacatgtgataagtgcatccagagtcaagaaccctctccctgttcattgaggattctgagatggagaaaaattctccatctattgaccaatcatcactatcctccatgattgcagctaaacccttcttgtagtgatgatgcatgtagtccttccaatctccattgtgagatttgtcaaagccttgttgttccttgtacttcttataaaatctttgcaagtgtctagaccttccgcaggagtaacacttttgagtttctctctagacttcgatcttgattgagagtaatgatgtttactcttcgaagttactttcttggcaatctccctcttgctaaatgtatttcttcctttttagattccttttccagttgtaattcaaaatccttcgacttaagtgcggttagaatatcttccaatgcaatcacatctatgccatatttaattgcaaccttgacttattaatatacaattgggagtgatcttaataaaattatgtcatgactttcttcattaaccttatggtttctattaagcaatcctacaataatctcattaaacctgtcaatattatcatctaaagaaagagaaggaatcattctaaaaccatataacatttctagtaaattaatcttgctagcaattgatggcttcatatagaattcttcaagctttttccaaatcttagctgtcttttctacgataagctttctcctcacattgttggataagtacatgataatcgtctaataagccatctcttccatctctattttctcttctggtttctttacagccagtaatttttcatcttcaagaactttggagactttctaatgcacaaggatccctttcaaattctctctccatagcgcaaagtcccacgttccatcgaacttcaccaattcgaatcttgccattgataacgttaactatttctttaagaagtgcagcaaaaaacaatcttgattcagcgttcttgatcgattactaagctctaatttgtgggaaaattacaactaatgtgcagaatcaaaattaactaaaatttaatcaacaaacagttagaaaagacaagattaacaattctcacacaacaaacattgattaaaacagggatgaacagagtattaaaaccaagaacaattaaagtagaaaaataataaaattaataccaagatatatattggttcaagtcatatagattgatgtgatatatggctctactccagttctagaataccaccaaatcttctttattgattgatcaagaaccagatacaatacaattgatattgattctatgttagattctctcaaagtatttatctctcacactcttacccaagaatcttcttnatctacagaagattcttcatacaaaatccaaaaacaatctctctcttttctttgtacctctctctctacatctcaatctctctcttcgaaatcacctcagaactcgtttgaacttttctcctcaattgataagtgtttgtggtatttataggttcaagatatagatcttaaagtcagtggctgcacatgcttaagttgttaacttagttaggacttagcaaacacaatagactcctctaaacagattcttcacgccagcacaagaaatgtgcttttggatgagacatacgcttttgagactaaagaccaaagcgcatgttgaagggacttctcggataggaaaagtacagttggagtcgattatctaggactccattctaggagggaacaactagccatccggaactcctttctggaggatgactagctttccatgagaatccttacgggtggaactggtagacatttgggaacgccttatcggatgacacctatctttttataactaaaataacttttagaaatcttttcatttggaagaactatacaacgataattaaaaaaaaaacatattttcattaaaaaaaaataatggctataattacctctaatcatgtgtaattttttttattattaaaaaaatgtgcataatttttgtttgttaaaaagaaaagtgtgaaagagcttaattaaaaaaaaatggtctactgggatgtcgaacacattagtatgatattgtctaagctagctccagcaacatattctacatcaacttcagtaacaagctttcaatatggacaatcgataagaatcaatccggacaagactatatggatgaatacaagccctctaaatgggcgttcaagattgacaacatgctatctagaagtatgtctctgaactgatgacaagctatccaaaaatactttccctatggaggacaagctatttggaagaaccatttagactagccataactttttgacgttgaagattgtgggctcattaacgttttctttgtaaataatgagatgacttagagcagtggccatgagaatggtacgatctttgaaaggctggctaggggtttttgcaatttaaattggttgtaaaatttcccaaatgctagtgttagtgttatggattggtgcaactcagattaccatgttcttgtagtaaattgcaatcttaagatcgaggagaataagtgtggaaggaaaaacaggaatacaaggttttattttgaagaagcttggtatgatgacgctgagagcatagatattgtgattaaggcatggagtagagagattgtagatggcacgaccttagatttaaagctaaaattaagcaagtgtggttatagtctttatagttggaataagaagaagaaaaaggagcacaagaaggagctgaatgaagtaaaatataacttaaagaagttgtatgagatgaatgattctagtgtttggatggatgtaaaaaaggaagaaaagaagttgaattgtttactagaaaaagggaaaaagtattggaagaaaaggagccgtgtagattggctcaagtgggggggagtagaaataccaaatactttcatcataaagctttaacgaggagaaagaaaaataaaattttgaggctcttggatgagatggaagtttggtaggatgatgagagaatggttgaggaaattgtggaagcctactacaaaaagctctttacttcgatgaagccaagagctgagatcattgaccatgttactgatgtgatacaaactaaggcgacgaatgaaatgaatgagatgttactggagaaatttatagaagatgatgtgaaatttgttgtgaaagatttaaacacgttgaaggctctaggctcgatggtcttccaggactgttttatcacaaatattggagtgtggtcgaagaagatctaacatggtaattttcgaagcccaaagtgcttttgtgcataataggtagatacatgataatgtgatcattggctttgaaggcctccatactataaggaagaatagattcaaaaatagtttaaaagttgccttaaagttagatatgaaaaagacatacgacagagttgagtgacaatttattgaaaaagtaatgctaaaacttgggtatgataagagatggataatgaagattcttaattgtgtgtccttggtatcgtattcttttcttattaacggtgaggttagaggaaaagtgttgtcagggggttgaggtagggagacccattgtctttttttttttttattatgtgttgaggctttctccagccttattcaatatgaggaaatggttggcaacttgaaggggttaaagtttggtagaagtggaattagtgtgttttatctcttctttgtagatgatagcctgattctctttgaagccgtggaagagaaatgtcagtgctttaagactattctgcataaatatgttgaagcttctagatagattattaattttcataaaactaacatgtcatttggtaagaatgttctaatggctactaagaaatcgctagctggctttttgggggttgaaattgtggataaccatggtcattacttgggcttaccatatttgttggaaggaaaaagaaag

SEQ ID NO: 37274 - DNA, 5461 bp, Cannabis sativa
gggtctagtggacggtgtgatatgcatttgacgcttgattttgtgattctttgtggtctctctactttaattgtttatacattttgatattggtgatgatatattttattttttaaaaagctaaccatatatacaggaatttttattaaaccaagagtcatttgatattagctgttttcctacttggctttataagctcacctcccttattttcttcccttccaagaactcagtttgatgctagtagatgcggatggtaccgttgaagaagaaagttgttattagtttagtcttattttacttattaaacttccagtgaaactaattttgtatttaagctggaatggatggtctggatgactaaaattagctaagtgtcagttagaaatgaggaatgatggatgctagatattattttggtattttattaacttattaaatctatctattcggcgattacataactgtggtgatattattgttcttttatattaatgagtggtcctgcttttattactaatattttcttaacgatataggagttaatccactatttttaaattaatatttgtgatataaattaaatgatcatttataagctttatcttcctacaagggtaaaagtgtgacatttgactaccaaaattataaatattacatgtctaccacggcctaaggctcgcatggtgacatactttataacaaatttattaattatattttttaacaaaattagttaaatatctaaatttatttacttatatattattgtttaataaattttgttagatatattttttgtaaataaattttatatattttaaaaaatttaatcaaattatattatatgtattagatttaattttatttttattatttaaattaataattaaataaatgacaactctaatacaaataaacatacattgcatgttattattaattaatatatatatagctatatcatatcatatcatgacatgatattattaagtatgtatatatgtagtgtcatgcatgattattattattaatattcttcattggaacaacatcgatcgtaatgaacttggaagaacaaatattattattaatattctgactaaactaatcatatcatcatgtctagtaatgctttcaataattaaagaagaaagaaatcaattcgtgggtggatcgatgtacgtaatatgaagaaccataaataaataaataaattatcacgtttttgtttataaattaaatatataataactcccgccaaatagctagagacgacttttcatttttctaataatattatttcgatcaagttattattattataacctatttctaatgtaattctatattacatataaaaaccttagcttgatttggatctccatgcattttctttttgttaaatgagtaaaattttatagcgaatacttaatttgtcaaattaaattttattctcttttacgtgttttctctcatcttttaaaatgagaaattctatcacaaatttttttactacagcattaactgtagctggatctcgatcattaaaaacaataataaacaaacaaaaatctctaatttatttcttaagcactctctaatctctatctttaaaaacaataatataacaaacaaaaaaatctctaattctctaatctcgatctttatgtatgtatatcatgcactttcatatctcattaagaaaccaattttaatttgtttttattattatttattatttttgtgtgaaacaaattaaggaaagagtaggtggtggttgcaatacactaactctagctttatttgaataatattcatatttttgttaatttcactacgtctccacctctcaagtaattagttattaattacttgtataaataaactctccatttttcaatttctcttcacaacaatatcttctaccttcttctgcttttatatttgatatttcttttttcttaaacatttgagaagagaatagagatggctatagttggtagccgaagaagatcagggacgacccaacagaatgctaatttaccagttgtctcagctaattataaatggaagaaatggtcatatttggtccctcttgttgttgcccttgctgttatgtcagacatggccttcgtggatcgtctccacttcttctctcagcctccacctgccaatcaagtacatgtttatatttacttctctttttatcttcacatgcatatattaataattattcttgtttgtaccatcaaatagtgttatgcattaaattttgatatataagatgaatggactacttcttttattgtcaattggttttgagatggaacctcatttatcttatctctaaattttaacttggtatcagacccgaatgtaaagatagttcgttatacccacactttttcaaatgtgtggaaaatattagagttagttgctaatgtgtgaaaataaattgtgatatataagatgaatggactatttctcctattaccatttgtttttaaaataggacctcattctattatgttaattattatttttttttttttgtaaactttgcctcacgtattgtgtatatatattttaactaactaaatttttctcgttcatacttataataggaattacgaccaacaatacaacagcttgtgcaacttagtaagaatgaactgaacaccatgccattttttgtcaatttttgggatcaaattcaaaataatgaagagatttcactgcgtcttgaaaatcttgttaactctaccgatgatagtaagatcgatatggtgatatattgtattgggaggatcaaagagagtgaacactcaaggttacagctaagtctggcacttttgctaaaggaaaaagtggattggattaataatgataacataaaaatatttgatccaagactgagtgatgaagagaatgaagctttgagtgaaatgggttttcaagtgttggagaataatgagggaggtaggcgaaaggcgaatgaaccaacattgttctacatgcctcattgtccagtgactatgtatctgggtctaatggaagaaaacttggaagacacattgaataacgtagtgatattagggaatagcttcgagaaatataaaactgattatgatgatagtaataatgtcgactcgttgagtggaaatttttcccgtgagttccaacttgattcttcatcctgttctacatttaaatacttaagttggcatttttccaccgaccaataagtgatttgagtacactatgatcacaagggacaatttacgcttctcctaaccttaatgaagggtgtattttttatttcttaagatccagactgctaaatcagaatccacatttgaataataagatgttacttttgaatctgaatattaaaatatttagacactttatttttttcacattttgagtattttcttatgtttttaattatattatatccacaaaattattaagttttattttacttaaaaaaatttatttaaatatttaaatacaaaatataattaatatattaattttaagaaatttgttcgttttaagtattctaaatacgtttaagtaccatataaatagacatatatacgaaataattttttattaagaaataaacttttaatattaaaattatgtgtaaatataaaaaataaattgttaatttgttttggatagtatgctgacaaaatactaatataaatatgcttacaaaatactaatataaatctgtaatattatataaaatctcaaataagtagtaaacatcttgcgttattcgtgatggatgtataaaatattttaaattatatataaaatataaattatgtagtttaattaataattacttaataaaattatattataattttaactttatatttaaaaaatgtgtgacatatatacttaaaatattaaatttgttgctaataaataccggaattcgaaaaatagtagcataaattttcaaatttctaaacttaagaattttataattttattggtacccaatttaatggtcttgaacggaaaccaagtcaaagaataagaagaagatagttttgagtttggatttgattcagttatggtttaatttttattctgatgtgtgtgttaagttttaggttcgaatttattatgtatttttaatgtttgagttttagtgttttactaggattctattgtttgagtttgtgtttatgagatctattttttttatttatctattgtggtctaacatgattcaattcatattactaaattctatgcaatatcagatttattcaagtaatttatagtcttctgaaattacatgtaaattttctactctcgtgataaattagacatgtaaattaaaggcatgcattaaatacaaaaacctataagctatccaaaccatataggtactctcgtcctatattaaaatttttctatttcactatagcataattgatactcacttatcagatttcacatgatcaaagtcataaacatttaattggcgattaggtaattaatagtaattgagtacgaatgaaatagaatacatagaaattgggagaaaattaaatcacattaaaaccataaatcaatgtcaaacaatttgcaaatcataaaaattgaaatatgtttaatgttattcaacacatataaaaatcaagtccaataatcaagttgagtccctacctcccaagtcgttaaattttgtccaaaagatgttcttaagctctcaagtcccccattcaaaaaaaaaaaaaaaaaagctctcaagtcccaagcttcaattgtttagcctaattttagatatcagtctcatatataccatcaaatggctaaataatattatcatcattacattctactctcaaaactgagtccaacaacatataatgtggctatatttaaaatttgaaattccgaaaccttacctaagcagtgcatgttaactatcggtggcagtaaaaattggtgtactgaaaatatcgtcgaaaataggggtagtatatatcaaaacgaccacctcgacgagtagatcgcacccatgccaaccgtttgtcaaaatagtacacgatatcgccgaaaagtcaccgaaaaggcgcagagctacaaaaacatcaccggaaaaagtagcgagttaagtgaaatggcttagcgtaggttattcttctcgactagccgaatctaatggtgaagacgactcgtcaaacggacaccggaggtggccgaaaaatccattcaaagtttgaaccttcaaactttgacttgcgatcccatgctaatggcggcgaaaggggcggcaccgcttggggttgaggttttcggcacctgaggattcgaatggtccggcgcgtggggccagatagtggccagagatgggtcgctagagtcacatcggtgatggggtttcgtgggtttccttttgtggtttgaagagagagagagagag

SEQ ID NO: 37275 - DNA, 3198 bp, Cannabis sativa
agctgtgccaaactgaccctaagtcacaggagaaatcttcagaaacatcacatatatcttggtatatgcgagatttgaatatttccttcttggtcctacgtcatgcgaggcgtaataatgcaacttgactctgtcaaggtcacatcatctcgctgagtttgggtcaggtgaggtttatccttgagtggtgtccttctgacagctcagcaatcctcaaggagagtgagtccacgtgtcatcttttacgggagcctaatctcaagtttcttggtataatttttcaccctataataaaaatctagtgtgcaccattgaaaatttttatggatcaaagcaattaattgaagtaaaataaaaacttgcgcgtaaataaaaacttactttatatgcatgcttggtaagatctttcaaaagataattaattattcttttaagacttgtgaataattaattaaaatatgatcagattttctctcgaggtaaaggacaaggtcctaaaaccatgcaaattggtacaaatttcaaataaaatcaactacctcaaaaattcaagtaaggtcttttacctcaaaatgttagatgagatcattcacttcaaccaaaatcctaaatgaggtatttatctcaataattttttttttttaaataagctagttcacctaaaaaatatcaaactgagtttgtatttcacaaagttcctaaagatacaaaatctttggataactcatcttgaactatgtgtgacttgattcgtataaaaggatacgtaggcgattttatttctaaggttaagtgtagtcccaaaatagcacaaaacggtataaaatattaaatctcaaaattccattaaaggacattcacctaagaattttactaaatttttaaatgacaaataattccttaaaatggtcatatatcagaatttttatattcaaatcctaaaactccatattctgaactacaaatggcttgatcctttacaaaaaaatatatgtaagcaactcagttagccaaaattactgaattcagttgcaattctaaatttaccctaattttacctcaattatttaatatcattgtaattttgttttgagaaaaagatctgttattaaaacttaaagagtgtcagttagaacaatagaaaagatggtagaaagaatatcttctaactaaatacaacttatccaacactaaagcttatttagctaatccatgagcctcttgattcgaagcacgacgcacatgagaaacacaaactgtagcgagataggataattgatgttgaatgtccctgatcaaacctttgaaagaggaccgattaggtgtggaaccattgatggagttagaaaggattagagagtcaatctctacataattccaaattcaagttaaacttttagcccactgcaatccatgaaacattgctttagcttcaatttcttgagaccaaaaacaaccaaccattggtcttgacaaagtagcccgaccaaccccattttaatattgtataatgactcctaaaccgatctctttgtttgatgaatcattggtcgcatctatattcattttgaggcagttttgttgaggaggttgccatggaatgtggtctgcatcactagaaatcagcatagttatagcaggagaaagttgatgttggagttggtgataattcttcaaatacataatagctttcatatagatttttggtgccttgtgggtgtttttttccatgattgaaattgttcctgtccgaccaaatataccacatagtgcaaaagatcatttccatctcaaattcggtgtaaattttggatagattatacaaaaaatcagccagttcaacactgtagcagcttgaaaatcaaatgcaaaataagtgtgcctccaaactgctttagcatgcttataactaaacatggcatgtccaactgattctcaagaattggagcacaagctacaagcagccgcagtgagagttttattttgaaaaaaacaaagatgctactggtagaccattctctattgctctccaagcaaaattttttacgttaggtggtaggtttaggccccaaaatccaccaggtttacattaagctagagcagtaagactcttcttttttagctaagaacaagccaacctataacccgattgtacagaatattctccttcattgtggtgccaaatccattcatccttagcattatgaaatgggataggaatggaaaggatataatcaatatcaataggtgaaaaatatgcttgcaatttatccgaattccaaactttatccactctgatataatcagagacttcgctagtatcacaaccagtgtatcgaagtgggagaaattcagtattttaaggaatctaagaatctgaaccacatacaatgttattactgtcgccaactttcatatgaagacctttcactaaaagctctcgactccaacatattcctttccaagttatggatgatataccatgacaatcagcccccataaagttattattctgagaatacttgcccttgagaaactaactaagaagtgaatttgcgttttgaaagatgcgccaagattgttaagcaagcatcgcttggttaaaataaataaaatcacgaaaacccgttccaccttcaactttagacttgcaaagaaacttccactttttctaatgaatttttttcttatcaattaatgtaccccaccagaatctagccatcatggtctaaatttgcttgcgaaagtttactggaagcttgaagcatctcatagcatatgttggaattaattgaacaaccacttttaaaagaacctccttgccaccaattgaaaaaagcttatcagacaaatcatgcattaacttctagatacattcttttgtattgttgaacaactatttcttatcacgtttagaataagcaggaaggccttgatatttttcatggcactcatagattagtatccccaaaatttgattgaaagaaagcttagctgcctccgaggtgtttggagagaaagacatgacggatttgtcattattgagttgttatcaagaagctttatgatatatatctaatgcacgtttgataactccacaagatcggtcatcagctaggcaaaacaaaagactgtcatctgcaaataataaatgagagatggtaggtgcatgacgagatgttaactcaaacttttcga

SEQ ID NO: 37276 - DNA, 3386 bp, Cannabis sativa
cacctcatatatatgtctaggagtactaatacaattatatatgtatatgttaatttattatttggagtttacttatttataggaatttgtgggagtgaccaatggaagcttggggctcacctattctgcctatataaacatataccctatatgggctctcggccactacttcaatcgggttttagtaccttcttctaacaattaataatgtataaatatttttttttttttgaataaaggtaataatgtataatacaattacaaatttacaaccccatggagtattatttggtaataaatcattgggaatttgtcaattgttcagtttgttattaattaagattatataatgaagttgtctttatatataactcaattatgtgtttttggatatgttaaattcattggctatgattaacaaaaatcttaaatactcttcaagcattttcaatcaagtgctaaaaaagtactttattgttatattttaatacatttaataaaaaaaaatactattttaatgatgttctaaaaaaaagtatgtcaaatttagcgtatattaaaagatgtgttaaatttgaccataataaattttacttttttatttattatagtgttattaattattatgatttttttttttttatgaataaggttcttgtattgctcaaacaacattttttacaacttacatttgattacattcaagctctttctctgccttccccttctgtttttttttcctctatataggcaattacttaattacaatttcagcaaaaaattagatattcacaatccaatttttatctacatctttagttttcctaggtataacttctataatccggagcttgctctcccattgtatgcgtttcaccattgccttgacatgtctcaccttttgattccataagacatcatttctagcctcccaaatataatatacaagtccagccagcactactttcatcatacttcttcgagttgctattattatgatttattgacttttacataatttatcttctttatttattatattaccattatttaagtaataaaaaaattaaaaaatagtgatgtttgtatatttttaataaaatattaaatgatgatcaatgctaattatatatttttacaacttttgtattgaagcacaattataaataataggctaaacataacataaaattattttttgtgccaaatttattaaattttatattttacattaaaaatagtcttaattaaataaataaccaagatgcaatttttagatctacaatagctaaatttaatgtgtaatatgtatgtgaaggtactcatttcatttttttagctaaatatagcaaatgtatattgaggtaaatagtttttctaatagtttatttattcttctctcttcaaatgtatatttgtttaaattattatttaattaataatttttttaaactataatatttaaatgatgtaaaaaaaaataaaaaatacataataaaagaaaattatttaattttggagggtgtactaagtcaaaccagtactatttagccactacaaaaaaacttgatttagaaaatgtcatgacctaaagtgttagttataatttttttgtaaccgacgttgtgactaaaatgtccgtagttaaaaaatttataataacattaaaaataaagggagaacttagatatttttaggtacattttttttttgataattccataaattttattatcactaatatatacatattaagtcacaacaaaaaattgtgacatttatttggtacatttcagttaatgtgtcagtttcgtattgttatttttgatctgtttcaaaaatttacaaatttcttaacttgtgcacctacaaaattttcaattttctgatttagccttgtgaatttcttttaaatgtgacattgagctctctaaccaaataaattatttcttctattgccaatattctaacatgagcaattaaaacctaatcaaacttgtcaatagaaataaaaagaatatatcatgatgaattgctaatatcctcctcgtagcaaaaaaagttatttttgaaggactaatttgttaatatgttatatagttaaaggttatttatggtataagaaatttattatggtcgtacaattttgaccaggttccattttttatttctgaataaagattgcgttttttttttttgttatacgttattcacttgaaacgagagaggaagagagttgggatctgtttggttcttcgatcgtagactctatacttcgtcttcaacctctgtcagttttcttttccatttctattctcaatttaccttccttatttatttattgtttgctttcccagaaagtttttagtaagaaatatagaattttgctttgcttagattatgctgtgtttattgggtaactcttaattaagagaatttgattaattgttgattctgggtcggttttagtcgattgatcagtcaatgggtgctatttcattctgcatatattgaattaagaaaagttaaaaattgggtctttcagtctttgttcttttgtgtctcaaattcatgacttgtttttctctctgtttcctttctaattgataactaatctctggttgtatgagtttgttgtgagacattttttattgttaaaattcttaagaaatatcagaagtaaaaatgaagctttggttaatacattgtccagttagcaaattatttgatgtgaatttgtgtcaagtgtatgagagagataaaagcaagttgagactttgattttggaatttgtagtgtttatgggataagaagaaaaattgtcaaaaacacctatttgtggcacttttcgaatgatgcaactctcttcatcaacctgttagtaccaatgaatctaatcagaggaaggaaaaaaaaaacactacaaagatttcaccaaacatatcttctctatgtgtagataaaattttgattctcacttgtaaaaatttgtagattttttaggtttaacagtctgtcttttggagaaggagaacataccaggggcattatacaatgtgttgatgaaagtatatatatgtgtcaataattttttttgttttgttaaagatctttctgaataatgttttgaacaaagttgctgtctaacacataagtaatgtcctggatttcgatgtatattatgcatgccaaatttgtataagacaatgtaaaaacttaatggattatattcacaggaaaaatttcttgaagtaatcaacacaccattcaacttgagatggacaatgataatgatttcaccttctgtaaggcaagttcaaatctgttttgagttttggctccttccatgtgcttgatataagtatcttaatcttccccaaactcat

SEQ ID NO: 37277 - DNA, 2950 bp, Cannabis sativa
cttatctgggcaattgttgccgtatcttgtcattatcacactttgtagttataaatctaaaggcagcagccacaaagtaggccaattccatcttatggtcgctattatcatcttcaatcgtgggtaatcattctgcattatcatggaccataaagataatcaatctcctcaaggttccttaacatgttccttctttttatttagttattttagtggggatagttttagttttatctcattgcgtgatttaattttaattttaatatggagccatgcatgtggaacagttcggattctgctcgaattcttggaggttgcaattacttcagttgttttccttaaaggagtttacccttcaggtttggttttacattgtttctttgtagtgtttggctgccaagaaaatttgtgtttcaatattaccgataaaaatgagattttttttttcttttttccttcaatgaaaatcttgacatacattgcacttgtggtcccagtgatagaattgctttttcaataacagatgatctattttttgggtcttgtttgaaggtgcttttgaaagaaggaggtatatgaatttggtagttcaaagagctcgccatcccgaacttagagattatatccattcttcagtttggggacttcttcctttcattgaaaaggttggccttggtcctttgttctttgtttacttcatttctagatatttctatccataattggagtcttagaggtgaagttagattattctcaaaatttattattattaattgtccttaacaaattgaaacactacaatgaaaagaattgtaagctaaattgattcaaaattgagtttaaccttcacattgcactaatcatgtgagagattcacaaattacatatgcactaactgtggaagaaaacacaataatagaagcaaatcattaagattttgatcataatcaatcagcatagccattatagaccataaagcatacacaagcactctggagtccatgaatgtttagcattttgagaaagtttattgtttatatttggattttggtcttagaagctccaaaccgacctctcatcacaagtgtgtttctttcttgcatttgcattttgagaatgtttttttttgttaatatttggtctttgaaatcggcatcccaccaattatgtgtttcttttctgcatttgcatatgttgcataacttttttttgagtaaattattagatgttgtccatgggatttgaattgtacaagatcctagaatttcacttaaagttgatgtttctcacaccttttgtcaccaaatgatacttgctagacacccataataatctttagaaaccctctctattcaaaataatattttttgaaacaatgatatagaaattgttatgtaggtatccaggacgaactcgaatcttagtccttgtgggatcaaaccacatgtcttgactgtttgagctatcctgcttgggtttctacgaaaaaagtaatcattagacaccatgtactagtatttcggggtattgctcatgctgcctcatgctaaggctgttcaatctgaatttccaatattctagcaatttcactgaatagttaaaaagacagaaattgattgatccaaaatttgtttctactgctttagtgacatagcactatatctacctgatgttgggcaatgggaaaattgaataaagattcctgtatacttttcatttacaagtcgaccaacatttgccttaaccaaattcaacaagatcatagtatatgctttctggttacattgttcttacttttctggcaatgttatccttttaaactaccaagaaattcccctaaaataatgctcttctgaattaggatttggttgaaagagtagcagtaatcttcttcaatgcagacaacaaccctgtggaaagatttatcttcaagcttgtggtgaaccagtcttatggctctaaggttgaagaagccgacttggagttctcccttaggtcgtttttgatcaagctttctgtctcagaaccacttactaatgttctttctcatggtaatgcctactactttttcgcatattgtattcaatttcatctgcttatgtcaatcttgggtttagcattgatcagatattggtgcttttgcataaatgaataatttcactcgtttgtgtttacataagttggaaattggtgcgtgtgtacagattgcaggtgggagattacagcttatttccgatccctccctgataaaagtacaagtaaagatgcagggttatggattccaacagacacaaaacaatggcatcaacctccattgataactccaatcaagtcaatgagtagtgaacctctgtctttacagttatacctagaacatccaagtctgaattaggcttccccagttatacttaaaacttcttacatgtgttgtaagaactcttgtgaggacttgtgctttatgctcctcaccaagagtgcttcgaaagtaaataaataaatattgcttcttcacaagttcggtttgatctgggtgattgatttcacagagtagattctaagattctctcccatttactgtaaccacttccttttgtctcagtttacagtgttttttttaagtacatttttattggattcataaaattaagttgttgatttcatgttatggctaaggcactgagtcactattaagtgtttgtaaaaatttctcacaagatttcactcttgcttttgatcccatatttatattatataagactcaagtttttctacttcagtgcaagtctctagaatctgatatgaatcctcacctacttctcaccacctttcactctcactaaagttatgtctcttttgaatctctcaaaccctaacatgaaatctttattccaatcttttgttaatttgaaatttcttttttatttctgattttgatgtgtagtaaaatgat

SEQ ID NO: 37278 - DNA, 6466 bp, Cannabis sativa
aaaggagttcacatgtggtgctggccatggacctatattcggcttctgcagatgatttggacactgtagtttgcttttttgatttccaggaaattaaagaaggaccaaggaatatgcagaaaccggttatcgatcttctggtgtcgggacaagtaccccagtcagcatcagagaatgcatgtaattgaaacggattcgttgttgatgcagaggagctgaagaagaggccttggccagaggcagcttttaaatactgtagtattcgtgtagcagctttcatgtgtggttgtcgagggtcactgagaaattggctgaggcgattaacagcgtaagtgatgtctggtcgagttaaggttaagtataggagtttgccaattagactccggtatgaagtagggtcagaaacaggggggccaacatctttgctaagtgataggttagcctccatgggagtagatactgttttgactccaagagatccagtttctgtgaggatttgcagaataaaaggtcgttgagagacagcgatgcctgctttggatcgagctatttctaatccaaggaagaaacgtaaaggtccgagatcttttagttggaatttggagtttaggaaggctttaaaagcagatacatccgaatcattgttacttgcgatgactatgtcatcgacatagacaagaagtgcaaggaaagaattattggaagatctgataaagagggaatggtcatttggtgattgagtgaaaccagtgctaagtaatgtagaacttaacttagcaaaccattgcctagaagattgttttaagccatataaactcttatttagtttacagacagcattggggggtagctccccctcatgtatataacctttaggtattgtcatgtagacattttcttcaaggtcgccatgtaagaaagcgttgttaatgtccatttgatgaagggaccagttgttgagggcagcaagagcaaggaaaagtttaagtgtattgaatttagcaactggggcaaaggtttcaacatagtcaataccatgttgttgattgtatccttttgcaacaaggcgtgctttatatcgtacaacttcacctttagaattatacttgatcttgaagacccatttattgccaataacgtgacaaccaggagggagagagataatagtccaggtgttattttgttttagagcaaataattcatggtccatggctttgagccaatgagcaaatttggaagcttgactatatgaggttggctcaagttcgaggtatgcttggagtatagcatttcgaaaagatttgtgaagcctatcatatttgagatatctgtcaaggggatatgcagtggaagaggtgcatatgaaatcgtttaaatgggcaggtttggaggtaattctgccagattttgttattttggttgtgtcattagatgcaactggaggaatatctattggaggttcatcatgagaacttgtctcagtatgctgagaagggattggatgaaataatgcagagggaatagttgcagtaggtttggcaaaaaaggtatcgagatcaggtttggaagaacctgttagtggaaaaattgtttcataaaaaaccacatctcgagaatgaaaaatggcatttctggctagatcaataagcgtgtatgctttcatgccattgggataaccaatgaacatgcaagcacgagcacgaggagaaaacttgtgtctcttgcttggtaaagaggatgcatatgcgaggcaaccgaaagctcttaagtggctgtatgtaggttgtttattatgcaagagttggtatgctgttttgtgttgtaatagggggataggagtcctattaattagataaacaacagtgttaataaaatatggccagtatgctaatggaagagaggactgaaaagccaaagctcgagcaacattcaaaatatgttggtgtttttgcttaactacagagttttgttgaggtgtttcaacacaagaattattgatttggatacccttttgagcatagaaggatgtcatatttagttctttagcattatcacaacgaatagctttaacgtttgtagcatattgtgtgtgaatgaaagtgtaaaactgagggatatagagttgtgcctcagcctttgtttttaacatatatacccaagtgaaacgactgtgatcatctacaatggtaaggaaatatcgaaaaccttcagtactttggacatggaaaggaccccaaatgtccatatgtataagatcaaatttagaggcagcaatattattgtttgaaatgaaaggcaatcttttttgctttgcaagatgacaaattgaacaaggagaagaaacagtagtatgtttagaatgcaacattttattgattatgttggtagtgtacatggatggatgtccaaaacgggcatgccatgagaaattgttacaggaaatattacaaacagtaggatggaaaccagtagggaaatcatgcatcaagaaatagagatggcctacacgtttagcaatcccaatcttcctgttcagggaaccctgtaaaatgcaggaggtttttgtaaaaaagatgctgttagaaagattgtcgaggaaagaagggacactaaaaaggttgaattgaaaatcaggtacataaaaaacattagacaaatatagattatggaaaaattttatagtgcctgatttttgaaccttaatactcgaaccatttggtaatttgatggatgtgggaactggaatgtcatgtaattgagagaatagagaaatattacaacaaatgtggtgagtagcaccactgtcgacaatccataaagagttagagttatgttttgtattaccagaaatgtgtgaggcaaaaggttgaacatctgaagtggttggctgtagcttctgagacagaagtgaaatgagattctggatgtcttctggtttggttaaattggatacaaaggagagaggatcagtagaagtagatgcttgatttgctactgctgttgtttctttcttcttgtcaccataacctggtgggaatccgataaggaagaagcacttttctttcaaatggccaggtttatggcagtttgtacagtaaggtcgcattctcttgttgcgattttgatttgcattagcagcagatgcagatggagtttgtgtaagagctgaattggtagtagaatcttgagtagatgcaacaagagatgggatctgaggggttttgagttttctccgtctttcttcatggatgaccatagagaaaactttggacagagtagggaagggatcaatgagtaaaatctgagctctaacagggtaaaaagattcgtttaaacctgttaaaaactgaagaacctgttcttgattcaagaaagcaaggttatctatggaagcagaacaagtgcagggaattcttggacggagttcttgaatctcatcccacatgcacttaagtttagtgaagtaagaacttacagagtcatcgccttgatgtagagtaatgagcgtttctctgagttcgaagatccgaggaccgtttccttgatcataccttgagttgagctcctgccacatctcagcagccgtatccaagaacataatactgctcttaatgtcagacgaaactgagtgtaatatccaggacattaccatctgattacaacgaagccaatggtgatgcagaggattatcgacaggaggttgaggtagagttcctttgaggaagaaggtcttgttgggcgcaccaacggaaagttcgaagtctcgacgccatgattgaaagttcttgtcagagagacgaggagtgactaaggtgagaccggggttatcaccagaattcagaaagtatggactggaactatcttcatggacaagacgatttgtcgcattgggcggaggaggagctatgtctccggtgacagcagaggccggaggaatgatcggagggttaggaggaacaactggtattgaggatgaagtattcgacaatggagtttgaccggaattcctggaaccagttgcgcgagttcttgccatggcagcgatcgtgagagagagattgttttaagcgactgataccatattaggaaagaatgaattgaattgtattgattgacccaaaacagggtatttatacaagaatattatccaaaaaataaggaaaaggaaaacagaaaaaatagaacctaataaactttctaataccgtttataatagaaaataactgtgagatatgcaggcctctaataccaagtcatgaggatcaccactacaaaagtgagatggtgtatttttttttctttcttttttctattcttttaaactgagatgtcatggtgttatttaaacctttgttcttaaacgattgtttggtcgattaattagtaaatatatagttaacggtcataatttagtaattattaattaatgtttcttgtgaaaatcatccctacgtactcttagctactgttgcttgcagtgagaaagtccaaatctcaggaatcttgtaaataaaaaatatggataatattcatattcaatgttcattcgtttaaccatactatatatttataaattttgtctgagtttttattttattttagtaggagtcaaatctcagaaggtaaaaattaagggcatgtttggagtgttggataagaactctggactattttgtactatgatatgtttggaggatggttaaaatagtcccaacaaattttttaatatttatttttatcaaaaaaaaaaaatatgtcatatatgtggtatatatatatatttatatatatatttaataatgataatttttgtttttatatggtgaaggcaatgttatgtatgttataaattttatcaaaatattattttttctattttttttatagtgtatattcaaaattaaaaaaataataaatcaaatactataattattttcttaataaagattaaatgctaaaattaatatttttttattaaaaaataattcatttatttattttaaaatataagattttattaaactttatttaacacttaacatttaatattaataaaatataattttataaaattatttatattttttgatattgtattctccatttagctatatgttgcatcaaatatagtagtattaaatattatttttaataacaaaaaatatttttatttttaaaatcatacaatggttttttttttgaaaaagaaatcatacattagttagaaaacaaaaattatacttttttagctatgtacttgtgttaaacatggtatagtacaaatataatctaagtccaatccaatttaattttaataaataattcaatcaaatctaatcctacataccaaacagtacttaacaataataataataataataatatctgcttattatttcttggttaaggagctcgagttgacatggcatgtagacgatgtgtgtgtactgtccacagcaaagttttttattcttcttcatccgctgtgctgcaatgagatgacccgccccatacctacatacaccatataaatggatatttactcaaagacctatacaaatctaaaggtgttgtgttttaaccaaaaccatgtatactactgaccctgaagtgaccattatttatacatctccacctaatttgtatatccatcaaaatcgacaaatttagaagatggtgtccaataaattcgtttgatgataggtcacccattggtattgcactattcaacctcaatttctatgcaagtgaagcagttctacagttgcaataaccatatctgacatcagctacctttacaatggcgatttaactaatacgacgtcgttgttattgttgctgtttttaataaaaatgctcctgtaggattttaaataaggctctttataatgtacccaattcaattcaattctcatgattcaattgagtctgcaaagtacaaatatgtagatatatggattggattagattaaaaaatttacaatttgcacttgctgggattgaatgttgagtgaggtgtaaaagtaattgatcaaatccaatatatgatacaaatatatttcaatttagattaaatgtatattctatttttatttacaaggaaaatataattcaaaataaaattaaacatttctatatacatatttttttcatcttagaatttgttatttttttttgttttattttttttattattagagacataaaataacaataatttttattttgttgctagttatataaaaaaaataataaatattgaataatttaatactaaaaagtaacaagtcgaatttgcaggttgagttggattagattaattgagttataatatgaattggattagatgcaaatatgaaatacgtttcgttgggaggaatgaaaatataagaataggaatgagaatgggaataagaaaaggaatggaatggaataaaatttaaaatgcataaaaaaattattaatt

SEQ ID NO: 37279 - DNA, 4835 bp, Cannabis sativa
aaatctatcatggtaaaatattcccaacgactgggccctatttccagggactcgagattgtggttttctcctcgagtttatttgaatcctcattatttctgataacgaaacaaatatccagaacactttttgctgaacttgatcgaaaatagcccaggttggcaaaatgtcaatctgggcgctggacccagccccaagtgtcaacctgggccacacttttggcccttcaaaatttttttttggtctccgtaaatagttgaatctcaatattctctgaagacagagatgctggaaagaattcttgaaaaacttaattttaattagcctgggttgacaaaatatcaacctgggcgcaaggccagccccaagtgtcaacctgggcactgggccatgttatttatacctaggaattattgtttttcctctaaaatgatctatttccccatttttgatgaagatagattcgatacaaaaatcaaatctccgatcgaacacttggaaggcgcccagattgacaaattgtcaacctgggcgctgggtgctcaaggcactggggccctgtgtgctaaaaaatcaacttgctccgattctaattctgatgcctcaaatatgttcgtggtatgtgtagatgtcccaatgccagttttgaccattttgcactaagatggtcctgaaaactgaatccctagttgaggatgttaactttggtgccgagtgaaatcaaagatacctaggttggcttttgggttgcaggttcatgtaatttcagctctcgaggcttggatcaggttgctccctgtcttcatggtttaaaatattgaaagatagtgagttgaattcaagttattgaagttcgaacttccatcctagagatcccaaagtcaacctgggtgtagggctaaggtcccctccctagttgactactatgactcgagtttactcaactccgtgacatcatccttcatgccacgtgtcaaatattaatgtccacgtcactattttttttatttttttttgggttaatagagataaaacgatacctcaagccaaaacggaacatgttgcttattatatctcatatcaatgaaaggcaaaatatatcaatgatctgagataactcgtatctcatgtcaaacaaaggaaaaccacaaattggatatagtcaaaataagatgaatgaaagaaccgagaaattaaggacctactaccatttagtaagaaataagaccaaatcatatgaaacaaaattagttaaaagaagataatcttacagtataactaatcatgaaagattaacacatttggcacacttttttgagagcattaaagaagtgacaacaccactatggatggaaaaaaaatgcactataaaaactaaatggaggattcacctagagagggtgagaaaagaaacaaaaaaaaatacattattaactttgagaggaagaatcgagaaaaagaaaagttgtatcagtataaatttaatcaaaatggtctcactccagtaatggttaaaacattggacaacccttcaagacactaatactttttctttcctttatgagtaatacaaattgatatatttggcgataatagagcagaaattccctatatgcaagcaaggccgtacgttgtgtgatgaaggagataagaaaagatccttgtcgtattgaatctattcataaaaacagacccagccagtcatcttcactcattagtaattatataacttgttcccgctcaaatttttgataatgcccactgaattaaaatttatgtaactatattaatattattattagagtagtttaaaagcaaatcatgttattgatattttgttttttaatatttttaaacacataaacgacaaataagaagtagcctagggttgattgatttgtagcaatttcgtcgttttgcaggggtattgttcgttgcgtggttacatgaatgaatgaatgaatgcacaaattgtttttccttttcttttggggtataataataaataaatattctttctttcccattttgaacttcgttttcataaccaggtaatttataggggagagaagagaggggctattcaattagttgttcatgtagttctcttctcgccttgccttggaggaaatgcctgagccatgctgctctcctcttccaccgcctcacctcattcactgctctccccctctaccgtacctgctctgaccttttcaacttttccctctgaccccagattcaggccaacacaacttcatttactgcctctcggcttcgtcggagccaagggccattgccgttcggggtttttccgttcgacggagtattgtaggggtttgcatgttggttggtcttggttcgtcacgcgttgcagggattgggatagcgaaggggattttgaattggaagctgagattttggagttcatgaagaattctaataagcctggggcgtttcctagcaagaaggagttggttgatgctggaaggattgatttggtgaaggctattgtcaagcaaggtggttggttgtcttccggttgggatttggacgacgaagaagaaggaactcaagaaagtggagtcagtagtctagcttcaacggtggccacggaaagtgatcattttcaggaaaacaatcttctttctgtggatgaaatacaggaccctgatgtttcttattgtccctacgataattttccgtcaacctcatcgtctggtagatcgttgtaagggtttgttatgataatctctttttgttttctaattaattttcacattatggttttttgggtattgaatcgttctttgttcgttgaaaaagtaaattgactcgtttgtacactttttacttagagaaatggaaaccgcacagcatgagactgggattgaaggcatactgactcgattggagaaggaaagaaatatgacttttggattaggccgaggagaaaataatgaatcccgtagggaagctaacaatgagaataaagaatggcattctaaattctcaattgatatggtaagttggcttattaatgcttaaagttatcctttttttttttttttttctttttgacaaaatgcttaaagttatccttgttttgtaattcatggaaatttgaatgcacctaattttctaaatgaaattggttagaggaaacaatcctatgagcatagttttgcgccagccaagttgtcttagtattttcaaatcaagtcaaaagatatataaatttgacattcaagctctaatgaactgtagtctttcttcaacatctgcattgggatatctatgttagatagttggtttcttattttttatttactttttctttccttccatttatttgttgctgtataggaattataaaacatgttgtgtggttcttttacattgtaagagacagttgctggcctttctagaagcagcaggtcttcatcattgatccccaagaaagctatatttgttgatcctcaggctaggcttgatctgggaaaatctttttgtaagattgatgaattaagaagttcaaatgaggcattaacttggagaacatggagcactcagcgggcaggattttcaaatatgggttttgaaggtatttctttatactaattgatggtagctgaatgtttaaatggtttgattgttaatgacctatatcaattgatacagacactgaaactgcatcaagtgaatctcgtattggagggtcattggatttgtcaaaagaagaaatactaagaagagagagtatacgtaaaattaatgaagcgaatgaactagattcacatcatgaagtgattagtcttaatcaactacgaagtcgtcttaagcacctggagttagagctgtcatctgcacttcactcggtgcgatataatgctgatgaaactgcctcacaaaaggtttttactctgatgtttacatttaatgcaactacctttcccatcatttttaatattcttctcacagaaaaacgagaatagtttggagttttgttttgctgtctaggtcatttggaacagatttcatttttttataattataatatcatataagtttttaatctgttgaataatttaataatttatcaattgttctggtatgtctaggatcatgaaggcacctctgatgacttgcggaatctttctgatgcttgggaatttcaggaaaacgagattatgaatgccaagagttcattacgttcaactcgggcaaagttagctgttttagaaggaaagatggcactagcaataatgtatgtacattctattaaattgaagaaagtagcaataatgctgtacattctattaaattgaagacatataagatttaagttaactgctttacgttgatgtttcggatatatcttccctttacagtaatgcaaaaaagattgtggaggagaaacaaaagaggatagatgatgctcgaagagcttcacgacttcttcgttctagttgcatagtttggcctaattcagcctctgaagtgcttttggcaggatcatttgatggttgggcatcacaggtataatctcatattcccacgtccctttaaacaaggcaatgcttgtgctgattggcttacgtctttttaattgaattttattttatttttttattataaatttcagtcagacacataacatttattcaattaccaaaatcctatcacaggttatggtatctatgattgtaatataaatctcacaaatcactcgagttcaatcttgttgatagtaaccttgtccactttccgtcgtacagtatatactgttaatgactgcagccatcagccatgtgaaggtctttctatagtgatttttc

SEQ ID NO: 37280 - DNA, 4463 bp, Cannabis sativa
tgttattcttaatacaaatattttggattttgcttaggcacacgtgtagacctcctagatggtctatcaatacttccctccctaggtggaaccttgtcctcaaggtttagtgttgggaattgagtctgcaaaagctctaaattctcccacgtagcatcctcaacaggtaaacgtttccattgaactagacactccacgataaatgtgtctccttgtttaatccaacgagcatccaacactttttctggttctatttgaagaagtccctcatccgaaactggtggcacatcaacagtagtgggtagtgaagtaccaataaatttcttgaggagggaaacatgaaaaacagggtggatttttgcttcaggaggagaagagaggcggtaagccaccttgcccagcttttgctccacccgataagggccataaaaccgagtggcaagtttgtggtgtgcacgtttgaacacagaagtctgtcggtatggatgcaatttcaagaaaaccaaatcaccaacctgaaattcgacttcgcgccggtgccgatcagcattttgtttcatgcgtgcagctgctgtggagagatttgttttgagctgttgaagcacttcatctcgagaaagaagatgttggtctacctcatttactcgtgagaacccttctgtatacagaggaagtgaaggtgggagacgtccatataaagcttgaaatggagtcataccagtagaacaatggaatgtggtgttgtaccaatactctgcccacgacaaataactataccatttacgaggccattggtgaacaaaacatcgcaaatactgttcgacacatcgattgacaacttccgtttgtccgtctgtctgtgggtggtaagccgaactgagatgcaacttagaacctgacatagtaaaaaattcttgccaaaacttactgataaaaattggatctcggtcactaataatagttttcggcatcccatgaagtttgataatattttcaacaaacttttcagcaacaatctttgcagagaaaggatgagacaaaccaataaagtgggcagacttacttagcctatcaactaccaccaaaatactatcttttccgtatgaagaggggaaaccttcaatgaagtctaaggatatatcatcccatacttgacaaggaattggcaagggttgaaggagtccacctggggctaaagtatctgacttgattttctggcatgtgagacattgtgagacataagtcttgacagatttgtacatagaaggccaataaaattgttgagcaagtcgcttgtaagtacgtaagactccagaatgcccagccatcttgttattgtgaaactcttcaagaagttggtcacgcatggcagtaggaaccaccactcgatttttataaaagcacaaaccattttttaataaaaagtttccttgaggctcattggtagctcgctggactaaactctgcagaaaggtatcagttgttgatgcctttctaatgtcatcccatattgacatgtgtgagacaaacaatgggttcagaataggactgtcaactcgtcgagacaaggcatcagcgactgaattttcacgtcctggcctataaataatttcataatcataccccaagagtttggccacccacttttgttgttgaggagtagcaacacgctgatctaaaaaatattttagacttctctgatcagtctgaatatagaatttctgacccaagagatacggtcgccaagtgcgaattgcctccataattgctagcatttctttagcataaatagaccaggtttgtttagcagtactcaaagctttactcatgaaggcaatgggtcttccttcttgacttaaaacagcaccaatgccagcactagaagcatctgtttcaatgaagaatggggctttgaaattaggcattgccaagatgggggtggttgttagtgcttgctttagtttggagaatgcagcttcggcatagctattccaccggaagaggcctttcttgagaagatcggtgagaggacgagctatcactccatagttgcgaacaaactttctgtagtaccctgttaagcctaaaaacccacgcaattcagtaatattagcaggtgatggccatgcatttatggcttcaatttttttattatcaaccttgacaccttgggatgtaaccacgtgtcctaaatattccagctcctgcttgccaaagtcacacttggtggctttcacaaaaaattgatgatgtttcagtatgtctaaggcggtggtgacatgactcaaatgcaagtcccaatttggactatatattaatatatcatcaaaaaaaaccaatatgaattgacgtagataaggacgaaatatagaattcataatagcttgaaaggtcgaaggagcattacagagcctaaagggcattaccagatattcgtaatggccactatgggttcgaaaagctgtttttggaatatcaggtgcatggactcggacttggtgataccctgctctgaggtcaagtttggtgaaatatttggctccatataattcgtccaacatgtcatcaactgagggaattggaaatcgatctttgatcgtggcttcgttgagtgctctataatctgtgcaaaatcgccaagatccatcttttttcttcactagtaaaacaggtgaggagaatggacttgtactcggttgaatgattccgatatccctcatggcctgcacttgtttctcaatctcatctttctgaaaatgagcatatcggtatggtcgaacgttgatgggttgagtcccttccttcagaggaatgtggtgatcaatgtcccgcaacggtggcagttgggtgggttctttgaataactcatcatagttgcttaagactcgcaacatgtctgaagggatatcacgccattgatgttctgtaattgtaggaatgtagatggcgaaggccatgttgccttgtcgagactccttcatgatggactgaactgaagtaggttgaagacccgtttggattccttgtaacatacatgcgcgattctcccatgtgaagttcattgtcatttgcttccaattacaaacaacggaccccaacatttcgagccattggactcctaaaaccatatccaatccagccaaaggtaatgaataacatgtaagagaaaagtgaatgccctgtaaatctactggtacctgatcaaaccgcccttgacaaagtaatttctctccattggcgacgtggacggtgaaagctttggttggtactacaggaagctttaaggaatctgacagtttattgttgagaaaattgtgtgtggatccactatcaattaataccactagcttcctatttctgatttttgccgcaatacgcatagttcgaggtgaggtccatcctgtcaaagcgaacattgatacgcctggttcggcttcaattatttcttcgtcagtcttcaagtggtcgtcatgagcatcgatctccggatgacaatcaagaagtaggagttgcggtacctgacatttgtgacccggggtgaacttttcgttgcaattaaagcataaaccttgagctcgtcgtgtttgcatttcctcccaactcaatcgcttagggggcatcggtgagttccttggtgccgaagggcccttggtaggtgaacggaattgggaagttggtcgagtgaatctttgctgccgtgtgagttgttcatctcgcattcgagccaacccgattgcgtcctttaaggtcttgggtttaaacatgcgtatgccatcagcgatgtcggattttaaaccgcccataaaagtgccgacaagagctttctgagaccacccttgtactcgatttcccaacttttcaaattcgcattgatagtctcgtaaggagccaatttgtcgtacacgagataatgcttcatcaaaatcctccccatccgttgggccaaatcgtgcccacaactcttcataaaacataggccaagtgactgcacgattttcttccttgtaagtccgatgcatccattgccaccattggtttgcttctccttccaaatgaaaagtggccaagccaaccttttggtcgtcgggtgttctttggaactcaaagaattgagcaacacgattaaaccattctgtgggatcgtctccggcaaaccggggaaactcaagtttggtccgtagtggaagattatgcatgcgtaagctgtcggtgtcctccgtggggtggcgtcggggctgttcccgctctacagaatgtgaagaagattgtgctttgttggaaagaactgcttcagataaagcctgcaaagaatcttcaagacgcttcaggtgatcgcccatgccgagtcccattcgctgcacttcagcttgtaagccgccaagtccctgttctaaggattcaatacgttctttgttggttgtcatcccgctctgataccactgataggtcccagtcagaggtag

SEQ ID NO: 37281 - DNA, 7571 bp, Cannabis sativa
gtggcaaacctaaaaatgccatatttttctaactttattatgaaatcccatatttcatgtaattttcacaaaaaaatatcaaatcaaatccgacaaaagagaaagaaaagaaattggaaaaccaatttggacttttatgtctgccgggtggatacacaggcttcagagcttcaagctctcacactccttgccctaacacaaaaaattaaatcgggggttttctttaaaccctagaatatatctcatggtggattcgcattctcacccctcttcaacgtcgatcttcaatcttactcctccgtaagaataagattattctctctctccgtgttgattttttcttttcctcatatttgatcctaattcctaattaagtttctctgtttatcttattttgctttggtttcgaaacgatggtgtaattgctcacgtttttttaacgatgttgtttcttatagatgcatatttgaattggatttttttttggttctgatgaacaccgtgaatttctcaagtttggctgttgtgttggaaatatatatcttttttattctcggcgcacccttgaaagttgaaatgagtaatttcttagagtatgaaatgaaaatttcacgatctggcttttattgatcgttgactgctagcatttttctttttggtgttgaagagatggcgatctgctaataagtcccaattctagagatgccaatttggagttaatttttcctgagaaagtggtcattataatatatgtaatatacgtgccgagttgcttgatcagctgatcccagctagtttccatgttagcttttttattcgttttgtttcggctttcttcgcattgtatatgtatttgtgcgtctatgttttgtcttttataatctgattgggtggacggctgaaagtggttgcgaagtgataatgtgactttgtaaaagtaaccattttgttttgttgtatttgtattagaatttgatagaaaagctgcctggttaatggttatatttgttttctactcatgttaatttgtttgaatccaagatgaatgttttaaattaatttaacggtgaaccatttacttttcagatttaatttttctggctcacattggatgtcaatattgggtatatcacaattgttatccctggttcattcctcaatgagatcgttatgatgtactacttagttcatttttatttggtgctgtgcgtgtaatcactcaacctgcgtggccaaaatgtggaattttgcatcaacttgcatagctgggactgttggatcgaagaaggacccttcgaagcctgcttctgaatgttctgatgatgaggggtcttcggtggttggcagagaggaagggctagaatgcccaatatgctgggaatccttcaacattgttgagaatgttccctatgttttatggtgtgggcataccctttgtaaaaattgcatcctgggactgcaatgggcagttgtgaaattccccactctaccgattcagctcccactcttcatttcctgtccttggtgtaatctcttgtccttccgtctggtttaccgtggcaatctcagattccctcgaaagaactactttctcctttggatggttgagagcatgaatggtgatagagttaagactccttcaacctacactgaagatcaacaaccctggcctataaatggcaatacatctacggctagtcaagttagccactgtaatcttaggaggggacatcatatccgacatcctgagacaccaaggtcaaatgaccatgtccatgtcaataattatttaactatggaaaggttacattcgtctcttaggaagtcattgtttttctttgttcatttgacagccaagtttcccttggttgtgatatttcttcttattgtcttatatgccataccagccagtgctgccatattggctctgtacatactcgtcacaattctgtttgcgctcccgtcatttctcatattgtactttgcatatcctagtttggattggcttgtgagagaaattgttacttgagatgtcatttgcttccaagctttcaagctctgtgaatagaagtttcacctactgtcctacgtggtatcacctccatattgcagcagtatgtgtaatttgacgactttaccgatattcgaagttttctttgttattgttacaattatctgagatcatgtggaagtttgatgatgcagttgaaagtaattgcttcacgatttagtgagaattcagatttcaggtaaactcagtagtatgaatcaatacattgtccgttaagctcttgtttttttgtttttttttttgtttgtatgaagaggaggagaaaccttttcatatgttacaataagttctatgcttgttatgtaactaaattcagttgattttgtttgaatacaatacaatatagtatatagtttcgacaataatggattttaatgagtttgacggcttttttcccaagtcagacgtatggttggttggtctataagttgtaattagctattaaaaacaatgttaatgattttgtttgttaaatctttctcttgaataagagatgttggtattgatgttatgcacatgaatagggatgtattttctctgcgggggattctccgatcaaatggggaatagagcggagatagagcagtccttggtcaggcccccgactttggcgagacggggcaggggggactgaaacattcattgacctgctaattacacacctctttgacatccttacacatgaaatggctgtgcagtgttgtagagggttttgtaaaaatagttttgaaaatctttattagtaaaagtaattttacaaatatttttgttcataaaatatggtgcactgacgttggtaaatttgaatctctactggtattagtcttagaaaaaagaatcacacaaatcattactaataataactatttgactaaaaattcactcaaaaaataaaagaaaaagttttgaatgaaaagaaatgtatttaaattaaaccaaaagctccaaattgaacttaggtgtctatatgttctagaaaaaatttatacttgaacatccacatcttctctctctattatttgttgcctctcatcaatcatcatcgaccacataaattctgaaaatcctagagatttcaagctgagaaaagccaagtagacctccacgtgtcgaaagcatgtcctgtaatttacaagcttttagagtttagactcaagaattccggtgaatactgaaaaaggaaaagcttcgagaaaatggcagcagccattgcctcttcctcagcaaaatccactttttttcaaaatcccactttcctgagagacccaagtgctaattcttttggtgggtcattgaagggtttgtgtttacaacaaagaccaagaaacaagagtagagattccttcggtttggttgtcgcttcagcaaatcccagcagcaataatagcagtagtagtaatggaggcaggttctacttcaactttacaggcttcccattcccgcttggtccttttctcaataggaccacttccaggactgaggtcagctcccttaccttaacaaacatctcttttattcttatgaaaattcacttagtatttttgtggatttgctgcttgattggttcatatgtatcatctgaatgactgaactagcctaatactatttctctctcagcactatgggcttgaaaaggacaaactataattcataaactgcttatttgcttgagtgaaaccttggataaaatttttatttctgatggctcaaaagtatatatttttcttaaacaaatctagaagttctgctttcttacagtcatttttggattcactccacatgtctataggctgtgaaaggcagtatatggctatttgaacaagagcaagcattgggtttcagtagtgtctcaacaaacattagaatgacagttatcaaactcaaatctggtggattatggattcatgctcccattgctcccactgatgaatgcattcaggttctatttcattttctattgtcgcctcacctttgtctgattctgcttacatagattaagagtttttctaatgagtattgtgttctccgttcagcttgtgaaagagctaggagctccggtcgagtacattgttctccctacatttgcttatgagcacaaaatttttgttggtccattctctagaaagtttcctcgggctcaggtttgggtggcgccaagacagtggagttggccattgaatttgccacttgagttttttggaatctttcgttctaaaaccttgaaagacgaggacttgtctactccgtgggctgatgagattgagcagaaagttttaagctcaccagaagttggtaatatgaactgcaaacatatgtgcttacttttaaactcttggttttgaagaatgatgaagaatccctttttcctatggatttttcaggtattgggccatatgttgaggtagctttctatcataagcgttcacgaacactactggtaacagatgcagtcatttttgttccgaagcagccacccaagtgtattagcaaagaatccttgttggcatctgcaaagaatggtttggctgtaaaaattcttagtaaaggaaaacaagtccctaatgaaccagtagttgacaacagtatgaaccgtcaaaaaggttggttctccatttgaaattccaatgaggaaaccgtttgtactaaatttgattatgatgcaattgaatatggttacatttttctatttttttgttccagggtgggaaaggatggttcttcaaatcttatttcttggtccatcgaatttgttggaacctaatgccagctttgctcaaatgtcacagaagctgattgtttcgccaattgtaaagacattagtgttcagcaaagttccagagaaggtaaaaacatactaatttgaggacaatatgataccaaagcaaagaacttttcattttgttgcttgaattttcttttcttataacaaaccaagtgatggatttgtagtaatggaatcaaaatattagctctatgatctatataatcatatgactaaactgaaaagtgaaaacgtttgaaaattcaggtgagggattggattgatagaatcacaagggactggaacttcaagagaataatccctgctcactttgccggtccaatcaacgctaataggtctaccttcttggctgcattcgcgtttctggatgatctgttgggtgagcgctatgtcactcgaccaaccgtctctcttctcttcgcatcactcatggggaaagctggcagttacttccctcctgatgacatgaagactttatcatcccttgatcaatttctagtctcagtgggagctgtgaagaaaactgtttcaggccgaaaaagatgacacaaacatgagttgcaaaattgcttgttgatacctcttcacctatcaaaatcagtaagtcataatcatataatctcagtgtatacttttaggctacaattggtaccagctaacttaccaaccttatcttccccacttgggcaaatgtatttgattttgtagaaagttatagatgtaaaagaaagaaatattggcaagtatttttttgcttgggaataaatattcttgtgtgtatattgcttggataaatattatttatttaggccatggcttggttttaaaacatgtcactaaatgacttcaaataccatcaaaagtgtagtagttgggatatttttttttttctaaacataaatgtgtgtagttacttttttttttctccattacgtttacaatagaatgttcctttaataattatgattagaaactctgaataatctagtcacattattttatttcttcaaaacaaaacgtccttattaaattttattacaatagatgtctttactacactagctatatctatatttatagtcttgtacatatctttgtcggttaattttgggataaattttaaagaaaaataaaaggaagatcgagcagcagtagtactagttattacagttgacaattgtagcagagaagaaaattgaagtagaataacagtgagaggaaggttgagacttgagattcatatttatcattcatggcccataaaaagacctacttttggttggagggtcaccttgtaactaagccctcctaccaactatatttatatatatgggcccaccacccttacatgggccggcttcttgggtttaagcccaaagctaaggaaaagtaccttggtggaagagattctagtagcactctttcgacatctagtttaattttttttgggattatttacggaaaataaaatgcagtttttttatgttgtattttgttaattttttgttatatatatgttattttttgatattgttttgatgttatttgtatgtagttttcttattatttttgtgttgtttctataaaaaattataaaaatattaaattttttttttacaaaaaataatgtgtatgtacttatttcatttttttagaatggatagtatttaggattatttataaattttaaaaaaatcttaaataatttacaatatcaaatagaagattcaaatatttttattagacgcttaattattttatcttatagaaaatagtaaacaattgtacaaaacttattttcaaatactactaatacatgcatgatgtatatgcatttattgattataaacataaatacaacttttttgtgttcaactaacatatacaaaagtagaattgtactacccatactaataataatactactaatccatgcatgtgattattgattataaagagagaaagagaatccaaggtgatttttctattgcatttcttgtcacttaccactaatactttatttttatttttttgaatggccacctgagattagtaatgccagttgcccatataactttgtcaatttaatatgttagggcatttagtttctgcgaccctcattatcaaataaaaaacttaaattatttcattttgaaatatacaaaatatttatttaaaattttatatatatatacaaaatatttttggaaagtttatagtacactccggggtgtttcggtaaactctaatctagtttaatatttataagaaaaaaattagtctaattttttatttatattcgtgtgtgttttatttatttagatccatctaaaaaaatttcaaaaaaatttaatgtaattataatgtcgaaaataatatttaaatatttaattatacatgtggcagtctttttttatatgcaagaaattatttaaaaattttatatttttgatacataccataaattattttaaatttttaaaaaaatttaggtgctctttataaataactacttgttacaataattttgagttattattattggtttatcacttcagtattcatttgacttttattttggtcttatcttcgtaaaaggtttccaaaagattattgtacgtaaacttacaaaaatactaaaatttgggttaatttttacaaaagtactgtcacacggaaaagttttcaaaaatactgtgtttttataaaactagtaaa

SEQ ID NO: 37282 - DNA, 7325 bp, Cannabis sativa
attttttttatttttgtcatggtaataatattactaaatgtagagatgtgtatactttgtttttgtaggtttatggaaccattagtgtatggtcattatccaaagagcatgattaggaaggtaaagaatagattaccaaaattcacattgaaacaaaagaaattggtgcaaggatcttttgatttcattggcataaattattacacatcaagatttgccaaaagtaaacctccaagcttcccaagtcgctttactacagatgccttagccacagaagaaagtaattaattaacctttttcttttacctttttagtgctttaattacttttttggtaaagtgattattgaaactttgtatgaaatggtctaattgtaattgaatgatctttgcaggccataaaattaatggaagtctcattggtcctaaggtaagtaaaagattggttattgagcattgttattaagtatattaaggtgtttaatagcataagaggtaatattttataaatgatttatagtttcttgtattacaccaatagcgatcagggtcggtcttgagtttattgggtcttagaaaaaataatttttttgggctcttattaaaaaaatagatggtattttttaaatattcataaaaattatccaggcccttagactggatggatcataggcgcatgcttagctcgccttagtctaggaccagtctaataacgatataatgcctacttgtgatgttgggttgagcaccttaaaatgcacttcaacatttttttgtgatctaaagaagtttttgttttgaattttttttccctaacgatttaaattttatattgcaggcgaaaggaagtacattcatcttcgtttatccggaaggattgaggaaacttctgtgtttcatgaaagacaagtaccaaaatcctaaaatcattataactgagaatggtaatgttaatatagattaatttcaacaaattatttttatttaaagtgacttgccacaaaagtatgtgttatatttgtgtataatcattactttagataaaaatagcttccaaaacacacaatagaactttatcataaaaaaatataataaaaaaaaatatataatttttaataatgttttattttagagtaaactacagtaaaactttcagaagtttcacctcactagcaattaactttctaaatctaatttttggcgataaaatcatctaaatccatgttcctttaatagttcatcactttcatccaattttagctgcgaaagtataatgtctatttctcgaactaaaccgatcaaaaattaggtcacaagcacacataatagctatttcattaatgttaatatttttgaaattgcaggcattacagaagtaaatgatcctaacaaaccacttgaagtagcattgaatgatccacatcgaatcataaacactcttcgccatttatataagatccatcaagcaatgcagtaagtcttcaaatgaataatatttctatcccttattgacttatattcttaaaaggaaaattttcatttttagacttttaaaatataagtttacaaaaatataattttttttttcaaaaaaaattattttatgggaaaatattagaaaaaaatttaaaaaaatatgagaaaagtagtatgtcataagagtacctagtttatcatatttttaacaaactaaaattttaagggcacaataatacataaatcataatttatgtggtaaaatttctaaataactaagtgttcatattatttttattgttttgttaaaatttgacaggtatggagtgaatgtgaaaggatacttttattggtcattatttgatgattttgaatggggagaaggctttcttccaagatttgggttatactacattgattacaagaacaatctcaatcgtattcctaaagagtctgctaaatggttcaataggtttttgaatggacattaaaaattatgtactatatgaaaaagatcttcagtcgaattttaagatagaaaaagatcttctgttgaatttttatgatgtctcattcgactaacctacaacgctttattatatatattttctctaggttattgtttacaaatgttgtttgctcaatttaagaaacatactacactattttgacaaaattaagttgttgattttttgtgataaccattcttatttatgggttcaaatcataattaagtgttatgtttattaaataaagtcacttcaaaaataaaaacaataattttaactattatcatcaatttattgttagcaaaggtattagggtacgaagtcgaagtcagggtctgggtcaagtttggagtccgagctagggtcagggtcaatctagggtcaaggtccaaatcgagctcgagattcgagtcgaggttcaaagtcaacgaagggtgggattatggtaaaaatagtataattttaaacaacctaataatacaagtcaatatcaaacataatattatattaaataatactatacaataaaatacaacacaacaaaacacgttgtaccaaaaagaacccaaaaattatttccatattcaattatgaaaatccaagatattttctttaaaacatgcagaacaaaataattggaattttgtaaaactctgctttcaacaaaaaaaaacacaaataaagaacagatttgatttaaatgaaagctacctaaaaacccattgtttacaacagagagcttaaaaccagaggtaaaaagctttaaaactaccaagttctaaatactcaaaaacacaatttataacattaatatagaaaaaaaaaatacataagattacacaataaataaaaaactatctcacattctcaccacaagacccattgaagaagatgggtttggaaaaataataaataaaaaagagacaacaccttatgaagaaaaagcttttctatgattcaacatggagaagaagaagtatcactttaccgaaatcatcataaagggagccgcgtatggacgatcggttacaataaaaaaggaaaaccatccattttcagcttcgacatttacgattcattcagtttggtaataaggatgctagccaagaaacaaaaaacaaaagaaagagaaaagaaaacaaacccccgaagcacgtttgactaagtttgttcttgagaatatcactgtggagttagcttccaaacacgaacacaggcgtcctcgccagagctcatgacatggtggtcatcggtgaaaactaatccataaacaccgcccaagtgagcgccttttatggttgaacggcttgctggcggcttgttcacttcataaatgatgacacaagtgtcgagtgatccggtagcaaccatgctactgtctggagaccaagcaagacaatttatacgcgcggtgtggtataccatgttctttaattttatctgcaaaaattgtgtaaagaaaagcattaggtttcagaattctactatttgttcagacaacgaatatgtgtttggtgcagttaatatatatatatagatataaattagactaatttgaatttttgtctctcaaactttgacatgtaccaaattatgttccctgaactttttaggcctttaaaaattctttccccgaactattgagattgttaaatttaaggacttttatctaattttactaacaaaagtctaacgtgaatgaaaatataaggagcatgatttagtacgtgttaacggcctgaaaaaatatcaataccgcaaatatgcatcatgtaaaagtaaaagtacatggcaagagatagaaaagacaaggaaacacgttttccatctagagaaaacagaaacaatttgattacctcacgagaggaacgatcccaaacaacagcttcccggttcacatctgctgatgcaaacattgagacatcaggagagtaacgaataacagtaatagcgccacggtgtttctcaagggttgcctcttctgtaagtgtgtcgccagcaattgcgtatatacgaagtttaccatcctgaccaccaatgatggcttcacttccatcaggtgaaattgcagaagctgtcacagcaaatccaaggttaatagttgatacaatggttgttccccgaagcatgacaactccggaatcagttgcaaccaaagcaagctcgggagaaagaagagcaaggcttaaatctttcggttgactgccaacatcaactgaatttgcctctccacattgatcaccaagaacaggaactcgccatacctggttgtcaaatttaaaatcaaaagatcaagcaaatcaggatgaaattcatgagttatttctaaagtcgaataagttttagaaggtaatttctaaagtcaaatattttgtcataattacagatatggaattcctacatgcttaaacttagtaacaaaacctacacgtaaggtgcaagtagtaaaattcgttcatccaaaaagataagcaaaattaaggaacatgtaatgaaatcaagaagtgagcttaggtgttagtggtgttttcctttcgtgcgagctgtctgagctgtggggtctgtgaggggttagactatatacaatagagttatttcttggagaattggtaagttatgttctcagaaattgagtttaggcccttgggagagtgtccaagtctcacacattagttggagtgttttgtactaattttgatacagcccgtcaaactagtgtatcaactgttctcttgatcttagttcaagccactcgagaatagctcaggtggtaagacaggtgtttaattccctattgtaacataaaggtaatgctgggaagtataatagtctggattcgggttcattcatttaaggattaaattaagttttgaaatgaacatggctaattgctagtgacatcctataactttccaccgagtgatgaatcatgatgcataattgaactaactaggtaccttgttgtcaaaaccagaagtaataatctcctcctcaacagcagcaaaacatttgatttgagagttttccttcctctgtaactttccactatacccagtgcctggaatccattttactattagaccatcataactactggacagtataacttttggattgtttttcagaacagataatgatgtaatgttcttcatgtgcccagatagacacagaggggctttatcgatatcagttgctgagaatatgctaattgttcctccgagtgaaacaacaacgaggtgatcgttctgccataggcacccaactagcatgtcatctacaccacctgagccaggacaagttaatgttcttttcacttttccatttccatcctcagatacatcccataccttagcagatttatcagcagatgcagtcaaaacctgaaaaaacaataaggagattacatgaaatccatcagaaaaataggggaagaaagataaacagcttctataataaaaggaaaagaaaggaaacaaacacaactaataaagcaatagattccacataacaaattgaaaacatacttcattttcatgacaaataagtcttaaattccatcacccatgtatcaagtttataaggatatacaaaactcgctaggaagagctttcctattaaaaatgagatacataattaataataacaataaaaaagaatcgaatcaagtactagagagcttcaatgtaaacctgccaaactttctccataataatttggtcatacaactttctagcatttaaagagtttatttttattataaaattttcaccaaattctctaatttcatacgtttatgttgcaagtttcagtagtaaaaagctttgacacttttcgtaaagaattttggagtacaagagacactgtgattcttcaactgtgttaaatccaacactgtgcttacctgtttcccatcaggactccagctaacagcataaatgcttcctttatgtccatcttccgaggagagctctccaattttctctccggtctttccatcaaagagaatacctttcttgtcagagctcacactaatgaacttgctcccatctggagaatacctcaaacagttgacaaaattcgaatgatctctacgaccaaggaaatatttcatgttagttgctaggttagtgataaagaaacaaactcagatataaataatttaatatcacagtccaacagtcgctgggaggggaaaacaatattggaccaggtttgcagatatgagctgtggctgatctgatttcgacccggcctatgtatacagcctgtacattcagatcattatagcgcaagctttgatctgaactcataccatcttaatatgaaaatgatgggagagtttagttcatgcctcaaaataaaataaaaaagagccataaatttagttcaaactcatgaccaacacagtgaatggagttatgagaaaatataactagaaaactgcagaataggatagacatcaagcttgtcagcctgacatgaaaccattacaacaccgaagcttgtgagatttcatgactgaacattaagccagaagttttttttttttttttttttgagtgaaattaagccagaagtttgctgtactaacctgttagattgcttaaatttgaatggcggtccttcataaaagttaaccaaaaagtcctctccacatgtggcaatacggaatggccgtgttggcttaaatgcacagctcagaactctccttgaatggccatcaaactcacccacatttgttcctgaatcccacctattcaaaaacattataaattgccacaattatgcttgacctctagacaaagacaaaaatgtacatcagttatgagaaaagcacataacaaatatcaagcaataatattgaaaacatgagaccagtgtcctaatgatctatcacgaattccatgccctaggcttcacacttaatcatgaaaaatgactaatccactcacagttagcagaaatttcaaggagattactacataaaaaacagaaggaagtaatgaaatgtaggtcaataacaatgatgcactttcactctgttttatcattagggaagaaacaaactacttgcccatttcaacttgacatgacatggaataaatttactaggaaacccatcacacagaagtccatccaaattgtatataatgtacattcgaaatcttcccatgtcagtacgttagttcatcattgttttggggacataagccatttctatataatcacttttaatgaacatttgtaccaaatagaagtggctaggcaatctcaatgtcgtgatcaccatttccttttccatgataagagcctcaatagcatcagggaattatatatatat

SEQ ID NO: 37283 - DNA, 4205 bp, Cannabis sativa
atttctttgttttctaattttgttatgcggaagtaagttgcctccttcgagggtcttctatatttcctttataatgatgggaagtattattgttgagattgaaataatttatgtctaatagattttgatatcagattacattcctctttctttgtgtgataggcaggcaaatttggttttgaggaactagaatcaatttggttaggacactcagtgtgaaaaggtttaggaatattactttcttgtggaaccatttttcattcaagttcatgaggcccaagttcagcagaaggctgtagttcttgatgttttccttgtcactttgaatacagtaaatgttaattttacttggtatcttttagttctgtagtggagtttttgtaagaattttcattggggtgagtagttataaattttaaatatattatacaaatagatgtgaattggattagttacttttacaggtaaaagggcatgttgttccgcataagtggattgaattggatcgtgcaaattagtttggattgagtattgtgtgaacacccctaattttgagtggtaacttttagagaagatgggtttgagtatgaaaatgaagaagagaggtagtggtttaatacttgtgaggacatttgattaataagatatgtcgcagtttggatacttcttcctaaatttgcttgggaacataagtataaacagaagggcttgggctacttcaattcaaggtgccaatttttccattcggctatggggagtgcaatgacaaggaacttttgtgaataatgccactagaaattctccaaagatatgattaaaatattcatttccattttttttaacaatattcatttccattatcacaatgaaggacataaagtttggcattatggaatgaaaatctcttgaacagccttccactgtctttaagcgttgatattactaataataataaagattagtctggtggaatggtcactgctatggcttagataaagattgctttgatacaatgtggaaaaagatattataaatttataataattgatctttgacaggctttggtatcttgtattccaattacacacctatagataggccattctacaacacttctttttttttttttgttttttcgtttttggtagagtgtagagagaaaatagcaccgactaaaaatctaacccttgatttgaggaagcctacttagaaataggaaatataatattaaattacagagcatgtttggttatcttctttagtagatatttctgaatattagcaaaacacatcttattattttgtgacaattttttcatgcttattaatttttcttttaactatcctctcaggttgctgttatcccaaactgtagcattttggctactgttggccagaagatggcaagtactcctggtgttagtgctactcttttcaatgcactggccaaggttagaaagtgtgacttttgaaagctagtgtgaaaaattctttctaaatgggacgtttgacatacaagtaaaagttgtaacttgttagtttagaatacatcatgccgatctcagtttgaaatgaatatgtttggttatcatttacttccctagactagacaatttgatgcaactttgtgtttgattgcaggcaaatatcaatgttcgtgctatagctcaaggttgctctgagtacaatattactgttgtggtaaagcgagaagactgtatacgagccctaagagctgttcactctagattttatctatcacgaaccactatagcaatgggaattgttggtcctggattaattggtgccaccttacttgatcaactaagggaccaggtgctttctttagataggtcttttgtatttcattaccgttttcaatgatcaagtgttccaaagtagtgaagtttaaatgtgttctattgtattcttattcttcttatttattgcaggcagcaacactgaaggaagaatttaacattgatttacgtgttatgggtatcactggcacacgaactatgcttttgagtgattcgtaagttgagagtttcaatgaattttttatagctctaaaattctctgcaagcttattaaacaggacatgtttcctttcttttcttttgttggaaaatacacactcactaagttctcaatataagttgtcagttttcaatatacgaatgtaattgttcctcatgttctaccactatctccattttacaggggcattaacttatccagatggagagaacttcaaaagcagaaaggagaagttgcagacatggacaaatttgtccgccacgtacaagggaatcatttcattcccaatacggttttggtagactgtacggctgacactactattgcaggctattaccatgagtggttgcggaaaggaattcatgtagtcacccccaacaaaaaggcaaattcaggaccactagatcaggtaaatgtttaaaggcatttctgttcaattataagaagaaaaataattgttcttgtcaaatgatgtagaaaattgaacgtatattctcttaagtagatatttttctcacaaaatgtttgttaatcactcattctgagcttattttgtttttaattcccacaactagtatttgaagttgagagcccttcaacggcaatcctacactcattacttctatgaagcaacagttggagctggtctcccaattattagcacattacgaggtcttcttgagactggagataaaatattgcggattgagggcattttcaggtgttgaatgcttagacatacacaatttccttttgaattcctgacttccacaattcaaagcatataaactttgtgtgacatattctcgtctctttgattgtcgcagtgggactctaagttacatcttcaacaatttggttggtgaacgtactttcagcgaggttgtggctgaagcaaagcaggcaggttacactgagccagatcctagagacgacttatctggaactgatgtttgcagaaaggtactgatgattaaccctttgtttggtagggtcgattgaaggagggatggattaggttaggggtgtgtggaatggaataattcgtctttagttttatttgtttggtagaaaggaagagagacaaaggaaggaaatgactatggattgccaaccctttgggcccaccaaaaacaatccctctacatatgggtggagtggattgatgacacaaatttgttaattcagttttaaatattgtttttcttaaaaaaacaataaaaaaatagttctttctttccctcctactataacaaacaactctaagtatacatcaaatccatccattcctttcacttttccgcaccttatatacaacctatccttactattttcgatccatctttccaaacaaagtgtaaagtttccatgaaattatttgttgtagaagtagaagtatatttcaatctatggaaatattttgatgaatcctaagatcaacagatggtcaacttgtgattagtacactctaaaatgccacttgtggagagtaagattggataatttttatcatgtgattttgttatgaaatcggaggtgatattaaaaaaattaatcaatcctctagtattaatttatcatggcatgattttaggagtataattagtagtaattactaattacctttaaattttaattgggagaataattgtataattagtgtgggaaaacaatagaaaggtgaaccccaagggggggttagtggtaaggagtgttgggaagcgctggtaggcatttgttccgggttcaaactcaaaaactttggggccactaggccggttgaactgctagggccgaaaaatggaaagaaagaaaaaaataataatagaaaggtggcatcaaatgcacatagctatgtctttgttatatctgttacaacctccacttgaaaattgtatgcaaactgctcatgtttttgttgtttgtcatttcttttgtggtaagttctttcctaaaatgaatctgtatggcaggtgataattctggctagagaatctggtctgaagttggaactctctgatatcccagtggaaagcctcgtaccagaacccttaaatgtaagaactaatttttgttggtaattccagcattgacttaagtaccaagtttatacatgcaaatgcaacatgaaactttctgaaaattcattgcaggcttgtgcgtca

SEQ ID NO: 37284 - DNA, 3012 bp, Cannabis sativa
ataaatcacttcaaatttcttatattgataactaatccgattgtaaagagttttatttagggcataaaacccaacaggtaatacccgatttgttgccgatgttggtcttgcagaaaaactagcagatgctgaagccatctggtgctggtacagacccgaacaatcattagtttttgacatcagtggcaaatgcaagtttctagggactaatgaagcagatgtcagcgctgctggtgcaaatgagaaagacctactgttgtcaatgttaaccgcttctgaacaatttgaattagtttgattgtcattagaaatttggttggctgggaaattatgagtgtgttgttgattgttagatgattctccttaaagtagtttcctaggttgtggctggtttcggatagggaaggagggtatggtagttgtgataactttccttgccaactgagtaagtagtggccaagcattacctttggagaagtcagttcgatatctatcatatcctgatgttggaagagcagcccctttgatttcaggaccataagcaagttcaggatctaatccattgtccaaaagttcaagaaaaattgaacatttctggtaagggtggccaagacaaccacattccctacaccattcgggaagtctctcagaacgaaattcaacccaaaatttgtctttaccttgctgcaaccgaatgttcctaccccttctcaaaggtttggtaacatcaagtcttactcgaatacgtaagaatggtccccatccttcgttaagagaatccgtatagacctctgaaaattccccaataatgttacccaaggcctttgccaaacctctagtcttactaagaaaaggcagcctataaacttgtacccaaaaaggggagaatttgaggtttgagagtgttacattctgcagtgcggtaggcctatggagaactatatgatggttttggaaatgccatggctcttgagtaaggactctttctttatccccttcacagccgaaggagactatgaacaaagatggctctttctcaataattttggcatggaaacgaccatcccaatggttttcatttgcttctagagtgtggacaggtatacttgtttccgagtgagaacacgggccagaagtgagtgatcattggtgatttccaagtttggagattcttcttcatcaaaagcaaggactgattcttcttcatcttcaaggttgattactcccttcatcttactagttaaaggatccatggggaagcaaggaagataaacacaggattatgagaagagaacggttttaattggttataaagttgtagaaaaatgcaaatcaaaaagaaaaccataaaggaccattaactgcctcagagcaacaaacggcagacgctcttgttgtgtacagtgtacttaatctgtccaatatgtctttttgtaaatattgtatgtagtatcaaatatttttgaagaagtttttttttaaagaatttttaatgaggttaataaatgaataaatcattaatttattaataaatattatctgataatgtaagaataaattatgttcttaaattatgtactaatgaggcatctagtaaattgtaaacattgacgtatgtataaatcaatatatatatattctatacttttttttaaaaaaaaatgaaatagaaacttgattgaaatttagcatttagagtacaaaaggtctggtagatcaggcggaatattctgtatatgaatactacaaccagataaaaatcgagaatgcctagcaacatagtgggcaattcgattagctgatcgtctaataaaatgcaaagaaacatatgggagatttgaaagtaaaagtttacaatcattaacaaccagcccaaaaacagaggacacccgatgagaggcacgaatggcttgaacggtgagcatgttgtcggtttccatctccactttatcccaactcttatctttgagccaactaagagcctcctttaccccaatggcttcaacaacttcagcagcaaaagcgccatttttgcaaactgcaaccgggcctaccaaagtgccagaggagtctcgtgcgacaattccaaagccataagagccttcattttcaaatgaagcaccatcaacattaatcttgattgtattaggtacgggtttagtccattgctcagctttagagccattagtttcaagagccaatgagaataaattttgtttatcctaagctttgcgccattgatcaagtgtaactaatgctgatgaagcaacttgctgcggagtagaagtcttcttatcccaaacaagactgttgtgtgctttccagattgcccaacaaagcatgataatgcagcagctgtatcattattagaagttttaaacacattgtgaagccaagcaccaacaatggtattgccagtaatattgagggacggttgagcattcttccaacatgcctgagcaaaacagcaactgatgagagcatgagggatggattctagttgactcttgcatattggacaagccgaagagatgtctgcatacttagtgacaagctataaataggtgggaagggcattcgaaactgctctccatatgaaatttttgactttcggggggatcttaagttgccaaagtttgcgccaaaacctagaattgtcaacaccaggctgatgttgtgttgattactgcagtaggttgtatgcgcttttgactgagaaaatacaaatgctctcccttatccaagactaacaaccatcaccagctgaaaaacataagggtagcccgagaatcaaacatgcgtcacgcgaattgaacatgtcatggacaatctgatgatcctacgatatattattatgagtaaaaagagagttaaccattttgtgatgaagtctaggatgagtagtggtgacatacagattggagtggtcaggtaaccaaggatgagatagtatacttgtagtggtccccgtgttggaatatgttttaccagcatctagatttactaacaagt

SEQ ID NO: 37285 - DNA, 1689 bp, Cannabis sativa
atcccacttgaccttctccaggcggtgtgggattgcacaacttacccggtatttccccttacgaatcacgggactactgactagagattcgggagtaagaaaggttaaaatcgaaacggaccctatggctgctatgcttgcattccaggctagtgcagtacctcttagttggagtgtttttcctttattttctcagtgtcttaagctgtgtaaggagtttcaaaaagatgttgtagctcatattcctagagctaagaatcggttgctgatgccttagcttcttgggctagagtatcatttgctaattgtaagggtgttaagggaagtggccccctttgtggtcattagtttagtgtagttttctttcaataaaatttactattaaaaaaaaaaaactcaaagctcttaacctcacatctcttaataagtgtggaaagaaggtggtatggtgtggtgttggtgaaattaagtattctatggatgtataacgaatacacgtgtgacagatatttttggatcttgcatgaagaaattaagtattgtatggtgtataatgaatacacctctcacacatatttttggatcttgtaagaagaagataagtatattgtatggtgtataatgaatccacgtttgacacatacatattactggctttctaaaatacgagccatgttgtgccgaattataaaaaatatggatcgtgtcgtgtagtatcgggctgtgatgtgccgataattttataaggtaggcctgatacggcccataaaccaagtaatttctgttagagattttattacaatagaagaaaatcaaaatattacagctctattgtaatacaatacaaaatgtcgaatggaatgaaattaacaatcccagctcaatatataacataaaattacaagtaccaacatattgactgtaaataataatacaaatacttaaaataaaagtaaataagaaaggtaggaaatgaagatagtatactacaactcaaagtaacaagaaaataaagaacaaaaataacattaagaactatcttaatgaattactctcgtcaccttgcgagtgaaaagctagtaaggattaccaaagttttaacaatatattgctttaaccttttatctaatattttgggattatttggcttcataatttaaaaattatttttagttttcaaaaattaatagtgtgtttcaccaaaatttttaaaacaattttccaaaaataaagataagaaaaagataaaaaaaacagccaaaattaaaatgttgtttattctattttcaaaaacaatttttttttttttggtataacatatatatatatttatatactagaaaaaaattacgtgcaaagcacgtatacataattttatattaggtggtttataattaaattgaaatcatagaaatttagaaaataattccctaaaattcaatataaaaataaatcacttcaataatgagtattagcatagttcaaagaaaaaaaaaatactaaggcagatcatttcaaaagagagagatttactggaaggatttccaactactgaaatggtggcagaaaaagagtttgaagaattctgagtgatatctcattaatttaatgtattgattaactctatataaattgacactttatttctaaaatctaatcatttcgatcgctgcaacaaggaatactctt

SEQ ID NO: 37286 - DNA, 4277 bp, Cannabis sativa
  modified_base (1662)..(1678): a, c, t, g, unknown or other
  modified_base (1962)..(1986): a, c, t, g, unknown or other
gagggaccctcttttccaagtaatgaattaatctccattgttacagagttgaacaatatagcatggatgagaagtggtcttgagaatagtcgggctaggatgtctgatcacacaacaattgtagaaatctttcaagggtcaacctctactgcacaagttggaatgtccgaacggaacagaactaaggaccatttgcgctttgacgaaggacgtaacaaattgatgggcatgatgacagatgctttgtcatcccagatgcaaagttttgcaatgccagctgaagttgagggcttgagctaatacttttgacttgttctcatcctttcgagtttctaaaagccgaaagaaaggtatataattcactgagttgtcacagttattggttgataatacatgtttttttgttaaagggtttccatttggctgctaagaagaatcaaataagagtttgattatatttagacttggcatgccataggagtgaagcttattcatgaccattgtaaatggttatgcttttacctaattgaacttttattatacgtgtttctttaacactaagcttcaagctgtatatgtttttcttttatatgattttacgttatattaaagcttgtcttaaagatttgtcttgatcttaaagaagttccccaacagattacgattgaagctctccaaaattcaaatcctatgctatgcttggtatttattttacaatgaatacatacatacttatatatatgtacacgtaaagaatgcgtgcttgtttgtttggagagagaaagttaaaagaagttggtataatgagttttagatgttatgagagacaaggtgaaagtgagaaaattgagcaagaacattttgttattattaaagaacaagtttgaatacaatgaaagaagagattggagatggtattttatccaaccaaaattgagcaagaccatgagttaccttattagcagttctatagacatggtttacagaaactcctggaaagttggattaaatcagtatatgctgaaaatgaatgatctggattctttagcgcttgcgataccatgagagcatcaacttcgacttcatggacatggatatgggaacctttttgcagaagccatttcaaagatgcggaaaacgcttatggattgtttggtacaagcgctcgatttaaggatttttttcaatatcatacctaaaattgattttattttataaaaatatcttccataaatttatttgtataaataccgatgtgttgcgtgagcataaataccgaaatttaaaattattatcaaaaatggaaaaaacttgaaaattctggccttcaaaaattttagcgttttgtaagttttttcaaaacataaaaacaatcttttagttgcttttgatgttaataatatatcaattaattattttttattaaaaaaaattgtttcaagataatttttttttcatacacatttagttatttattttgattagataattttaaaactatgattttactttttaatttttaggctacattatatgttattttatttaccttttcttttttataattttaagctatattttgagttgtggaaaatatatttatatatatatatatatatttgtgatataaaaacgatgaagaagataaaagtaacatttctnnnnnnnnnnnnnnnnnttaacaaagaagtaactaaatattatatttgaacaaaacaagtataccatttaatattttgggttactacaataaatattataatatttcacatttgaaaattttctagtatctaaataaatttactttgaataagtaacactaacatattttatacagcagaaaaggcgtcatatttaaaaatttagtttcttataagttattttagaaattagttagtacttcaaaattcaattttgtagtaaagaaactattgaaccgtttattattattattattattannnnnnnnnnnnnnnnnnnnnnnnntattattattattaaaaaaatttacaccaaaaatacaaaatgcacactttattattaaaatatcacggttaaagcaacatttatactcatcatctttagtttattatattttcaccacatgcacacacaatacatgcagctgacatgtatttgattgatgtcttatatcaatctttcattacatcatttccctctatttttctcttctttttcttactatattccatttcttttcaaatttttttaaaaatcataacctccatagctggactcttctccctccacgatcccaactcgtttttcctcttctttcagttcttcaattttttttttcaactcacattaaccgattcacataaccgttttccctctttttctttttctcttaatccatttataaatatggatattactcgttcttcatccactctttcccttgtgccaaaaaaaagttctaaaatggggttgaaatctttagctaataggaacaagggcaaacgtcccgttattcaggaagatgactctgatttggctcctccgttctcgaaacgtgagcgagctcccccaaagaagaaatcaaaggttgctgcccatgaaaaaatttctcatgatcctgctcaaaaagaatgatctcttcgatctcaggtttgttttcggtttctttttagtttccccccatttttgaaatttttttgtattcgacttttgtgggttttgtgtttatcgatttcattattttaggtttttcattttagcaatttttttttttttttggtttttagggcttctgttttattaattttatttatgtgttattttttgggtttttaatatttcgtttttttagttataatttctgttacatattattgttttttttccatgtttttgtttttccaaatgtattattgttttcatttcagttcatttgatcagttttcattttttaattgtttttttcatagttttttttatatagttttaacaccttgctgtatgtgtttttttcgaaaatgttgttttctagttgttttctgtctatttttatatcatcaatgggtacaaattagaattatcatggatgttgatgttgaaggagatttttctgtatgttagtttgtttacaattgttttgtagttgtattatagttttgctacttgcatatgctatttcattatatttgctttctttgtaaaatgcaggattgggttaacaaattcagtcccaatgatttctacagatcgaagtgtgtatgtacaagtaatttctctgttattgataacattaagaattctttatctgtgaatttgttaacaatgtttcgagacacccagtttgggcactttttagatattcctgactttgtttttcacccccaagttgttcacaacctacttttgagggaggtttaccagcccaatcccaaagaattttgggctaaggttgctggttgttgtatacggttcagcatcgaggagtattacttgattattggtcttgattattttggggattgcaataaactgttattttcccaagaatcaaaccagttaattgtggtttgtttccctggcataaaaaccattgaccataaggctatagaggatgctttcttgggcagtaggtggcgacaagatgaatccctaggtttgaaactctctgtgttgtatttcatccaatgttttcttcttagcaatactctagataagaaagtttctaggtttgatttagatgtcgttgatagcagtcaatgggatgagtattgttggggtagggagtcgtttgagtgtactattgattcttttaaaggcagaatagagcatggtattaaaatagaaaataaagaggagaagggaggtcagtcctacgatggttggtacagagtgttgggctgtccttgggtgttcatagtttggttttatgaatgttgtcctgtgatggtaaagaccttttgcaaaagagttgcatccaggattccaagaatttgaaattggaccaatgatgttgggaccaaaaatccaacttttagagacttgaaaggcaagatttttgatttgccgttaaacaaggtgattttcaatttctttacttttttatctttgtttggtgccagtttattaatctttgttttttttatttttttttgtttcatgttttgttttttttgtttctgtttttcagttgaagattaagaacatttgtccatgttttgaccaagtgagtggctcaattttctaaaaggcagtttcctgaattactgaataacttcttattttggtgtgagccatca

SEQ ID NO: 37287 - DNA, 4542 bp, Cannabis sativa
  modified_base (76)..(80): a, c, t, g, unknown or other
ccaatgtaagatttctcatacttaatatgtgtttattttcatcgttttagagattcatatttaggatgttaaaaannnnnttgttagtaaatctaggtcctggttaaagatattccaacacaatgtactatacccatatctgctaccaacaacaacactaccaccacaatctctcagcctatacaacccacaaatgaccaacctcctttacctacatccaccgatatacctccataacctccacctatccccactgctccgtcccctcccatcccaactattgccataaataattcacccttatcttccacaccagctgttacttctcagccttccccaagtcaacaactgtcatctcttccctacccccaccacttgtaaataatcatcctatggtgactcaagttaaagcatgaacatacaaaaccacagtgcccatgctctcaaaagaaccccttactcttgcagctacattacttgattccaattggaatgctgcaatgaactatgaaatttgtgcactaattaaaaacaaaacctggatcttggttgctctgcctcttggaagaagagaaattagttgcaaatgggtctataaactaaaggaaaatttagatggttcgatttccaagtataacgcacgacttgttgctaagggattcttgcaacaatatagttttgacttcacagagacttttagtcatgtagtcaaaccaacaaccattagggtcatcctcacacttgctttttcacatggttgggaaataaggcaattggatgttaataatgcctttctcaatggggagcttactgaagcagtttatatgacccaaccccgtagttttgtggacaaaagcaatcctcatttagtgtgtcgacttaacaagactctttatggattaaaacaggccccaagggcctggtttgacaaactcaagactcctctttactcttttagtttcacttcagctagagttgatcaatccttgttcactcgactcactacctcacatactagttcattcttatctacgttgatgatatactcatcataggtagtactagtcaggttatatcgaccctggttcatgatctcaatgcctcttttgctctaaaagatataggtcccctagactccttggtattcatgtcacaaggttggatgatgctctacatctgtgccaaaccaaatacataatggatctcctggttcgaaccaagatggactgtgctaatcctctgcctactccaatgactggaggtgaaaaactctcagcctatggtagtgatcctttccaagatccacatcaatatcgaagtattgtaggggcattacaatatgttgtggtcaccaaacttgaaattacctattcagttaacaaggtatctcaatttatgcacgctaatcctctgcctactccaatgactggaggtgaaaaactctcagcctatggcagtgatcctttccaagatccacatcaatatcgaagtattgtaggggcattacaatatgttgtggtcaccaaaccagaaattacctattcagttaacaaggtatctcaatttatgcacaagcctttggaagctcactggaaagtggtcaagaaaattttgagatacctcaaagacaccctcgattatggtcttcacctgacaaagtgctctactctgtctttaacaggcttttgtgatgccgattgggcatgtgactctgatgatcggagatcaactttttctgcatattccttgacaacaatctcatttcctagagctctaaaaatcagaagactatctctcgatctagtaccgaggttgagtatcgtagccttgcgaatgccactgctgaagtggtttggcttcaatctttgttagcaaaagttggtctttcacatttgtctattcctacaattttgtgtgacaaccaaatcatgctccttatgtctgcaaatcatgttctgcataatcagaaaaaacacaatgagcttgacttatattttgttcgagaaagaatcatcaacaataagttttctatcaaacacacctctactcaagatcaacttgttgatatattgaccaaggctttttcgtctacttgatttgctcttctaagagacaaacagagcatggctttcttaaccaatctcagtttgagggaggatgttagttaggcatttctgtgcagttgttagttaggacaagttagttatttttgttctttagtacaactttctctataactaattctgttagtcttcttctctaacaacctaactatacgattgtatttatagagctttgatgctcacattttccatgaatgaataatatgcacactttcattctttctcattcttgttcttcctaacacattacagttttgttaattagtgccctaacagcttattatttaatctaattatatggatcccaagttgaaacttttcttctaatttgtaatttaggtttacattaagatagagataatattattatcaatttacacctttagatactatttaggctcacatttcaattatgcttgtatcgaatttgatttttttttaaatttttctttattaattatcttatacaatttctagaataaaaaacaaaaatgttggctgccgttttcctatatcgaatttgatatctttaattttcctttgttaattagtgtaaaacttaacaatagaaaaatagaatgtgtttgaaaatacagagcataagagagaagtagagcatttagagaaataagagaaatgccaaataaatttaacaattagttagccttcatcttatttatacttattgaacagtacataatagcaaaacagaaaaattaacagaaaatggaattgtaattgtaatagtgatagtgatagtaatgtaatgggataaaaattataataggaattgattgttatgtttgttttgttattggaataaattttggaataggtagtaaattgaaaaaattatctttactttagtaagaaaatgtataaaataaaggtaagatactcattttaagtaattgtaatgaggattcatgagatataggagtgtaatcatttttcatacaagtgatataatagtgattacaatagaatatcattacaagagtttaaaggcaaaccaaacattagaattgtaatcatgattctattacaatgataattacaacaaaccaaacatgtcattagtattattagcttacaaccccatcaaatgaaatggcgaaggggccatttgaagtttgcttttaaggtagttaaaatgattagtagtcaaaggcttggtaagtgcatcagcaattcgatctatggaaggaacataacgtaatgaaagttgtggagcaagaatttaatgacgaacaaaatgtagataaatctcaatgtgtttgcatctggcatgaaacactagaatggcagacaaagttgtggcactttgattgtcaatccattaaaccagtggttgaattagggaccgaaagttcattcaaaaggaaagtaatccaaagaagttcagcaagtacatttgctaaagactgaaatttgctttcagtgctgaaacaagtcacaacttgttattttttaacagaccaagagactctattattgcctaaaaacatcacatatctccatctagatcttctatcatcaatatagctggctcaatgccttgtagattcttagtgtttgatgcttggagcttcaaatcatcagagaaggtacccttgagatacctacgaaagcttttgcaagcctcccaatgtgttgtggttggagcatgaataaattgacttagtttattgataatgaaagcaacatcaggtctcgtgagactcaaacactgtaatgctcctaatgtgcttctgtaaagagtaacatcttcaaaaggttctccatctttcaaacttaatttggatgttgagctagtaggattaggacagctcttagctccttccacatgtagcttagtgagaaggttagtaatgtatttattttgactaaaatacattcatgtggcatcttcgtatacttccactcccaaaaaataatggataggatttcaaggagaatgctatgttcagtttatgtgtaaattgagcaataactgtagaactagaccctgttagaagtatgtcatcaacatacagcaacagataaactaatgagtcccctgtaccatgaatgaacaaagagatatcagacttggaagcttagaaacccaattgaaataatgtagttttgagcttttccttccaagccttgggttcctactttaatccatataaagccttgtgaagcaagcagacatgatttggtttatggcaattaataaaaccttcaggctgcttcatgtacacagtttcttgtaaaatttcattaaaaataggttaaattgtatatctggccagttatttgaatatatacagaagcatatagtagaataaacaattaaaaatcaattacatttatgtttaatattagggaaattatagtaaatgaccccaaatcataggagtatgttagtttatgt

SEQ ID NO: 37288 - DNA, 2719 bp, Cannabis sativa
tatgtatgtatgtatatatgtatttctatttgctttattataaaaaaaaaaaaaaaaatgtttcttttctctctttctttctttttatcaaaataaataaatatttaaaattggcccctcattttctacaagtgttacactttgacccttccctaattttttttattattattattttgatagaacggccctccccctaatttacatttcaacattatacctcaaatttagaattattaaccttaaaaaggaaacattggaattattgcagattaaactatcccactaaaataataatgttagtaattttattctttttcaaaggtaaatatataacctaatattttttttttcctagacaatggaattgagttatgttctctctcccacaacctccatagtctcatgcaagtattctcaacttcaagtaattaaatatagtattgttataagaatattgtggtataattttcctaaatgaaaagatctccaaaataaatctcgtgaaaagctagaagtcatttgaaaaagaattttggaagtctagcatgtccactctaaaagtagtctttaaggaagctagtcattctctaaaaaggagtttcagaatactagttgttccctccaagaagggattccagatagtctgctccaactagctttgtatctatttggaacatcctcccaggaacacatttcatttatttgggacattcctctaggaagtgtgcttctcatccagagagctctcgcaagagctgacgtagagatcttattacaaagagtttgttaagtctgttaagccgtaactgacttaacaacttagttattgcaaccactgactttgagattcatttcctagatctataaatactgtcatcctcatcattagaagaataacacataagatgattttaagagcagaggtcgagggtgagattgagaggaagagagagagagagatacaatgaaaagagagatattaggttttgagatttgtatgaagaagtttcttgagtaaaagtatgagagataaacattttgagagaatcgatctcgattataatgtgtcattgttcttgcttaatcaataaaggcattacaatagtgttctaaaactgaattatagtcataaatcacatcaatctatagaatttgaattagtatatatcagggtgttaattttactattttcttgctttaattgtttctagttttaattactctgttctactttgatttatctccaattttagttgtgtttttgttaattttgttattgttaattgtttattaatttattttaagtttaaattaattctacatattaattgtaatttatttatggtgtccatcaccattttataatataatgtaatctaatttggcaacttaataatttcaatattattttggcagggaaatactttatttcataaagcaaaacgatagtctaataaaatagataaaatctcaataggaacatcactctttttcaacataatttagaaaagaacaaaaaaaaattgagcaaaactataagtcacattgttatatctagaagcaatcttttacaatcattaactaccaaacaaaaaacataagttaaagaagatgattgcaatttgcgaatgccaaatagcttgaaatgctactaaacaatctggctcaaaaaccacattcaaccagttcaaaacctccatgatgtcgatcacgtctataagatcaggatccaacatcccatcctgacagcaaaacgagccataagtacatggccatgatgatctcttgttgaaactttagtgaaattttacaaaacttttgtaagtgaagtgtgtgaatgtattgagtctcttatgaaataaaaatactttattagaagtgtatataatgtgtaaatttagcacatagattggagccctaaagggtatctagttttatgtgtgtgggacgtgaggactcacactgaaccaccatacatgtgtgcgctgtcgtcgctcgttcatgccaagttgagttagtgggtgtggtgtcactttattttttttaaaaaaaaatatttattaaattattattttttatttgattaattaaaaacaatttttaaacgtgtttaattaattagtaaacggaaacgtttactcgtcttgatttttagcattgttttcacgatctcatgttctaacgtttttatgatcggaaacgtctttcttttcgttactaccttctgtgcattccttatataatgcatcagaaccaacgggaaaaatatatttttttctcacagaaaaaataatatacaattatattacaaatgtattccgaatagtagtacgattatattgggtgtggtatttcagcggttctctatcgtacaataaagctctgatactgtgtttcgattgggatattttatcctgggactgacgagtctgatagtctacttgcacagttccgaacaacaaaatttttttaaaaaataacttaatttgcaactcaactcaaaatttaattcaataaataaataatattcaattaatttatgatattatttttaacaataaatctaaactaacttaaaatttatttacgaatattttaattactctttaatattttttaagatacaattgtttcttgtaaggattttgtatttaaattaaaggctaattaggatttttgccctctgaactttgacatataccaaatcatgctccct

SEQ ID NO: 37289 - DNA, 2834 bp, Cannabis sativa
  modified_base (2011)..(2019): a, c, t, g, unknown or other
  modified_base (2381)..(2387): a, c, t, g, unknown or other
tacttttttattttgagattttcagccaatcacatattcaattttttaaaactcaaaaacattaaatcacactaaaaccaatcacatatttaaaaacaaattttcacttacaacatttaaatttttgttttcaaaacacatttttaaaaaacacaatttttaaatcacaatttcgaaataaattttaaaaagaaatacaaaagtcacttttaatattcttggtatgtgaaagatttttccacagccatctttcaatcaatatctttgatttttctttttttttttgtgttacctaaaagaatattaattaaacaaatatatttttattttatttctaaattcacatatttttttaccaaaaaaaaataaagaaggacaacttgctttcctcctcttgtaccttttcttatttttctttctttttattttttctttttactattaaaattattttccatgatcaaagaataaaaaatatttgatttaggtctatgtagttagatgatgtgtcttcttaattagaagtttcaaaaaaatatatattgtccatgaaaaagacatgaataaaaatatattatacttacaaattgataaattttattttttattttttaagaaaaaaccttaaatgttttaagaattataattcaaaacctcgtgatgcgaattatattttctcaaactttaagctaagtaagacaatacttagttgttattatttggcacacacatgaataatggcgtaaacttgaagccctttcatgaattaaaaaaaagcttttgaggctctcttaattttagggttaggcttaattatggagaaatatataccgagataggtttggactaaatttcacaaaagagtaccactattagaaatgttagatttttaatatttcgataaaaataattgttagtgcttgaaaactaggtttcctctcaatgttaccaataaaaaagtgatggatagcagtcttggtttcctccttgtgaaattttacaatttttcgagatgtgtagggtgagattttaaaagaacactaacgagtgtaagagtaaggaaaaacttgttaaaatttaccatgaaaagaagaaaattttcaatttttcaattaggggccattttcaccagatttcatgtgaatcaatcttcatattcacgtcttagtattacgaattcattgtaactagtgggaaaaaaatatttcgagattggtttgggccacatttcacaaagggtccgggacaccatcagaaatgtgagattttcactatttcgatgaaaataattgttagtgtttgaaaactaggtttcctctcaacatttccgatagaaaagtgatagaaaacgacattggcttcctccctgtgaaatatcatgatttttgagatgtgtagggtgagattttaagagaatactaatgagtgtaagagtaaggaaaaaactagttaaaatttaccctaaaaaaagaacatttttcaatttttgaattaagggtcattttaaccaaatttaacatgaaattaatcttcgtactcacgtcttagtagtacaaatttattgtgactagtagggaaaactatttagagaagggtccgggccacatttcacaaaggggtaccactattaaaaatgtgatatttttactattttggtaaaaatgattgttagtgcttgaaaactaggtttcctctcaacgtgtccaatagaaaagtgatggacacggtcttggcttcattcctgtgaaatttcacgattgtttgagatgcgtagggtgagattttaagagaaactaacaagtgtaaaagaaaagaaaaaacttgtttaaatacaccctaaaaaaaagaacatttttaatttttcaattaggggccattttcaccaaatttaacgtgaaatcaatcttcttattcatgtatgagtaatacgaattcattgtgactagtgaaaaaaaaatattccgagatgggtctaggctacattttacaaaggggtaccactataagaaannnnnnnnnttcactatttcaattaaaatgattgttagtgcatgaaaactactttttctctcaatgcgtccaatagaaaagtgatgcacaacgatctttgcttcgtccccacgaaatttcacgatttttagagatgtgtaggatgagattttaacataacactaacgagtgtaaaaaaaaaagaaaaaacttttaaaatttaacttgaaaaagaaaaacattttcaatttttgaatttgcgagctattttaaccaaatttattacaaaaataatctttatattcacatcttagtaccacgaattcaatatgtgactaatggctaaaaatattccgtgatgcgttcatgccacctttcacaaaggggtaccnnnnnnngaaatgttagattttcactattttcgattaaaatgattgttagtgcatgaaaactactttttctctcaacaagtccaatagaacagtaatgcacaacggtcttggcttcaaccacgtgaaatttcacgatatttggagatttgttgggtgagattttaacagaacactaacgagtgtaagagtaaggaaaaaacttgttcaaatttaccttgaaaagaatgatattttaaaattttgaattagggggtcattttaaccaaatttaacgcaaaattaatcttcatattcacggttaggagtacgaattcattgtgactagtggtaaaaaatattccaagatatgtccaggtcacatttcacaaaaggggtaccactatcagaaatgtgagactttcactattttgatttaaatgattgttagtgcatgaaaattactttttctctcaa

SEQ ID NO: 37290 - DNA, 3692 bp, Cannabis sativa
  modified_base (50)..(57): a, c, t, g, unknown or other
aaattttaatataattttattaaacaattattattaattaaaatacacannnnnnnntttatagataatttaaaatattttttatatctaccgccaatcgcgaaatgtttactagttagtaaataatagtaaatcaaatcatattacaattagacaggacaaatagttattttacttagaataagttaatttatactatactatgtctttgtttaattatttaaatataattgatagaaagtaaaatgaataataataactataagattttaatgagagatttcctattacaaatatgtagtttattttttgtctcgcacaataacgtgagcattcattgatttttaattttttttaatatagattagctaggttcaatgtaagacttacccctcatttgtcagtaatccactttatggtacgacaggataaaatcacgaatattgactatgatcagttggtgcagaaagcaattaattactaattatttatcaactgaatttttaaccacttaatgcctttcaatatataaatttatatatatatatatatatataatacagaaacgacaagtagtgttaatcacaagtgtgaaaaattcttccatcgtgcgagctatatataaatatatattatacaaatatttttatatgaggactacccaataaatatttatataatatattatatatttcaaattctgtcttttctccgccataaaaataaataggaatggctttcggtgaaatggacaattttacaagaaagtagtatgagtacataaatggcttttatggaaaagacaactttttttttgataggaaaactaaatttattgaaaaaaacaagaaaaactacatggttgccacaaggggaacaacctcccttaaaatagtcctcttacaacagcgaaaaactctagcaaaatgggccaaaccatccgccaaagagttttcactacgaggaacaaaccgaaccgaacacaaactaaactttggaattaaggataaacattcataaaaaacaggaaaagacccccacataaacggcaaatctttgttgcgtaaagctttaactgctacagcagagtcagactcaattaaaattgtctcgaaaccttcctgaagcgcaaatcgtaaggcttgaagtatagcatccaattccgcttctagcactgaccttccctctgaataactcagcaacacatttgcaaactcctccccaattccacattgcagaacccccgtgcctacttccccatctttaaccgaagcatcaactttaaagtggccatcccactcaaagtgattcaaatcacccctttcttccagaactgagttttccgaaaccacagagtgatctttgacacgcacgttcttaaactcctgagcacgcttcagaatcctgcaacaaatttccaaaacatttggcttgtggcccttgactctgaattcatttctgctgtgccaaattacctcaacaagagaggcagtatagaacatcagcatctcatcttgcctattaaaaagccacatcaggaactcctccatattcgaagcttgcacagtatctacccttaacccccaggggctgctgaaccagatgcttctagtaaagttacaatctttgaacatatggataatagtctctgtctcttggccacagaaccagcaaattccatccacttctgaccttaagccccgccactgaacaggcaaacaaccagaaatacatttccataacagtaaggcttgtctcgggtgaaagtgcgctttccaaaggtctttccatatctgtttctcaggatgtattcgctccttttgagtccaccagtaggcacttttaacagaaaaacgaccatttttactgcctctccaaaaaagaatatcatccctatcctgtaaaggcttaatccgaagaatggcatttgccaccggttgagtaaaacactggtttatgacattttcatcccaaatacaagaatttggcatgaataagtcagcaactactgagaaagagtgtgtaagggcgtaagtgaagctatccctaacaacttcaggactaaaaccaggaacccaaggtgtcaaccacatatcagaattaccccttcccactatcaaaccagcacccgaaactaccacatcacgaccattaagcatccccttccataccatagagtctccccgtttcgcttccacattccagaaactcaaaattttgcagtatttatctcttagaatattaacccaaggcctatctgcattattcaacatatgccaagcaagtttagacagtagagctaagtttatgtccttgaagcgacgaagtccgagtccaccattacgctttggctgacagatctcgctccaactctttggagcaaaatagcgatttgagtccacagttgagccacctcctttccaccaaaaccttgcaacgatgctgtccaattcagaacaaacactcagagggactcttgaagtagccatagagtacgttgtgataccatgaagaaccgaactaataagagtgagccggcctgcttgagacagtaattttgttttccatccttctaacctccccaagatttttgctttgaggaaggaaaaatcctctcttttacgggcagaagtaaaaaaaggattacccaaatatttctcagttctagataaactgcccatacccaaagtcgagaaaattctattcttcatatccagagacgacttcggtgaaaaaacaattccactttttgccttgtttaccatttgaccagaccacctttcatatttctccacacaggtcttgaaagcaattgcttcttcctcatttgccttgcaaaaaaagacggcatcatccgcgtagaaaatgtgtgaaatgggcattgactgcttcccaatcctgagtcccgtcaattcacctctgttttcagcttgcaaaatcagtttcgaaagcacttcactacatagaatgaaaagatatggggatagcgggtccccctgtcttaaaccacggcctggtttgaaaggttttaacggggcaccattcaacaaaactgaaaactgaattgtagttatgcattgcataattagattgcaaaagtgattgcaaaaaccattcgcctccaacacttttcggacaaagctccattccagtcgatcatatgccttattcatgtcagttttaatcgccataaatccaccccttcctttcttttttttcaaggcatgtaaagcttcagaagctagaaccgaacattccgcaatccaccggttttaatttcctcattccgttagatgcttctcctcttataataggaaaactaaccatgcataattcttttattttttattttttattttttaattttaaattaatttaaacagataagaatgatcatataaatattacagtactactactgaaattttaaagcaaatccttgataatatctctctgttttgacctatatatgtacatgtctaaatgtaattcttatcaattaaactttaatatttgtttgtttacactataattttttttttaattttagtgataattttttagtcgtaacataatttttttgttactaaatatgatttttatttataataaaaaattatttgtgactaaaacataacatttagatataaattattactaatttaattagttttagtcacaacaagtattgt

SEQ ID NO: 37291 - DNA, 6412 bp, Cannabis sativa
tccaggaagcagctagagtgacatactcgtgtataagagccattagtccgtgggtgtaaagtgcccaatagaagcttgaagcggggacgttatatttgtaatgtctgaactattaccaaactatttatctcaagttgatcatcagtccaaccttttcttttaatctaacataaggcttccttaatcccaaagactccagccactataacattcacacacccttgtgtactaattgaaaaagcttataaaagtctccctgagctattctgagtcacacagcgacccgcaccaaaccaacgacgatctagttcaaatatagcactatcaaccttcaccttaatcgcattcaaaactggttttatccaatgctcacaaccatccgagaggaataagcaaagataattgttttttagtttgagcaacatgccattgattaagaacaacacttgctgaaagtaccacatcactcgcagaagaagatttttgttccataccagctcatttccaactttccaaacatcccacataaccatcgcaacttcctctcgtagcctactagaataacgctacaataaactagaaaaccagctgcaaaaataatcaaccaccacactcttagtgctcaacccaattcggttccaacatgccctcacaaaactacattgaaccaataaatgaaaaatagactcctcctcttgatgacgcatcgagtaaagaagatcaattggaacatgcttcgacaccaaatgaactttggttggtaaacaacctgagagagcatgccaaagaaagtgatgcaccttcggtggaatagaaagtttccaagcaatcttccaaagaaaagtgttggtatcactccctgttaaagtctcacgcgaatgaagaatttgtaagcatccttgacaacataataccagtaacactttgaaaccaataacaatggttggtcaaagcagattgtgaaatttggattttaaaaattatctcgcgatccctaacattaaagagatcagaaatagtttcattatcccaatccctaccaccaatcacaattagactattacaatcttccaaacctatcaatggtgaagtaataaaaggatcatccaagtcaggaaatcggggatcatgaagaacattaatagaacaatcaagcccaacattccgtctgacacctaatttaataaggctttgagtttcaaaaatactcatccatatgaaactagattatcattaagagaagctgttaaaaaagaacctgttggataataccttgctttatacagttgaccaatcaaagaagaatcattcaccaccaaacgccaagcttgctttcctaacatagagagattaaaatctcttaaattatgaaaaccaagaccaccatgatacttatgacaacacaattgtttccaactcacccaacttacccctcttgtctgagaaaaacttgaactccaccaatatttgattatcatttcctccaacttattacacatatcaataggtagtaataaaactgacataacaaacgtaggtaaagcctgagcaactaccttcaacaagacttccttcctagtcttggataaaaatcttccatcgcaactttggattttaattgcattttatctttcagaaccccaaaataacattcttattacgccccatagtacacgacaatcacaaatacaaactgtttgcaggagcttccatcatgcttaataagctacacattctatcctttacattctgagaagtattcacactaaagaaaataatagacttggcaaaattaacttgctaacctaaatcatgctcaaaaacttgaaggagccgaaccacatttgaagtcttcctctcgttcgctttacaataaatgtaactatcatcagcaaataacatgtgagaaatcatagaggcaccattacaaacacaacaaccatgcacatctcctcaagcctcaaacttctttatgagagaagcgaaaacttcagcacatatgagaaacaaataaggagacaaaaggtccccttgacaaatacctctagcaggatcaatagagtccgattctcaacctccacaagtaaccgtgtagctaaccatagaaatgcactgataaattaaatccaccaaacgcctatggaagcccatttaaagcatcataacacacacaaaaggccactatacgatcataagccttattcatataaagtttcaaggccatatatcctttcttaccaactcattttctttttcaaataatgcattatttaaaaaaaatattgtcataaattcattttccaaaaataaaagtaatttgattctcaaaaataacaatcacaagaacacctttcaaactttcaaacgattggccaaaaccttagaacacaccacatctttacaaagagctataggtcttaaatcctccatattagtcaaattcttcttttaagaattaaaacaatatttgtgtgatttaggttgttgaacatgattcaattattaattgcttttaagaaaatgaaattagagtagtttttttagagtagttaaatattactcattcaccatttgactactagccctaaattcttcaaccaaataataataataaattctcagcaaaataataataataataataaataaataaagtctcgaaatttgtctgagtgtatcatcaccgggtggctggaggactataaaggttgaaactttgtcctattttctctggttttcttggcaaccaaacagctttctactcccaaaacaagaaggaaactttactacgcaaatgacttccctctacgtttctctcaaaaccccaccttttcagccgaacgatatccgccgccgccagcgcgaatcggcggcggcggcatttggaatcaatggccgctggagagctccgacggtttgcatgagcttgagagtggaggcgccggagaatgcgacgaaatccgatggtgttgttttgaagagcaaggaggttatggagacggacgcgcgtgtgatagttggaacgtacgcgcggtcgccggtggttctggagagtgggaaagggtgtaaattgtacgatgttgaagggaaagagtatttggatatgagttctgggattgctgttaatgctcttggccatggcgatgaagattggctcaaggctgtggttgatcaagctggaacccttactcatgtcagcaatctttactattccattcctcaggtttgtgaattttcttcattgctatttcttgttttggtttctgagtaaagctttaattgttgattttcttttacttgtttggcaacctggaaaatctaagcatttccctcataagattgagcttgatggcttatgggttttttattgctgtattgaggaaagaactttactaataaaaacacaatacaaatgtgaaagattacaacctgaaatgtatgctaattttgaagttttttcctttttctcaattacttgaagaacatggaaacagattcagggtgtttggaaagccacattgtaaatagaattgagtttaattcgaagtaattacaaggtttgagtgtgtgtaattacaaaatattactatgtttagatttttctatctaattactatgtgattactacttattatccaaacacaacttatatcttaaagtacaatctaattactaaactatgtaataattattgtaactcaggacaaatttgagtaaattgatctcagcagttttttttgagtagtggattctgttttattttgttttgttatttaggcattgatattggaagactaccaacattttgatttttttttcttgtgtgaagtgttatgattaaatgtgtttaatccatccaaatcaaatcactcttaaggcccttatgaagtttttttttttgacattgaggcaggtagagcttgcaaagcgcctagtggattcttcttttgctgatcgcgtgttcttctcaaactctggaacagaagcaaatgaagcggccattaaatttgcgaggaagtttcaacgacactcaaatcctgattcgaaagagccagccacagagttcatctctttcaccaactgttttcatggaagaacaatgggtgctcttgctttaacaagcaaagagcactacagaacaccttttcaacctgtcatgccgggagtgacatttgccgagtatggaaacatacaagctacgaaagatttgatcaagcctgggaaaactgctgcagtttttgttgaaccaattcaaggtgaaggaggcatttatagtgccactaaggagttcttgcaatttttacgccaggcttgtgatgatgccggtgctcttctgatctttgatgaggtaatcactatacaattatggtacggttgggaggaatgaaaacacatgaataagaatagaataaaataaaatttaaaatacataaaaaaattattaagcataggaatggcctttacttctatttcaaaatagaatagtctttccaccaaaacgatgaaaaactcattctattggaatgatatctcaatacaaatagtactacatccttatcgtgaaatattgattgcttgttgaaccctgtaaatatgaattatgtgaaagcaagatactccaaatttgggagtcttccattccattacctctaaccaaaggcaaccttaaatcttctaattgcttccaaattacatttttgaaaggtcatctgtacaacatcatatattatagtttctatagtacactatgctacttgtggtagaaatcttcaaattttctttctataatatacaaatacaacattatagttactgcttgttttgaaagcattggtacttgtagttgctatgttatgattgaaatttttgcttcatttgttagatccaatgtggtttaggcagaactggatatctctgggcccatgaagcttatggtgtgttcccagatataatgacactggccaagcctctagccggtggcctacccattggagctgtactcttgaccgaaagagttgcttctgcgatggcttatggtgaccacggaagcacttttgctggttcacctcttgtatgcaaagctgctcttgctgttctcaataagatctcaaatcctaatttcttgaacagtgtctctaaaaaaggtctatacttgaaagacatattagaacagaaactgggaaagaattcacatgtgaaggaaattcgagggtctggattaatcgttggaattgagttggatgtatcagcaacacccttggtcgatgcctgtcgagactcggggcttctgatattaactgctgggaaaggtaatgtggtgaggcttgtgccgccgttgatcataaccgagcaggaacttgatcgtgcagtcgagattatgtgccaaactttgcctgctcttgatgttaatgtttcaagttaggagaacaaactgcaattgttgaaatcattttccaaagttggttgttgtgtttcatatgaagaaaaacaatggggacttgccccaccctcaaatgtagttcaggctatggtagtgttggtttgtgaggtacagcgaattctgtaatttaatttagtttagtggcttaacactttcatgaaagttaataatgttattgtttagttaaataaactgtcattaagttatttgttttgaggaaattgcaaaaaggttatttatttattttttttggctaaaatacataaaataatgtcatcaccaagtaaaacaacaccattttggtgcctttgagaggtaacaacttaccagatattcaacagaaaaaaaaaaaaaatacacaaaatatcatttttttgtctaattgtaacatttctacagttaaaaccaaaattttacatttttataaatctttttctcttttttactgttttaaatttcacttttaattctaaagtgtcacataaaatcagcataaaaatacaataaaataacataaaaatatagtaaaacaatatgaaatcaagataaaaatgtagttttattttagacataacatagtgttttacacttttcctcacataaagtaatatttatttttcaatggaaattggcagagtgattatctctaaatgttcatttttgcaacaatttttcagaagttcatatattttttttttctcattttttgctgaactagtttagggaatatcttagtcaacaacaaattcagattttttttgtttttttttttaaaaaaacaaattcagatcaattactgtttacaatttagcttttttttttttcattctaatttttaactccataattataaatatgaattgtaataagaaagagaaagagaaaactatgatctcaatctcatgtaaaaggttgtagttggatcgaagaagtaatcacatgttgttgccacctactttttttttttttttt

SEQ ID NO: 37292 - DNA, 5872 bp, Cannabis sativa
atagaaacccctattacaactagcactgcaaccactttaaaaactcaaaccgtaaatttgaaaaaaataatatatgaagtaattcccctctacattattacacttaatatcgttattttaaaattaaataaaataataaaaaataaaaatagaatattaaaaaaataaaaatatattataatttgaaaatattttttataatttttaaataaaaaaataccaatataaacgtctcacgtctacaaaatatacacataatccatccatattaacaattaactgtaaaaaataaatatcaccttatatttactaagaattgtagtttgaaaagttttagcaccaaaatttaaacttgaaattgagagtttaaccgccaaaaaaaacacttttttaaaaaaaaaaaaacaaaaatccccaactttttttttttttttgagatgaatccccaacttttggagggattgaaatttgtacttttttggaggtctctatctctcctctcccttcctcattccctccacctttctctgccctctacaaaacatagtgtaaagaaagcaacaaatatttgccttgaatcatgtaattaattcacaatttaaagaggagcacacaaattcgggggaaaaattacatctaagttttagatggatattaaaaatttgaagtgaaaaagaatatatgagtttataacaagccaaacaaagaaaaatcctaaaacaattcagaagataaagaaaaactcaggtcataatagacacattacgatctactgtgtgcgagatctgctgctttctgcattcctaatgggcaagaagtaaggatgtgcctgcatggcagaaacgtcatgtcaacaaacacttcactttaaataataatgaggcaacaatgatgattaacaataaaacattttaatcccagattatatcttgggggaatacaattcatgagagactatatttcatcattggagggtagtatgctacatggacataaagttagaaaaacaccattgaaaagacaaaaagtggtctactcagtcatctccagctaaagggctattttagatagagagtaatgaaaattggtgggatacctattttggtaaattttcactcttttacaaaaatcccattcacttttctctcccattttggaggagaatctttttgatggacctacctacattttctctccccttcttccttaacaaatgactccaaattttgcttctatccattttttctaaattttctttcgttcacttttatcctctaccaaacatagccaaagaattactgcttatttccgaattccgaaaggccagtacggcagtacctatagagctgaatatacaaacagcataaaaccaataatgacaaggcaggctccagatgaccattgagctcaaaccatgtgaattgtaatcaaccacaacatgcttgtttggggcatctgatctggtaatagaaaaaaagaactggaccatcttttttagacatctatttaaagaataaagaaacataccattgcttcttttgcagttggcctctcctggtgatcatatcgtagaaggctgtctacaaagtcaattgccttcaaaaacaaaccacaggaaatgaatccataaattctgaaagctgactaacaaaggattatatttaaattaactcgtaagtgtttacctcaggtactgctaaatggtgattatcagcattcataaactttgtccaagatttccgactatgcctgtacaaatgtaaaagttgggtaaattatagttcaagataattagaacaatcctctggatgaggaaattgataaaatgatacaaataatatataataatattaaccttccaacaagagctgcaaggtgtgggtccaactctatgcgatacttcgtcagataagcatttaattcatcagttcccagtacctgttgcaagaaaatgtaaaagaaagaccttaactttcatcctgttcagaaagataatgaaattttcagcatttagctgccaacaaatgaacctcaatttctttttaaagagtgttatgacgtcacatataataaaatatgaaggatacaaatttagaaataacatgtttgattaaaaataaaaatgtgggtcataaagaggaattgtatgacaaaatagaatggtatctgaaaaacatacctttgctattttgacaagctgatcatagttatcatgcccatagaagaacggttccttacgaaatatctgcacgggtacaatttcttaagaataagcatcacacaccttgacaaaatatcaattttgaactgcctacccatctgtcatccatgggtgagtaggcatgcagatcaaattaactaactaaagcagccgtcaaatgagacaataaatcttagctaatatattagtactaacgtttcccaaggcattgtagcagaccactcaaggtggtaggcaaccaacatatattactctaactatacagaacaaaattacataaaaatgcttaccatgccggcaaacatacaaccaagactccacatgtctagagagtagtcataatcttgtaaatcaacgagaagctcaggtcctttaaaatatctgcaaagcacatatgtgtaaggaaagaaaatcacaggacaaatattacttgcggataaagtaaaatcatgcatacaaaaggaaaaactgttgacatgccataaagtaagccaaacatgaatcaactgaatttcacagagaacatcagtagttaataatgcactgcatggtctaccatttctcattctaaaactaatttaatgcatacaaccttgaagcaacgcgaacattatattctttcccgggatgatagaactctgcaaggccccaatctatgagacgaagcttacgctgctcgtgatcaatcattacattgtgtggcttcacatctcgatgcataataccttgcgagtggcaataatccaaagcctacatgaagcaagtcacaaagatcaagttgaagatcactagatatgtaatgcaaacccaattgtccgttaactttgatgataatgacaaagtttatactcattcttgagttgattgtgggtcagcaataaggcaacagctataaataagatatggacatcaaaccaggtgtcagggaaaatgcgagcaaatatatgtatactgtatttgaatacttgacaactcacacatcagaacacaacattacatccttcaatatattaattagtaatataaaacctacttacacaagacaagataaacaatgattaaacatgcaaaggaatgtagcacattaatgtctgtttgagtgaacaaaagccttaccttcaagagttcatatatatagtaacgaatatcaaaatctgaaagtgttggataaagcactttaaaatctgtattattcacatgttcaaatattaagctcggagtctttgattgttggtctctaacaatatcaagcagcttcacaatatttggccctccacagagattctgtagtatcttgatctccctcttaatctgcatttagatggtagaaaacagtaataaaggagttctatcaacaaacaaaattttaagatacagaaggaaaaagaacagtttcactgtttcatacaaagaccattgcaataatgacaagaagtattggaagtctgagattcttagcttcagcatatcacataatcccctcaaataaacaaacaacctatttactgattgtgaattgttaaaacagatcctttaatttattatttatttctattatttgagcaaaggccaagtcatgcagtgaaacctcaataagcatctactttctagttgttttacgagatcaaattcattcatttaaaagcattcagttgtccatatctactgtactaaattgtttctccaataaactagaggagttgttttcttctacataagaaattaaacttgtactaataggaagaattacaagtttgaagtggacaagtaacccacacaagaaaaataggagtctaatccctaacagatcaaatcaaaatacataaaacctttattattatttacatcaaacaaacagcacccaaaatttaattctattacatatgcagtccacatcattgtctttactattctaaaaagcttatcttgttgtttttgtagcggacccaacaggttgccaaaacagccaccttgctcagagtaagctatttttccaaaatagaattacgtgtatgcgatagtatcaatcaataaaagggaaatgcaaggcaagatctcaccttcttctttttcacaggtttgagaatcttaattacacatttctcgttatcagtacagtgaaccccctcaaaaacttcactgtactttcccctcccgaccttcctgaccacctcataatcatcttgctccctgcataatcacacaacgacaaacaataaatttaagtttccgtaccatcattttcagtatactttttttttttagttcaaacaaaaccggaaaaaaaaaactcaaaagattccgactttccctcactttctcaacatccaaataccaacagaaatcaagaaaccttcaaaaaaggtaaggcatatattttcattcacttacccccactgaacggttagggattcatagtcccaatactccttgggacgaatcacgttaacatcggagtaaaccctagccttggaggcagcgccggggcggcgaatcgatttaccgatcttctgcgccaggttttccggcaggagaggaagcggagggaggcggttgtgagaaggcttctggcgatggtggttgggcgaagagagcaaggcggaggaggaagagattcggcggagaagagagatggggcggagagaaagagaggaagaggagagagagaggtttggagtgagagagaagagagagaggaagagagtatgggtggttgtacgagggtgggagaagaggaatggccttttggccatcaaaattgggtgtttatttgtaaaaatggcacacagaagcaccaatgcgcctctcctccttttcttttcttttcttttctttacttagttaccttaccccctctctctctctctctctctctctctcctttttttctcttcctcgtttttgctattttatttcttatctttttgacattgtttgaatttttgtctaaactaaattccttaattgtatttcaagatatttgctaatttttgtttatttttacttttaaatggcaagtttaaacttcaaagtagggtttgatttcaccaatttaaatttagtaggaagtgtttctccaatttaatctgcactattttgtttaaggctatttacataaatgtaaaaaaataaacaataatttacatatatatgaccactctttacacttttttttctctcccttcgatttatctctcttgcattcgcttctttctttgtctctcactctgaactcttctctctctgcgatcaaaccctgcaatcaagctcttcgatcaaactctgcgaccatcgatcaagttcttctccaccaatcaattcgcacaaatcaatctcataacaacaaacaatctcatctccataaataatcaatctcatctccaatgttcaacaccggcaacaacaattgaataatacaaatcaaaacaaaaaagaatgtaatattcaagagaaattcacatcattctacctatataaattaaaatgttagatattatgtaaataaatcatcaacattccataattatattacacaattatagatatgcattgtgtataaatttataataattcattttcttatttatcaaaacatgtatcattatcatcttgatacatcttttcatcttttcattatcaccaccaataata

SEQ ID NO: 37293 - DNA, 7732 bp, Cannabis sativa
atgtttttgaaaaatattttcatttttctacttttaaaaacagaaaactcattcaaaaagtgttaccaaacgccactttaattttgaaaatgtaaaaaacaatcttaaaaaaaaaaatagttatttttgtaaaaagcacaaaccgacccaggaaatagattggagaaagagcccagaaggagcccaattgacttagctggttgaaactggcctaggctcattgattggaccttagtggccccaaaatcacggctgtcaaatctcatcgtttgaaccactcgagctcgaagagccactaccaccaccacctgaccggagagaagccattctttcactcagcaaactccattaactaacgccatcttctccttccttcgcaccatggaaaccctatcttctcagcttacttcagccatttgtttaccatcgctggtatccgtcagccttaatggcagatcagtctccagctcacttgctcttactggaaccggcttttgctcgcgtgcccgtacagtcagatgcatggcgttatcatcactttcagcaggtaaaattttatttttttggtctttaactttcttcgtcttcaaagtgatctatgttaccattctctggttccggctggttgatgaagatgaacttgcgtttctgatattttttttttccttagaagttggattgagaacttgtattaatgactatatatatatatattactttgaagattgtacttttttttaattgtatcatcaggcaaaatatataatggttttggttacaaatattagtatttgatacttttactgaagttaacaatgttgactgttttctttattcttcgatgatgggttttgattgctgtgattcatttcattcagttgatcagtcagaacgatttttagaagcttctaaaaaggggaatttaattcctctgtatcaaaccatattctcggatcatctaactccggttcttgcataccgatgtttggttaaggaggatgacagagatgctccaagctttctttttgagtctgttgagccgggcttgcgggcctctagcattgtaagagtattttagtcttgttcaagtatgtgtgtgttgttttcccccaatgtagacattcaattcttatgctttaacgtttttaggggcggtacagtgtagttggagctcagccaaccatcgaaattgtagcgaaagagaatatggtaactattatggaccatgaggaagggtgtaggaaggaggagatcgtggaagatccaatgactgttcctcgtagaattatggaagggtggacacctcagctccttgatgaactcccagaagcattttgtggtaagatcaccagatggaaaaccttttatgttgcttattattatatataacggaaacaaaaattaattactttgatatttatttcctcttgctgaaccttcaatctttctgaggcattaaattctgccactgtcatctaattgtaggcatgaaactaaagtacattgctaggtatttcgggtatatatttttcttttctggtttttgttactcttaattgtataattaaaatgcacagatcatattttttcacatttgtgttggctctagctattctcaatcggcacactttgggttgagttcagttttatttagtgtatttgtcatatagatacgttggtctccaatattaaaggcaatggaggacttaatgaggggttactctttgattaggtgggtgggttggttacttctcatatgacacagtgcgttatgcggagaagaaaaaactaccattttcttctgctccactggatgacagaaaccttccagatgttcatctaggcctttatgatgatgtgattgtttttgatcatgtggagaaggtattttatacttattatctctttcagtgttctttcattataatatcttccgtttcatgcatttcgattccttcatttttaattgttgaaatttcatgttagatttcttgtactctctaaacaattacttattgtcaaggagcagaaaatacaaaagaaattcatgcagatttgaatgatttttgggaagttttgttccatgcttttttcgagcaatatcttctatgctttactctgtggtattgatgtgaagcaatatgtactccactagaagaaatatgagaattcacttgcttgttgacctgttataaattttcattagaagagattagaagctttgtatgaaagtgattctttatatgtttgacattgacctcagaaagcatatattattcattgggtgagattagatcgatatgcttcagttgatgaggcctttaatgatggaatgaacagattggaagctttagtatctagagtacatgatgttgtcacgtaagtctacctgtttacccttatttctttcccaatatttatatatttacttttgcctgtgtaagtgtaaggttggattaggcactggtgggctaggttactagtgcaaagcttctcattcttcttgatgtttttttttttcaaatatgtaatttttattgtctatttcagcccaaggcttcctgcaggttcaataaatttgcacacccgccaattcggtcctaaactggaaaactcaagcatgacaagtgaggaatacaaggaggctgttttgcaagccaaagaacacatcttggctggtgatatattccagattgtgttaagtcagcgttttgaacggagaacatttgcagatccatttgaagtgtatagagcactaaggattgttaacccaagtccttatatgacttatttgcaggtttgactacttgttctgttgcatacttttttttttgttttttatagtttattattaagattgaccttataaggatacatgaacattactccacaacgagcaggcaagaggatgtattctggttgcttcaagtcctgaaattctcactcgtgtcaagaaggttagtttatagatccagtgaattgtctagtatctctgattttcttctctcctaactcccctgattttcttttttagttacatcaatataactcctattgtgtaacaacattacaacaatattaacattcgtcttattatttggtttattgtggttttcattatattgttttgtcttttttactaactgcatcttgaccagcgttgcttgttttttccaatagggaacaattactaatcggcctcttgctgggacgattagaagaggcaagacaccaaaagaagacctaatgttggaaaagcagcttttgaacgatgaaaagcaacgagcagagcatatcatgttagtagatttgggcaggaatgacgttgggaaggtacttttgcttattttttttatcaattaaagtagaaaacttttaggtacatcatttacttgtacacctagtatctttttgatcctgtatctagtagaacgttcctttttactatctgcatgatttcctttgaatttgtatttgttggtggaagctggaatcatgtactctactttgctgcaggtctcaaagtctggttctgtcaaggttgaaaagctcatgaatattgagcggtactctcatgtcatgcatattagttccactgtaagtcccctatctctcttactaaatgacatagattgtgatgaacaggaatttctacacatgatttgttacatagcgaaagtggcacatggaatgtgttgtgtgtagctacttcatatcactacatcatactcttgagaacaagttgtgtttgattggtttattttatttcatttcattatgcaggttactggtgagttactagatgatttaacaagctgggatgctttgcgtgcggctttgcctgttggcacagtcagtggagcaccaaaggttttgattgaaatttctcttccctcctactcatactgctagtcatacatgtatgctttaaaaataaaagataatgacagggcctgcaaagacaccgatatgttttctcagaatgatttcaaagccacaatgagttgatgtatttttaaatcttgtataatccagcaatttacgttgattttcagaagaaaattatcgtggtgtttgcaaagccttgtctctatcttgaattgcattgtctctgctgaaatttaggtgaaagccatggagctaattgatgaactagaagtgacaagacgtggtgcatacagtggcggatttgggggcatttcattcaacggggacatggacattgcccttgctctgagaaccattgtcttcccaacaagcactcgttatgatacaatgttttcctacaaggatgtaaacaaacgccgagaatgggtagctcaccttcaagctggagctggaattgtggctgacagcgatccaggtgacgagcagagagaatgtgaaaacaaagcagctggtcttgctcgtgcaattgatcttgctgagtcttcgtttgttgacaaagattaacaagattcacgaacttgatcaattcacagaatgtacaagagtgcagctttggagaaagtaattcaagtttcaaaaggagagtgctaaaagagagttgtagatggttagatgtttgggacagtacagaaatgatagacggaggatttagagcagagttgaggctacgtaatcttgtcttggttgctactacaatggttatgcttctttctaaacatagcagtttttttttggtggaaaattatcacgtttttcctttttcttttagtgattttagtttagcacatcaaagtcgatctttacaatgtgatctatttcactacttatatgttgagcaaaagtcaaaagttcgctgtagtttattagctcatgatctcaaatgctcacctaaaaaatgtatcaaatgttgtatgtgagacttattattttgaaaaatcatagtatgtgtaaaattttaaagtattgctattaggtatgagctttgttgtggtaatgcatactcatgagattttaactgaaaaacttgatcgaatgtggtgctaattcatgaaggtggatggtcggagagagcggctacgatgggatgagaaggagagggagaaagagaagtgaaaatgacaacaacaaatttttccaaatcaaactttgaaatatacttttttgattattttgtaagtggtaaaattttataaataaggagtatttataaaattatcatagtgaaagctttattttccttctgaaattcaattcaatcttcgttaaccatcaaaactcaatatttccttctttattcagacaactaaactcaaatttaattgattattctcctactcccgtaaactgaaactccataacccaactgtcatcttcatcactgaaaagacacattagcaaaaataaaataaaataaataaataagacgttgacacgttacgggatttacatcaataacgtcttgcttatctttctgttgatccgggcccaggcccaagtccaggtcgaattgggtctgtctcttctcttctacgtgtcacaccgactcactgccaaacttcatgtttcatgccattggagttcttttccttctctgttctttacttaaaagttactccttttgatcttatatctcgatattgactcattttttatgatcgtggcgctgaaggtgtgtacgtctgtgttctgttgtatttgtatatatacatggctctttcttttttcttttgctgcttacacacttttggctttagttgtgtgtgtgtcttttttcaatcgtttgaatttggctatactgttttgctgttcttcttcttcgtccgtgttgctttctttttcttatttatttttgaataatgttgatgatgggaatcccttttgacttttcaagtttctgtttttctgtatatcgtggaggtgaatttgattgaatattgattttatgcatggttactattttgactaatccaaaatgttctgtattcaatcgggttagtcttaattggttttagtcatatttctttcattcgaaaattcagaacccaccaagcaatgatttgtttgtgagctcgttagagttaaaacttaagtgtattcgtacaccttgaattttaaggctttacacctactatttgagtagtagagtggttggtgaaatgaaattgagatatgtccttatggaaaaccaacttaattttcctaatgatataccacaaattgagcttccattaccgctcaactgctcaactattgaaattgttgaggatgttgttagcttttaattagatcggcttgtgagggctagataagttgaactgggtgttgaggtcagttttgatacttttcttaaaagttatttctcttgtgagagctgtagggagtgtttttccttttctatgagccttttccaaaatattttcctttaagctgatgactacatattcttgattctttttttcttatatttgtgttatgcaaacaaggtctttctttcttcatgtgaagcttcaggttgtgtttgcatttacattaaagaattttgatacgatttgagtttttgtggactgtgttttcacaaagccgagaacaatggtgtttattgtttactcctcgagttacatgcgtggatataaacattttctagtttttcaatcttcacaactgtttaataaagggagcaagtgattcggtatacacagttttgaaatagaggaaagtttaagaacaagctcccacgtaaaaccacagctatgactaccacaaagatctatatagtgtaagagtctctcttgctttcaagcaaattagttatttccttatttacaattttctttttccttattctttgttttgaatgttaatttcttttttccaggtactactctctgtatggacatgtagagactatggcgcgagagatccagcgaggtgctaatgctgtccaagatgttgaagcaacactttggcaggtgactatgggtgataaaagagaaaattaacagccaagtagaatgcttttcaatattggccctttagtaccatgaacaaaactttgtttaacttgcttagatcaaagcaggtacctgaaacactctcaaatttgatactgcaaaaaatgaaggccccttccaaggcagatgatgtgccagagatcaagcctgaacaactttcggaggctgatggctttgtgttcggctttccttctcgttttggtgtaatggctgctcaatgcaaagccttctttgaggctactcaccaactatgggaaaaacaagcacttgctggtaaaccagctggtatattttggagtactggtttccatgggggaggccaagagcttactgcgtgagtcaactctttaatagtgaaccaatctaatattgtacttccaatcaatcatattggtttacaaatatggaactctaaccttatattgtgttttttcaacctttaatctacattacagattaacagccgtgactcaattggcacatcatggtatgatatatgtccctattgggtacacattcggaagtggaatgtttgagatgaatgaggtaaagggtggctctccttatggtgctgggacatatgctgcagatgggtctcgtgagccttcggagcttgaacttaagcaagccttttaccagggtaaatatgttgcagaaatggccaaaaagctcaagcattaacacctcttcaccctaaaaactgcattcaatatgttaaaagttcaaaactaattgtgaatgaaagaagcactacttttaacagaatggagcat

SEQ ID NO: 37294 - DNA, 3660 bp, Cannabis sativa
tttagacttttattcattaatcaaaccatttacttttttggggacctaaattaatgtagggaaatttttatttttatagttaaaatataagtttgcaaaaatatgatcttttcttaaatatatttttcttacaaataagaatgaaatatatatttaatttatttaatctactaagttttataatatatttgtatcatatataataaattttaaaatttttattttctacattaaaatatcacttgtatatgtaatttttaatatatatatatgaatttaattagatcagttacttttacaatatttttattttttatttttataattttatttaatttcaaaataataatattagatttgccaatataaatatgttacatgtataaaagtgtacacataattaactgtataacactttaaatttgctaacagtttaataatttgaaatgttttattgctaaaatttgagcttaagagattaagtgcaagtaaaataatagttaaaagggtttagcggccaaaaactctttatttgttattattattatcatatctcgatgacttgatgtcatgtttagcaatacaatacttggtatatatagttggacataagttaagcttcttttcttcatataataaatagggacatacttgatatagttggacacaagtttcacaatttaatgatgttaattatttaaagtgtaaacatgttcacttcactaaccaatacccacttgcattattttggtccaaaacatttcccactttattcaatggtgtcattattaatattgttatttttgtgtttgatttctaagaactttcctaggtgagagatcacattaatagtctttggaagaatattacaatcttatttattgagacttctctatctaattaagcttgactaattaggcactcctctttttcatgtccaaagcatgagtcataattctctatgtagtctaaaccctaaccctaaccctatttttataagtgtagttccacttccacctccaccttcactaatgatttttttcaaaattatattttaaatttcattagaagtaacaagtaatattactgtatcaatgacttgttataatatttttaacgtctctctaaaatatttttttgtaagtattataataaaaaataaaaaaacctaatatcatcactaagaaagaatattatgtatcgtgatgaaagcactctagttcccaaaacacgtgacaccacaagattgatcagaagagtattttcttgggatacataagattgctctattactaacaaatattactctataaaaagatttatgctggaataatgcacctaataaaattgatatggtattttcttgtaattattttaaataaaaaattgttgaaaagtgaaaaagcttaaaaaaaaactatatgtacattttattattattattaaagctagaaaatgaaatttaagtcaattttcatgtgcatatatatattaaggacaagacaagctttgtatttatatgtacaaaaaaaatgatctaataatatatctttgtcttcttctctatctatggagttgaaaaaaataattaaagaagtattattggatcatattagattcttcacgggaggatttactattggaacttttggtttactatactaataataactactatatatatatatatatgtcactatattgaaataggaaaagaaagtgacatttttgaaaagatataataagtgagaaataaatttatccaaaatttcatggtgaatattgaatattgaatgtgaataatgattcaatttcattaggaaagttcaaggaaaaatcactatctttgtcctccaaagactcttagcatattatctatcattgaagaaaaaacttttaataatattaattaaactaggctttatatgtcaaatatagaaattaattccaaataatatcttaaaaatggtgcaaaatgttttctcatccacattactttttaactagttaccaaaatatatggaatattgctcataaataaaaattaacaaataaaaaaaattgtaaataattaaaatattaaaaaataacacttttgatactaaacctagtctaataaatcacactattatttcacaattacacttcctcaccaaatactaaataattacattaatatcacaataaaacgtttcataaacaacaacttaacaacacttattttaaatataagacagatctttagacaaaagcgagttaagacccacctagtttaggggcttaaacaaaaaaaaaaaaacaaatttcttttaaagcatacacataacataacatgttctaataaaactttaaatcataactaatccaaaatattaagagaattgagaatgtattttcattaacaaatatctaactatactatctatttttattatttttttcaaaaacccaatataactcaaggccaaccctacttaacataacatcttctaatgaaatcttaaatcataactaatccaaaatgttaagagagatgagaatgtattttcattaataaatatctatctaactatactataacatcaataaaccaaaagcaaattatgctatgaataattctttttcactctctcttttttctatattaaaagaaagaagaaaataagaatacacaataataagaaaaataaaaatgaaattaataagtgtggtgtctacacctgtaaatcttaagacaagccttttggtaaggattagaaggttgaggaagacaagacattgaataaggaacacttttacttccaccacaaataggcaaatcacttctcatagctccaattgaaatgtgctttttttcactaacaacaataataacaccataatccaacattattattgttattagaataataagcaacctcttcaatgagaccattttctttgctttttctaacttctgggttttttttttatttgggggattaataatggaggtgttatcattttataggtagatatgttagaagagttgtatgaatgaaatgatatgatttgatatgaatgtaggaccaatcatttattactttgatttttatgtatagttagatgtagaatttatttttcttattttttattggtacaaaggaaatgaaattagtgtccaccaatggctatggtatgggtcttaaaacctaggggattgaatatagattttttttttttagtaaatcggtatttcggtagactctacatttatttttatgagttatgatcacttgttaatttttttaatttttttttttgaatagtttacaatttggatcattacttattacttgtataaaaaaaaatagttatgtgagtaataaatatttgaatcttattttacttgatattttctggaatttatagatgaccttaaataactacaacgtaaatgattataaaaaaaaattaaactaaaaagctcttatagatgtcaaaatcaataagagtctaccgaaacacttagaaggtgatatcatttggtagttgcattcaaagcactttcaatcatcttttttattgtgaaaaaatgagattttttttttttttattttagaatttaatactatatcataataaaattatttttgaataaatataatatttatacatgta

SEQ ID NO: 37295 - DNA, 5359 bp, Cannabis sativa
  modified_base (3205)..(3205): a, c, t, g, unknown or other
ctatctaacattcatgtaatggaatttcaggttcatggagcctttaatttcgagaattcctatgatggttatcgaaggaaaccacgagattgaacctcaagtttctggaatcactttcaagtcatatgaaactagatttgcagtaccctcagaagagagtggttctaaaagcaaattttactactcttttgatgctggaggaatacattttattatgttaggagcatatgttgactacaatgccactggtaacttaaacactcttcttttacaaaatctttgatgttaatagttttagctttgttgttgtcagtactatagaagtttcaactagtgtttatacaagaagtagcttccatttaaatgtctgttttaggtgctcagtatgcttggttgaagaaagatctcgttaaagtggatcggtctgtgaccccatggctcgtagctgcatggcatccaccttggtacaacagttatgcttctcactatcaggagtttgaatgcatgaggcaggaaatggaagcacttctatatcaatataatgttgatatagttttctctggtcatgtaagctgaatcttattctgttttctccaacttacatatcatgtcagctcggtagccgtgtaatgagaaatcctatcatcctacctattacttatcttatgagcagtaacgaaaaatcaattaaaattctcgatgaaaattaagagttcacaagtttaattctaattaatcactttgactaaaagtagtaggaactagaatgaatagactattcgaaatttagaagaactacgctggaaatccttaaaacaactaaatgtttttttaggtgttatgtgtctgagtggcattctaaaatttgggatattcatttccttaaaaattatactcagatttggatgaattagttacctgctgcttacttttcaggtacatgcttatgagagaatgaacagagtatttaactatactttggatccatgtggtcctgtttacataactgttggagatggtggtaacattgagaaagttgatgttgaccatgctgatgaccccaaaaaatgtccatcagcaagcgataacataccggaatatggaggtgtatgtcacttgaactttacttcaggtccagccaaaggcaagttctgttggaacaaacagcctgaatggagtgctttcagagaaagcagctttggtcatggaatacttgaggtacattctaagtttcatttgaaccaatttggtgatttgaagtagttcttcattgaaatcttttcttttgtgcaggtagtaaattctacatatgcattatggacttggcatagaaatcaagatatttataaggaagagagtcgcggtgatcaaatatacatcgttcgacagcctgaattgtgttctaaagctttaaaagtaagttattagttttggcattgacccttttaaataacaagatcttgtaatatacatattactcattgtttttcttcataaatgtttctttagctaaccctttaggactattatcttagctcacttaaagacattcaatctcagccaataagagtttgaaaactgagcttctataatcctaattactgttattggttagactaatattaaggcataacaattagacatagttacataataagaatttatcttagaccagtaaactcttgttttgaataaagtcttgaaaaacttcacatgtccattgatttcttacttaaacttgttcaattggaacagcccccatcagtcactactactaactcattacctacattgtctgtgaattactgccattctctggtgagcttcctcacttatcttctctgttacaaatgttataatcatgtataaagccttactaatttcagaacctttctttcattggaaatttctctccttcccattatggcaaatctatattccctttggtgtgtctaatttttcattctttctctgttcaatgtttttatttctgtttttgatgttattcattgggatattttccagcctatacaataataaatggtgtattactatgtaattttccctaacaattcatacttaattaggacctaaaataataacaaaaaaatgttaagataactatgcttaaagtcaagaagttaattgagaattacagagtagcaagcccttttaatgataacaagagaagttgatcaagaattatatccttatattattcggaaacaagcttctccttacctttaacacttgtaggattaggtgtttctgatcttttcgggtgagaatccaccttagtagtgctgctgcaactactagtacttgcctcacaaccattgtgaggcattgaacaaacaagatcttcattttgtgatgatgatttcatgcaatgagcaattgttctcttaaactcatcctcttgatgtcgaaacaaaaggcagaggccgcatttttccactcgcaagcttcttccactatcactcgcaaatgaagcctcgatgacactgcaatcatttagttgctgctgctcatccgaaaaccaccctcttggtatgtaggaaagccaaatgaatcggccttcgtggtctaaatatctgaattcttcattggttgttcggtgaacatgaggatgttctaaattgcctctatcagtttgtaactgacaaataagatggtgaggagaagaacattctcctatgtttggatgatgaggatcaagatcagtaaagtatgcacataatgctaatccaagccaattttcatctgacaatagagtagtagaagtaggcagctcaagtttgactgaagggcctattgtataattcctaaaccactcaagaatttcagttgaagtgaaacatgagttaaatatggtattatgatgaaaatcctgtaaaaaagaaaaatacaaaacaattagccttatgagagagtggaaaaagatgttggaagcttctgcgatgcaccctgaaaaaaaggtacaccaatgcaccccttattgtttcggcatctaggaaaattttttagtcaatttttttttttcatggtcgtgtaatttgtagttatttaaggcattttgtaaaattttgagaaattcagaataattttttttcatggtcttgtatgttgtataaaataaatgaggcatgcatgcaatagacggttcgaaccttgtttctagcacattaatttttttttttttttnaatttctcaaaattttgcagaatgttttaaataactataacctacagaatcatgaaaaaaattggactaaaaaattctcctgaatcccagaatagatagggtatgtatcggtgcacttcgtttttgggatacaccatagaattttccaaagatgtttacttaaaattcttaaaattgaagtgttcttactactactaatagctcaacatcagttctttgattccattgagcaatgctgttgaaatcaggggatttcttcatcttctcatctctcatatgtagaagtatgggatccaaatcatcaaagaaggagctcacacacttgactatttcttgtttaaactctttcacctcatgttgataaagaaggcgcattccacacctctgaaccgccaagccatggcaatcgaagctatgcattttagcctcgacataccttacttcattcaaagatttcgtaaatgcagtatgggggatgtacactaaccaaatgaaaccgcgaagaaccaaccacttgaaaatatctttcttgtagcgaacaggtttaacccttagacatgtgttctcttcccccaagttgaaatcgcacacaaggtgaaaatccttaaagggaacagaatgaattgtgtcgaagacagtagtaccgggatgttcaataacagaaaatgcagcacataccataacccctctccaattttcatcatcatatagattttgtggtatttgcattctcagcttggactcatgagtctgatgtttaaaccagtctaatatgttctttctagcgaaacaaaagttaaatccgaaataaggatgaaagcaaggtatgtatgaaatttcaccatctgcaatactaagccttattatcacagaaagattcaagtacttatgaagaaaaatctccaactttactatccattcttccattgaattagattccttgattggagtttgagcttctatgtttagaagaatataactaggttctgattctttcgagtttgttgagttgtcgaaaacagattcatcgaaatctacaagtgtttcttcttccattagaccacaattcatcaaggaatagagtatggtttgctcaaattcttgttgatcataaaccaaatggattgcacatttcttgaccaacaagtaagagctttcacttacaaatgaagcttcaatgaatgtgataagctgttctgagaatgatccaattggtatgtaagataaccaaatgaatccacccacatgagataaccacttggtttcttcatttgtggtttggtaagagtgaagagactctagaaaaccttcattagtttccaaatgacaatgaaggaatggagaattgttttgataagactcttcttcttcttcttcaactgaaaaataagcacacaatgctaatccaatccattgtttctctgtgcttgtggatacttggatttcaattgaaggattattgttttgatgctcaaacaagtttggaatttcaattgttggaaagcatgaattgtacttcaacatttggtcaaagctctgtatatatatatatgtatattgtaatgaaatattactcataaacacaaaatagagatagagagtgtatgaaaagacctgataatattttgtaatgaaatattgactgctgctcatagttgaaatactatccatttcttctacttgttgatgctccctacaaaactccacatcaaaattcactttagaataagatttatttatgagggctcgtttgttatgctgtattacatcatattgttgaattgtattaggttatatatcataattttatattactatgttaaattttaatttatattaaaatattatatatttaggtgtctataaaaattaataccatagatagttttacataaatatattgtataaaatacaatataacactatacaatatacaatacgacgtactaaacgaactcataataaattttttaagttggggcattgttatttttgcctctattagtagacgtgtattgatcatttgcggtacatagacaaactctattcaagatgtaagcgttccatttattttttaaaaatttaatttcaatatcgtaaatttttcatgatttctcgaaaattataactttttgagttataatttctcttcgt

SEQ ID NO: 37296 - DNA, 4846 bp, Cannabis sativa
  modified_base (1920)..(1944): a, c, t, g, unknown or other
aaaaaaattatcataatttataatataataaataatatttataaatatattaatatgtataaaattatttaaataaattaaataaccaatgtcatacctattttagtaattatatatttaacaactatttaatcatttagcttaccaaacacttatatacaattttttcaactcagagctgttttaaaattatatttaccaaatactctgtagttttttctcacagtacagctacagctactttttctcacagcacagctacagcttctttttcccacaacacaactgtgccaaactggcctctaatctttcataaataatgttacacgcacaccctttttaaactgcacgtaaaaataaagagaaatttagggtaaaatttgttttaatttttatatacttaattttttttatttttttttattgtggtaaaattcttttaagtttatttttttttttacaaaattaaagtttcaattagatattaccgttaaatactaacaggattactactttatcgacttcaaagttactattacatatatactaggtgtatacagtggtcatttagttgatatttaatggtaatattgaactggcgtgtcaaatttacaaaaaaaaattaatataaaagaattttaccataaaaaaataaaaagattaaatgtataaaaattaaaacaagaaaaaatttcgcagcaaattaatctaaaaataaaagtaacataaaatatatacatccttgtttttagggtaaataaatacatttatttattatatgtgtagtccaaacatcacatattgtataagttaaaatttgagtgagtggtggtggggaatggggatgcagtaatatataaatccacttgcgaattaattgacctgcaattaatctaaccgtgagaaactgagaattaatgcataaaaggatcatcagctacatttatggagactcagtgccagtgggcatcgtttgcccagcccacgtatccaccaacacataataattataatataatataataatatagtagctagccatatgtgacaacaatttctttttccaaaagcatatgtgacaagatttgggcctttcaaattacacatctatccacctatctctatataaaaatactaattattttaataggtaattaatttattaggatttcatttacaaaactcaatatatatatatatatatataggaggtttcttctattagcttttgggaaaagaaagaaagaaatacattgtttttgttgggcaagggtattttttcttttcactttaattagttggtgaaaacatatatatatatatatatggaagagatttgcataagagatctggttgtggtgggagttatttcatggtcagtaggttttgtgttgataaggaaaacatttccaaatcgttcatttgagttctctaatcgtcttgtttctactattcatgcaattgtggctgttactttagcttccctctccgttcaagattggaaatgtccactttgtccaatggcttcaacttcttctcctaaacaggtaaaacaaagaatatatattattgtctcataaaatattattattacacagtattaatttatgggctctatatattattattataattcatcaatttctgacagttaattaataattgttttggtttggcttgaattttgaaaacccagatgagaacactagcaatcagcctctcttatctcatatatgatctgatttgttgtctctttgacaaaaagattagtattgacaattccgtccaccatttggtcagcattattggaataggagctggccttgcctatgctaaagtatatatttattattctttacaaattataatttatttatttatttatttatttatatgctattaattattattattattatnnnnnnnnnnnnnnnnnnnnnnnnnattattattattattattatgcagtgtggatcagaaatggttgcagcgttatggttaacagagatctccagcccttttctacacctgagagaagtactcaaagaacttggatacagaaataccgacctgaatttagtagctgatgtaagctaatattcgtaactttcttattatacatatattttggttttatagtcacacatattaattaattaatatcatttcttctgttttcctttctacaactttaaatttaaccttccaacagttacactcttattttctttttttcacagaaaactttgacagtttaaaatgaatttattattattttttcttttagaattgttgaactttgaattaatgtactacatacataatttaaaaactcttagtttctcattatatcattcaaaatgaaaacattaaactctacttcttctatcttatatgacataatgattggctaaacatgcatttacttatatagttaaacgtataatataaataatacaaaaaaaaattattatttttgtttgaattattatatacttttttcttttatttttttgttaaataaatattatttatcaaatatttgtatattatatctgttaaaatttattttagtttaaaaatagcatctaaaaaattgattttaatagaacctaggcaagtactctagcttctcttcaaaaaaaaaaaaaaaaaaacaaacttaaaaacaaacttagccaaacattgtaataaagtgtattcattttttgccgtgtattttcgatatttcttatgtaaagtgagtgtatgtgattgtgatttgtgagtttaactactaaccacaatggatactattaagaaggttgaagtggaccaacgtttctatagtgttgccccccttaaattaaattaaaggcactatttttctattctttacaaataacaataaccaagcaaagcaaataaacaaatatttattagaaaaaatagaaataaataaataattaaaatatatttagctcactttcatactttagctaaaatagctaaaatgtagctaaggaaatgaagtgagctattatatatatccatttagctcacttgttggagcaccaaaaaatagaaactcatcacttggaagtactcttagagtatcacaatagcttctttatttattttttaaaatagattatcaaaattctatttaaattttattttatatacatcaatttttctatttttttaatatcatttaagtaataacttttctttaatataataacacataacagaataataataaagtactacttatatattacatgtagaaaagtatcatagcattgtttacaaggttatttaaaaaacatgacttgattgtattatttatactttttcatcaatttcttcttcattttaagaaaaatttgtataaaagcagctgttgtgagtgctttcactcttcttctttttcccttcatggtggtagttgattttttttttcttacagttatttattagttgtaatataataagaccccatatatgtaaaatataagtatatatatctaaaaccgtacacttaattaaaaagaaaaagagtaaaagtttttattttgattttgacatggaactatatgtagttgtgatactggtttgtttctttagatatcgtttgcggtcatattcacaattgccaggatggtaggtgggccctatctcgcttacgtcactcttacctcaaaaaatcctcttatcatacaggtaatatataaattatataattgagtgtacaattcactcccatccatccatttcttaacaaaatcttttaatccaattttattcattattctttaatatattggtttgtatcacctacaaactcatcttttttaaacacatccaacaatgaattaattcagactaatttataatataaaaagtatagtatttaaatagcgtattttataggtatataaaataaaaaagtcacgtgtgtaactgattatttgaactctattttcagtatgttaaattttttttttttgaattttttaaaatttcacaagatattttaaataactacaacgtgcacgatcatttaaaaaaaataaactaaaaaattctcttagatgtcgaaacaaataaaaagtgcaccatacaattttcttataaaattttaatttattttcttttattttaaaagattgtaaattctataacataaactataaacttttgggtgcttttatggtgcacctccacaacttggtgcattgatacattcttttcatgtttttaatttttgaatagttgtgatcttaatttttttttttatatcatgatgtgtatatcataattatttaagataacttacaaagttttgggaaaattagaatagattcaaacagtctattttacaagtatatgaaatgaaaaaaaaaaaatatatatatatatatatataagtgcatttgaattgactgtttgaaccttatttttggcgagttaaacttttttgaatttttcgaaaatttgtaggaggttttaaataactatattgtaaactatcatattaaaaaaataaaaataatacatcgatacactttattttagaggtgccttataaaatttccctcactttctagtaaaactctaaaactttcaattcatgtacataaattataaattataaggtgaatttcgttacaagtccttaaaacatcattattatagtcgttttttaaagaaaaatttggtacttcaaaaaaaaaaattataaatcatcttttttcataaggtaaatagcagcataagtactcaaaattttaagtttgtaagtggtataaacccaatgtttatttttagcggcataagtacccaatatttatttttagcggca

SEQ ID NO: 37297 - DNA, 8305 bp, Cannabis sativa
  modified_base (6867)..(6871): a, c, t, g, unknown or other
aaaaacagaaaactgattaaaaagtgttaccaaacggcaccgtaatgaatggaataatggatggtagatataagatatatagccaggtggagttattttgtgaggttatttttaccccaaaatcccaggcaaacgttaacatcaatattctgaatccactttgcttcagtgagactctaatattaacctccttaacttgtacatattatgtattcatgtgtatatatatgcctgctctgcttctaaatctttagcggtccatacagtatcttcaagactggaaattaatttctagagatatatatatatataatgttataattgctctgttctactctctagtacacaatactttaaagaggacaagtctctaataaattttcacagtaattttttgttatatgaaaaattgataaatgtgaattcaacattaaaccagcaaaccccataacaccctcagaattagaattcagaacaatatcttctgaagccttacagcttaaagtctagtttgctacattatgagccatgaaagggaattaattgctgtaggaataaaattaaacagacaactagaaattaaaagaaggttttaacatctccacttgactgatgcagtctccaattaataatcttccacagatcaaaactttcttgcattgcctcaataactcaaattgaatcaccttctaccatcacatagctttgggaagctagcaaagcaaaaggccctagtgtggatagtgagaatcatagctatgtaacacactcattacaccctaattatcaatggcttgactacatcaaagtttcatttttcacccaaccttctgaaggaggagaccaacagagatgagaagagtttgttttgtttgttttgttttttttttttttttggaattttaatttttagtttttacttaattttaaacttccacacaacacttttaatataccaaatatatgggatatttgtggcaaaattcttttaaaatttgtaattgttacatatataacctttctaaaaaaagtggcaacaaaattatcttatcttaaaacactctcaacaactctctactctattctttaaaatatattattaaaattcttttttttttttttttattttacattatataattttacattatataatacatcgatttatttattttttctctatttcatctctatattatttaaataatatatatatctaacaaatataatacatattaatattaataaaagtagaataaaatataatttaaatattaaaatatttttaaagaatgaataatacttctttacatgtggagaagagtttgaagaaaatataaatcctttaaaatagagaatccatttacatgatttctttcatgttttttttttttttttaattttttttaaagattatttattttaaaggagctattgaaagtgctcttacaattttattgcaaccgtacaattttggctattaagtactagcaaaatctgttaagtgtcagctcagaaacacgtgatgatatattagtagaccacacattaaataaaaataaaaattatgttcttctataacgccctaatttttaagacacgttatgtattttctaagtatgtgctaacatttgccaattaaatttttttttaaatttaagtgaaattataataaaaattcgtaataattaaaattttacatataataagcattttattaaaaatttgtaatttgagattccaaaatctagttacaaaatacatcatatactataaagttctgaatagtcgtctgagaacaaatacaaaagttgcaccagccgatctcccagagatctcgaccctacaagtctagacgaagatacatgtacaattttcacccgagctctttacttattgttgttgaggttcaacctttcatttacctccatataacaaagtaactgcaagtcgacatattcagcaagaaaagcatgcataatataatagattcaaacgatcgcacttataatatgattgatcataatattaacttaattctaatactctagtcgtactgcccataaaatttttgtttttaaagttaattaaaaaggaaaattaagtatggatctaaattaatccactcattaaatacataataaaaatgtgttattattccacctaaactcaaaaatactcctctcatttcaacttctctcattctctctcatcttcatctcactctttctattttctctcccataaaagactacctaaactcaacacagcgcactgctcaccaccactcaccacatttgtgtttgtgtttcgttgtatttttatccaaaaattagattttaattttttttgcctttttttttctagttttctaattttttgcaataatttgcgatatttaatgatgtttttgcaatgatagaccaaatctaaggttagggatgaattttagaggtgattaacgatgtttgactaaaataataaatattttcattagcgattttagtgatgtatttgtgatatgagtctaaaaaatataaatacatcgctaattatcatgaaatcttaagtgtgatttagtgatatttagcaatgtgttttgtaatttttagtctcatattgcaaatacattgcaaaaatcactgctaagtacgtaaatatttattattttagtcaaacattgcaaaacgttagtaattagtgataaactttttccctaactttagatttggtttattattgcaaatgcatcgctaaaaatggtaaattatcacaaaaaaaagtagaaaacaaaaataaatgcaaaaaaaatcaaaattcaattttcaagcaaaaaaatcaacaaaacacaaatgtgtaaatctgttaaaaacgaactatatacataatagcatatttttgggttgaacagagaactctggtggtccagctgagtttggttttattatttgaagagtataattgaaattaaataaacacactagcatattttctttgatgttttgtgtagtggtatatttagagatcatgcttcacatttaagcatggtaacccaaatttcttattaaaacaagtatggaagggccttacgacaaaaaatgtgcgagggttttgagtgtgttttataccaactatttaaattgctttttttttttttgaaggtggtttttgtaaaaattttgttataaaattttttaaatcacaaaagcagaagtagattttttttttgaaaaaaaaaagtgttttattttttatttttttttcttaaaaaaataaaagtgtgttctgtaaatttcagttttatttttatttttatttaagtgagcaataagaaactgaggtgagagaaagtgggtcggtgtttgacaccaacgtctgggatcaggtgcagatttggggttatgccaagggttcaggtttggccgatgtctgggtctgattgggccaggttcaggttcgggattcggagttcaggccggagtctaggtctagattcaagtccaaggtttaagatcaagtttgtggtctagttctgagtttgcagtcgaggaccgggtttagggctaggaccaggtccaaggtctggtcctagtttgtgtctggggttcgggtactagtctgtgtccgaggtctaggtactagtctgtgtttggggttcaagtctgaagtccgaggtacagttctggctatgggtgctaaataaatttacatatcgccaaacccgaataaatcgacaaaatcaatatttgtttaatatttttatgttcattgaattaatatttgtcttacgttaaatttttaaaattaatttagaccataaaaattttaaatttgaaatataaataatatacttttattctttttaaatataattattttaatactaaaaaattacaataagaattataaaagaagtgaagattagtggatgggttaacctgatcaaaaaaaaaaaattagatgggttaattttttaaaattttaattgggcgagttacattaaatatttgcagctcaatatatattgggttggtgaagatatgctataatctgataagtccatatttgtcttataaatatgaccaattttatgtatcaatattcttaaaattactgattagtatgattttaatttgctagactattttgaagactaatcatgcatttagagtcatttgaatgagttttaacatactttggtggaaaatagtgaaaatcagagagcttcgtttgacaaaactgaatataatttcgtattttgataagtttataagtagaactggacttggagatcaacatgaaaattgtagttctcattctcaacttcttgtaacattttgaatcatctaattttgtgttgtattgaaagagttatggccaaagtaccgatttgagcacgcgacagaaattgcctaggaaccataggggcatcaaattttcatcctatcacggtctcactgcgaccagcctttcccttcgtcgtggcgagtgagtcatggttgcagcaagatatttgttccttgtagcgaagctacgatccgttttcgggtttttgctccaggcactcttatagtggcaagagcacaatttttgaatttagtttttaatttgatcaaaggaattttcacagatatgtaaatagaaattttagggttcatctttagagacttttagaatgtgtttctaggaaaagtggagaagatgaagattacatcactaattattcatcattctagttctttttttctccttattctgtttaattttcaattatgattatagttgtgattatggtatcgtttctttttagttgaggaagccctaaaacatgaattcttgattagtgatcataaatgttattcttaatttctctcacattatattattttttatttttctatttgaatgctatgaatattatgaatttttattaagtatatgttgcgaaaattaagctatgtaagtgcacacaatcgcaatttgctgtaaatcttggtaagaccaattaagtatcgtctaacaataattgattatcaattatcaattacaaaccaacgaatcttttatttctatttgattaaataaattttaggatttttaggaagaaaaataactatagaaaaacaataaaaaaaaatcaagaaaatagcaatgagaaacttaattatgataattatgatcatcaactattctatctttcaataccttatgcaatttacctagattcttctttttcctaatcaattgacaagttgataaaagtagtttataatctggtgaaggtgaagatatataaactcaaattatgtaaaaacttcttatatttctatgacaaagtttaatcacatgaaaagtaataaataaaacaactcatgataaaaatcatacaatcaacctatataattttgttctaaattaaattgcattgataacaatcatagcataatcaaattatatattttttttttgaaattttaattcgaaatcattaacaacaagaataaatagctaataataattggtaaattaatatagattgcatggaattgaaaagaagatgaagaagaaatttaaaaactaaattaattcataaaaaagattcaagtgagtcatgtaatagccttagaattgaaatgagctcataatagtcattctaaatatcaaaaaattcaattaaaaacataaaagataaagaccgatgaaaaagaacacaaagtagaatcctctaatggtgttctcaacttccagctgtcactcttggtctccaaaagctctccaaatttgaatggaaccctcacacctaaccccatttcattattttactaaaaatcaaaaagttaccaaacatagtaagcgcttcaactcagggacgtttgtggcatttgactttttatagaaactgtgatatattttagattttcttcaatcgcaactttcaagagaaggttgcgacttttcaatgtttctcaaatttactctctgtaacgattggagagccacgactcgtgggagaagatcgcgactattgatgctgaaatttgaaaacttgaatttttaatcctccagaatgcaccaagttaagaaatttaatcccgaggttcatttttgtaaattttgatcattttcatcaacaaaaaatctgagaaacaccatattttcaccaaaaagttaaactctttatcatctaaaatctaaaattagcataaaagcaaaaataagtgtaaaactgaatgataaaacataaaaactattatccccaaaactagactctaaaaaaacctaaaaataaatctaacagtacaactaattaagattttacattgttcaatcatcttaaaattccttctcacctaatagtttaggattccaagtaaagtgataatttataattaatagtaatgtcaaatgtattattgattgtgatgaaaaatagaacataggttaaatgaactatatgcttcattgatttgttacctaaattaatttatctccatagaaattaatgtttttcttaagttaaatagattgcatgcttcgtggatctattgcttggtaaaaagacttaattattgagtgtttcgctttgattaattgtaatatggagattgagaaagttgactgctttagcattttttgcggtgttaatagtttaattgaaaaaatggaataaattttattattattgatcttgaatgattgttgagcgcggagatagacacttaactatttcttaattgcgtaatatctatctttatttgctttcctagtcagggccggccatgggcataggcgggctaggcccgcgcctagggctcactcattttaggggcccaaatcaaaaaattaccttttaaaaaatatacatannnnnttaataatttttaaaaatactattcatctttatagtaaggccccaattttttttttttgcctataacccattccaactcatggccgaccctgttcctagtttatgttattaaatctttatattaaaaatatttactaattcttagttataattattgaataataaattgataataattgattgacctgtatttgtcatcatagtgaagtaattagttaatttgaaagaaaatttatttagtaaatttggtagagctcatgacatgcatcataacccgatcaaactaattggtgtacatagattctgggtcggggtctaggtcaagggtcgggatccgagtctgagtttaacattgggatttaaaatattaatgaaataaaatacaaatatactataattaagataaataacatgttttaaatttttttgaaagcattttttttcttccaaatttttaatttattttaaaaagtataaaataaaaacaattttttaaaataattttctgaaagtattttcacatttttaattaaaatataaaaaactgtttaaaaaagtatttcacaacccacccttgattattattgttattatttttctgaatgggcttgttcctatctctactctagccataaaagtgtagatattaactttagaaaaaatgccaaactaaatggtaaaggccatattcattggtttcagggccatgcatgtctattttttgcagtcagttctgaaaagtaaaaaaaaaaaaaaaagcccaaaaaaactggtgttgttgagaactctcccaagaaggtgcatgaaaattggatcacttttcaatttgggcttcctgagcaaggtcaaaacactgaaagtaaaaagaaaagaaaatgctttattcaaaagaaaagatagataaaggaaaagaaggatgagttgtcttggaataatttgttaattattgttaatgctttaatgctataacataataaattaatatacacactactgtattattaaatacttaaaaaaatcaggtccaaaatgagatcaaaatcaaacgaggcaaactttcagagctaagtagtgctagatttcataatgggtcacggattaatgctaggtttataatcaagaacatttactttagttactaatgtgtgacaaaaaacttttagttttgttcctaacacccttccatgctaatggactaattttgggcatcagtttattattattcacctaaacaccattccaattttcaagcgtattatttatcaatttcaagctcatgttgtcactaagactaattgggactcactcgatgtttaggctcaaaagggctatttctcatgtttttacaacatgatttccaaaattatcatttatatcttcaatttatgttcagtgcgagtgagcacagactagaagtagtcccaaggaaaaaga

SEQ ID NO: 37298 - DNA, 2883 bp, Cannabis sativa
attttatttttattttatatttttgaaatccctctctctctctctcttagtttatatatatatattttttaatctctctctaccattgtttgtcatatatggcctttatttcagtctataaatcacgcacaattcacttcatttgaactccctcagctccaattcttttttccttttctgcaacattctcttttcctgtgaagaaaggtaaccaaccaagaaaccattactatggaggagttgggtttgggttggtctttatatcaagaggtgggtcattttccatacttctacatattaaagttgtcatttttctccaatctcttttgttttctcttctgggtattgtaaattttgctttttaaaattaccatgttgataatttaaccttagttttttcgtctaaaatggcttcttctttgggcattttaaaatggttattccatttcgtactcttcaagctaaacattagttttagtacttgtgagccatttcagattgaatcattgccgccaattatttttgagttttacctccttttcagattgagttccttctactgttgcattctcattagaattctcccttttgcagttatcgttttgtccttttttttcccctcatttggctcttgtgattaatgttattttaccatacaagtagcagtacatattttgttcatacaaaaattctttaagatatatatatatataaatgtatataaatattaaaagactttctctgtcttgccatggtcataacatctattggtccaagcttattgttgtgtgtcgttattcatggaagcctttggtatgctatggcattaaatttttagggcccatgttcacaatttttgttataagggtaggtttaatggcgactatcaactttataatatcaatttctctttttcttaaaaataaataaataaataaatgataataatgatcgtttgaccaaaaaattggaatctcaatcatatttttatttgttatgttcttcttcctaactttgaatttgttgttcattaactgattttatttcttattcttatctcaggcttctcagcaaaacataagcgcgttaaattataagctgcagcgcaccaaagttgagctggaatcagtgaaaatggaggcaaaggcacaaatggaaaagaatgaggaatacctgagaagtttacttgatttcttaaaaactgcattgaaagaaagagatgaagcaagaaatcagctgcagaaagttcagtttatgttttgtctacctcaaactgaaaatcctatcttaatgccttctgctaaagcaaactcaagcataacagaatctaatagtctttctgagacttacaatcaccattctcatggctcttctcctgttgaatcgttttttgatgctgctgctgtttcttcaccagaattttctaacattaatatggatgattcaagccaaatggggttctccatgtcctctgttcctgccccacttaacattgatccggcttctgttgtgattgagaatctttccaaaggaaaacctctgcctgagaaaggaaaactgttgcaggctgttttgggtgctggtacactccttcataatcttctcttggctgggcctcttccgagttggcgcaacccgcctcccttgcaacccttcaagattcctccagtttccattaaaggtaccggtgaaggttcttcagggtataatcagaaaccagttgacaactcctatgtgcctcaaaaggcagttcaatattcacagtcatgctcagcctccatgttgaatttctctggtggcacttctagttctagccttaataattctactgtgttgtctatgaattccagttataatgaccagatacctattgtgaaacggcaaagactccattgaaatcattttagtcttggttcttcttgtaaaaatggaaaaagaaaaccagatctctcaggttgatgttgatgtaaatgggatacttttattcttatggttttgatctttaaatggcgtagcattaagtctttagtagtttatatgtcgtttgagtcatttgtaaatcatattgtttgtcaaatttgttaagcccttttcagccaaaggttcaattttattttcgacactacctcgtttttagatttattctataatttaatttagattggaagtggaattcaatttttgttcatgttattgaaattgtgaatgtttaatttcaatgttggtatggaaagattcaatccatttttatttctaacttcttagtagatctgattcttcatcaacgtctttttgtttatacttttatgcacaaggcttgagttgaaccctcgacacttaaaacgaatccttgtccttgaaatcatctagttgcaattgaaaatgtggcacctaataaaaatagaataggtgggagaaaaactaagaacactgttataacttattatcaccagtgttgaaacagcaatttaaggataagaacttgtggagaaagaggggcattttgaaaggaggcttcccttccaggtggatctaatgccttattgtgaatttatgtccctaaaaagtattaacacttgcttacgaagaatccggaattccttcgagaaagtcctgcacatttccaaaagtctactgtctaccttccatcccaacttccaagttccaacacccaaacactactccaccacaaaacagtctgtgtccaatgggaatggaatgcatttttattaacccttaaaaatagcattgttaggtaattggagtgtctaccctctattgattggatagtcatattccataaaatttagggcatttttcatttatgtacaactaaacttattatattacaatatatgtcaaaaaaacatatttacataatct

SEQ ID NO: 37299 - DNA, 4228 bp, Cannabis sativa
tatcaacatgatgcttaattaatcgcacttacaaccctaattaaagaattctagaagtgtaattagttgttaactattttatttataattcatgtgaccttaattctcttgtactaatacaaaatcacgttatatttacataaattaattaattaataatttaacaatttaaatatactaataataataaactaatacatttatttattcaatttaaaaaataattaatatgtttagatgcttttaagacacatttctaacatataaaaaggtaaaaaaccccgatttcatattttcatattcgaaaatttcacctcgactctatgatcctaacgagtattaggaagatttcaacattaattttttttttattattattttttgttgttttcaaagcattagttttgtatttttatcaattatcagctgcttatatggtttattcatcatgatacttaataatttgggtatttttctttgtttgcactttctgttccaaattgtaatttattagtgaccaaatgacatgtttctttgtctagttaaaacagcaaacgacatgttattttcggaaacaaataataaacaacatcaaaagaaatctagcattataaccatttttttttttgtaatgggtggggaaactaataataaataacaatcataacgaatatgtaatatataaatatagcacacgcagaaagttctttacatggcagcattataattacatcatttaaattcaaatttaaaagaagaatctgtcctttttttttttttcttatattaacaaaatgaatgtagacaataagcacagattaatagttatattaatgaaaccacaatgtatattaattttggtggctaagggaaaacctctaatacatgggctacacagaagagaagaacccaaaagaaaaagagtaaaataacaaatgatgggcttgagcaacttctgggtatgggctctggtgtggaatgtgcatattcttctagtataatttttgtaacccataaatatataaatatatatatcatcaaaatattatacggaaaacaaacataaaacaccaacaagtgtgtaaaaataaaataaacccagctgtctcttcggtttattattggtaaagggtattgccacatggcaataaatgggctccaaagaaaaggcttaagtggtaagagtactaaattctggtctaatatactcacaatcatgatttagtgttgtagaagtgccacacatataattaaacttaaaattttaaaatacactaattaataatctgtatggtacgttatatatctggatttgattttgacttgatgattaacttatgagtgacttaaatatgtatgagatggttgaaaaaactacattaaatatatcataacaaacaacctcagttgcatggcataataaatatgttattatttatagaggtaattgttttgtaaatattaaatagtgttggaggttcttcaagtgaagacaagccttgctcatctgtctatcaaaaaggatatcgaataagactaaacaacgagggcaaaacgtgatgagtgtgacacaacatgagcactcagctatgtttatattagctatacaacaaacagagactatgaaggttttcaatatttttgtgtcttttttcactatatatctttggttatattggagctcactcaaatttattctagctagagagatttttttataccctacaaatttctcttgtgaatatttatcttcatattttttttaacattgtgaatattttcttaagagaggaacgacaactgatattgtaacagagagtgggacaaagtggccatcatctcgtgatgattagtagctattgttttcccccacacttatagagtactagtactgaattcctctatcttttgttaaagtgaggggaccatatatatatatatattatataagtgtatatatatatatatatatatataataattgaatggattcagtccatgtttcgagtcttacattgactcttataaatgaacatattaaaggctttgaaaattaagtatcatagtagtttgaaagtttattgagtcatttatgtcatacatatatacttgtataaaattaaatctcaatacacatgggatgtcaagagctaaaatgtaacaattgataacactagtttccaacttatatattgcttaaataccaacctattaaatagtacatgacattaatggaggggagacatatatatttatagagagagagaggtctttatgaaaaaggacacacaaaaatgtcactttaggacagttcaatataatgttgcaaagatacttagccacccgttataagaattacattaggtatttggaatcttattttgaagtaacgtaaacccaatgatgaatatttacttttagaacggcagaagtgcccaaaagggtccctagagctttgaaaacacaatagccaaagacccttttgggaggcagattttcccatccaagaaaaatataaataatgaaaaagaaaaaggaaagaaatcattgtatatgaaaataattttatttaacagttttacagaagaaagtaaattaaagtagtatagggcgcatggcaaagggaccaaataattgttgttgatgaagtgatttttgggtcccctttgaagatggcatggttagggcatcatccatcaacaagcatagtaaaagaatgggacatattgtgttccctcaaacttagctttcttttgtccaatttggtaccaaaaccatcttatgagcatttcattacttttctcttttattatatatatgcatcagttgtaccaatttttacattcatatagcagtacttttgaaactaataaatttctatctctctagcaatacaaattcttctactctatcatttcatatacatatttaaaagttagtatgggtgcactattatactattattcttctactctatgattttcatatatagttataagaaactctataatgggggcacattttatctatattgattagggcttttctatatttatagcaatttgaacattatctctcaaattatttaattaagggctctttttaaggtatatatacagaaaaaaacaactaaattacaaaaatattctgggttgtccctttaaacatttatacaaacccacaaacaaaatattataattatatctcttattataaactttcagccgcacaaactaaaaatctcaccaacgcaaacttcaatcgattaacccagtaagaaaatctaaacgaaactataccaggcgaaataccacgattaatttcgacaaactcacttaagaagaagatcggaatcaatgtaaacaaatatagtttcgtattgatgaaagaaagagtagaaaaactggttcgaaattaaaatttaaaattccaatttaattcgcaaataactaatcctactaatatcaatttttaaattcataaaatgtagatatctagcaagtagatctggagctcccaatcaatccaaattaggtatagtacaaaaaacaggaaagatgcaacaatactagagctaatgtttatcttgtggcattcacgttgttttacagattttcaatgtattcatattaatcacaaatagaatagtaaattcatatgtatgaagagtcacgtaatactattctggttttttatgtttaagtaaaggttgcttcatagttgcataaagattttgctaacgctctgaaacttgacatatcaataattacaaactaataccataataatggtgtttatcaaatttgcaagtgtttaatattgtcagtgaaagacaaatctctttaagtaaacttctataacatggttaatatgaatatattaaattggttgatatttaagttggtttaagatatcttagagttgtttctctacatattgctattaatgtacaattgattgttcgtaaatggaaagaaaaataggaaaaggtttcttaaatatttggtttgaagtttggagccgaaatacacaaatcacctaatgttgaagattgtcctagaattccctatgcaacatgtcgcctaaatcaccaaatcaatgtcccattttacgtgtatttgcatgtttcatgcaccttccaagcgacatgtcgcccaataccagacgatattacttggagcctctgcctaaactaagaggtcccatttcatttaaggtttcgctacta

SEQ ID NO: 37300 - DNA, 3332 bp, Cannabis sativa
  modified_base (2468)..(2472): a, c, t, g, unknown or other
tctcttgccttaagattaaaagcaaaaggtttctgcccaaagttaacctgcactctgcaaaggaaacatgtatttaagaaaatcattctcgtttgcactagcaaaataattatgatcgaataaatggcatgtgtgatgtggtaagcaataatgcatcaggatagcatgtaaagaatcatcaactcaaccacaattctaacacctggaagatcacacgtaaaacctattagttaaaaggtaaaacttactttcaagccaaaactagaatcatagaaaagaagttgccaggaattattccacacacacaaaaaaaaaaccataatcagaatttgaaattcacaaacaaaatctaaaacttatctcctaaatatgtagtaattaaaaactaactactttcaagcaataagaagattaattatttgaaaaaggataagccttatcttactcttcattttgactatgaacagcaatggtaggaaacaatggacccttcacttccttgaaagctgtccctactacagccccatttttactggcatcaacacaaaagagaagtacagaattttaaggcagagaacagttaataaaatacaacaaacaaaacggtaaatgcatccaaaatcaaattcgacaaataaaatctcttccagaataaatgaactaagaaatcaattaacttacgtaaaaaagtattcctgtgatgcatagttaataccacccccaactatatcaccagaagtgtacgtcggtccaaattcatcactcttgcctggtccacgataaagatttccatcatctccatgataaccacaactgtttgcctcccatctaggaataaatatgttcatcaaaaaagtgaaatataaccaatatatacaaggaactgtctactaaaagaaagattcgcctcatgaacacaaagggctgaactcaaattcttgagtttgccttttctgttctactttcctacttagcaatcaatttgctccattagtgttgcggtttattttgaaatttagtccaaataactaaagagtattgaccaaatacatgaagaaactacataggcttgctgtaataaaaaaataggttaaccatgtctctaatctctacaaacctaaacagtatttttacacgcaaacccagaaccaaatagtttaaattaacaaaaacaaaaagattgcaataatcagctcattgatcacaacgaaaccaaaaactttgcattagtatttccgtcgatgagcatggataagcccaattaataaattctcagaagcccactttttctcacttcactttcccggcaatcaaccaaagcaaaattattaaaccaaatattcaaccaacaccgaaagtaaggaaatacgattctcacccaggctgcctccgcatcttgaagttctcgctagtgaaaccaattgcgatttgacccttagttccggcatccttaacaaaaatctcgaaatagtaaacaagccgtttcaccggagccggtctattaccctgaacgacaccgacgtcgtggccgtgaagattaacattagtgtacttcaccgaaagcttgtcgggagagacaacaaggaatccaccggagctgttaatggtgttgagctcggtaggagcctcttcgtcctcgtccatgtcgcatagacctcgagccaagcttagtcgagagcgatcgaggaagtagcgagcgagatcttcaccattagtggcgttgatcgctgacatggccttcagtcccgaaacctaaccaattcaaaatttcatatagggaatcgaacaaagacctgaaataattttggctcaagatgaaaagcttacaaattggttgaagacaaagggagaaccagagcagagtggagaaaattcccgctttgattcggtgtgtgtataattttctccgatgaaatgaaattggagagaatagaagtgcaaaagtagagtgttttgtaaaactagcatcaaaatttttattattaaaataattttacaacaaaaaaatggggaattagtcgtgtactattttttttaaaaaaaaaaattacagttttaattattctaattgttactttgatagttttgcgattatcataataatacagaataaatattatttacattattagtttaacaaatttgacaagatgaaaaataagaaagaattaaattaagagagtttgatttacacaaaaaattatatgttcttggaggaattttgacaacaccgaataaaaataaaaatataattatttaatgaaaatgtgcgagtacttaatctagaatgacgagtattcaaagagcaggcatagacgtactagaaaatataatgaacacaagagaattatagtgttagatcacggtctgcttagtctactattgcaatgattttcgggataattgcggcaaaagtccccaaaagtttagagttgatgcaggttaatcctcaacctcgaaaattggcnnnnntagtccctaaggtcgctattttcgtaagtccgttggtacccaatttaacagagttgttaaatactgacaagaatgccacgtgttcaaatattattgggccagccataattttaattaaaaaaaattaaaataattaaaataataaataatttattcaaaaaaaaaattattaaaaaataataataatttttttttccttttttctttttttttttttctcaattcttctccaattatttttcctttttccagatggtttttctttaattttttttcttcaatcttcttcacacattatactaccatgaccatcacagtgccaccacaaccaccaattacgaattcaattatcaaaatttgttataaccaatcaagaaagctgggtaaaaactcaaatctgaaattgcacaataaaattcaaatagctcatccaaggtcaagaaccatagctcaaaccactagaacgaaactaaatttgtaccaattttttcaggaaaaaaaacaattctcaaatctggtaaagggacataccatcgaattcaaaagcccaaatctgttctttggggttctgtcacttatatacaaaaagatctaataattttttcaaaacaaaaccaagaaaaaaaaacaaaaacaaaacaaaacaaaactggcattaaaagatttggtacctactacccagcctcaatttcttcatccctcttcttgcggtggacgtcgatgatggcgttggagtgggattcagagagtggtcgtcactgtcatcatccacggcggtctctgtcggcgagatctgatcagaaaaggtggactaccgccactcgccgtcgacaagatctgaacagatctaccgcttctct

SEQ ID NO: 37301 - DNA, 2542 bp, Cannabis sativa
ttgctcttttatgtatacacaataacccatttcacccacaaattatcttcttttttagcaatggtccaaacatatttaaacatagcagcaatattccattcagttacctgtttgaggcctaaaccccctgctgatttctctttgcaaatatttgtcaattgttaaatattttatgtacaaagcaaatctattaagaatgataatgatcaattccgtgacagctataaaaaattaaaatttaatatagttttttaatttaattataactaaataaaatataatgtatgtgaagcgtgatttattttctattttttaaataatatagagaaattaataagtgtgcaatataaaatatgccaaataatttgttttttttttaaaaagtaaaattgtagtgattcactttaaagaatagagtagaaatgtcaataaataatgttatgaaattattgacaaattggaagaaacttgaatctcatcatataatcatactactcgggaattataattattgtaatcatactcatacactgagtgtggctttaggattattgagatcatatataaatatatgtctatatagagtatgtacatacatatatagtcaagcacaaattaaagacataaacaccaagcaagagccaaaccaagaaataagaaataattatatgtaatatgtcatattatatcagcatagaaatgcttcttgaaggaatccatatgtagaacttgcaaacgtactgagacaatcaagctaccatcctcatcatcaccattaggattttgaagaagcacaaagtctccatcaaagtcagtatcataggtttctaaactcatagcaacttctttcccccatccgaaatcaaggtcgtacaacggaagcgtcaaccaactcacaacaccaagattaggatttccatagaaaagctctttgttatcatcagcagttgtactactcgactcttctccatgaagatcttgaaacaatctcaagtccttctgattcttcaaatacttgagattcgaccagatatactcgtttgttaccttttcaactgtttctcttatttttccggctgcaaaccctaatggattagacaacaactcacccgaactacttaaggctttcacatcaaacgaagcattgccgaagtaggcactcggcaagggcggttctatacggctcctcacgtccacgcaaatagccagagctgttggctgctctggactactatgctttcgggctttgcacgcgcaccgccaaatgtgcgcggctaacatctcataccgactatagggacgagtctcgctaactcgtcccttgttggctaacctcttcaacttctcgagctgttctttggtgacttttaagaaagctggagtcacctccttcttcttctcttctaggttgtccgattttccaatcaagagaggaaaatggtccagacacgaaagctccccatctgagacatcaccatcgtcgacttcccttaataggatttcccgatcaagaaacggcatcgttttgattggttcacctcgtgaaagagaggcccactcagagataaaatgtaatgcacttgggccgtcgaccacagcgtgtgaaatggttaagccaaggctaacaccaccacaagcaaacctagttagttgcgctaagagcagtggtagctcatgaatagggcgtgtatagtctacaaggggagtaagatgaaggtcgtggtaattatgctctgatgaacaagataagtcaccgagttcatccagtttcaaattacactcggcttcaacaaactcaaccccttcggcgttgcagttgagctcaagacgattaccggacggaagccggcgtaggcgacccgcgagtgggtagaaagggaccagagctcggctcaatgattgtttaagggttgcggcgattttatcaccgagcttaacccaatcttggggtgggcgatagaagtaaatagtgggaacatgtgtaatggtaccagtttgatcccattcagatagacatttgtaacctttccatgttggctcagctggtttcaccatgtagcaggctttcattttcagtgccatttcttcttttgttttttgcattacttgatttctaagtgtttttgtttggaaagaattgtttacaaaatatattatatatatatgctataaggtactgtttttataggaaaatttagtatgctgtatacatacttaatttcctaataatttgttatttttacaatattagagctttatattaattgttttctgctcatttttacgtttggtacgcaggattggactggactagattggattatgcataaagtaatcatgtgtttggtttaagaatagactgaacattttgtttattttttttagaaaaaaaaagaccttaaattaaaataaaaatatataatattaaattaaaattaaagtacataataataaataaataaataaaaataaatgatttgcattaaaaaataaaaattaaaaattaaaaataattaaattataaaataaaataaaataatat

SEQ ID NO: 37302 - DNA, 6493 bp, Cannabis sativa
agtcaagttcctgcatctgtcaagcagttcagaaaattgaatctagccactgtatatctccaagccaagagttaatattaacataaacctgcttagagtatatacaattgaaaaaaagatgatcatgagtctcaatttctacctcacaaacaggacagagaatgttttgaatagccataaaccgattcaagtaatcccgagtaagaagttgggaatttgcaatctgccagtacaagaacctgtgtttaggcacaattagtttatcccaaatggctccagcatagtcagtcgtgtcctcctccaaaagcatattataatagcttttgactcggaatttgttgcctttcacagcaaggctaagtctagcttcatcagtattgtctctaagactcaaaatcttcttgaagtatcagctaacatccaatttcttaggacagttccagatgtcacgatctctcaaataaattgagttgatccatttgacccataagcaatcttgcttgctagtaagagcccaaagaaacttagccaaaagagccttattccatttttttccttctcgaaatccaattcctccaagattttttggaaggcaaaccttttcccaagaagctcggtgaagcttactcctattcccttttgatccccataagaaataacgacaactcttgtcaatggcagttgttatcttaaaaggaatgatgaaaatgctcatcaaaaaattcctaattccaagcaacgccgagtgaatcaattgcgcacggccaacaaaggacatatttctactagcccaacaattaaggttcttgttcaatttatccaagataattccacagtctgaggctttccatttagtaggcagaagattgacccctaagtattttagagaaaaacaaccttcttcaatttggactaaatcaaggatcttggatttgacctcttcactaacccctccaaagtaaatatgagacttcgaggtgttagtagacaaacttgtggcattgcagaacttcatgaaggcttcatgggtaagtctcaccgagttgatgttacctttacaaaagataattaagtcatctgcaaaacacaagttagtcaagtgaaggtgcttgcataaaggatggaatccaaagccttttttactagaatagtagctaagcaaccttgtaaggtattccattatcaaaacaaaaagtaaaggggacattgggtcttcttaacgaaggccttttttctttttaaagcttccttgaattcttccatttaaaagcaaatggtagtttgttcccttcagacaagtcattatccacatgataaattgagaaggaaaacaaagcaacatgagaaagtcttccacaaactcccagtcaaccgtgtcataagccttgctgagatcaattttcatgatgcacctggctgatatattctttcttgtataacccttaaggaggtcttgaaaaatcatgatattatgagccaatagtctatttttaataaacgcaccttggttattgtcaggggagcacttctgaaagtctagaacagatcatcttcgagaagcatttgtagaatgtgttgcaacaagcaatgggtctataatcctttgcaaaagaggggttagccactttgggaattaaagaaatgacagtctcattcaagtttttaggcaaataaccactagcaaagaaatccaaaaccattatagagacatcatctctaattttgctccataaatccttataaaagccagatctgaaaccatttaatcttgggctcttggaagagtgaatgctgaatagagctttcttgacatcccccttgttagaaggcctaatcgagttaacttactgctccaaatccagacatttaccctgctttaaacaggcctcatcaattttgcttgaagctgaacttttactgcccataaaattttcaaaatgcttgacaaagtgtttcaccacttcctcaaagtcatcaaaaattgtgtcccccttcatgaaagtggtgattctattttccagttttctttttctcataacagaatgaaaatagctagtattttcatcactaaacttgatccaaatgaccttgctttgctgtctgagaacttgagcgaatctgtcctttgctgctaaaaaaacatgttgcatttcaaagactgaatgttgtaggataatattagtcaggttcatagctgcctcttcttgaatgttacgatacatctccttagcctttctataatccataactacatccctaacttcatgcctattgaaaatttcaaaggcatgcttgactctaaactagggctgaacatctagacccgcatatctgaaaacccgaccacctgccctgacccgctaccgaaaaaagccgaaaaatttaaaacccgtgtggtcggatcgggtctaacccgaaaatactcaacacaggtatcgggttcgggttttaaaataatgcatttatttagtcgggttttaacccgatacccgaacaatatacaattaaatttaaaatatatatttttttatatacattatgtacatgaatataagtctctctcagagctcatggagagaccaagggaagaaattagaagaagaagactcaaaatagtagaaaaacatttttcaactcggatttacgttcaagagtgggtaaaccgagttgggtttagttgcgattttccccagcaatcgagttttatgtgctgtattgattatggagctatccccattttccatatcatattctagagttggtacttatggcttgattggggttcccagttgtaagcgatggaaacttcttttagagagaaaatatctctcttattttcattatattcagccaaaaatggctactgagattgaaatgaatatatgtgtagggtttgtacatggataagtgtatatatatacacagtaaaataaaactccattgggtcgtggtggggaagtcgtcaaccaaaatatatattatatttttttctctgtgtacagtttttttttttagatgggtggagtttatttattttatttaaagtttaaactacttaaaaaaaaactataaattaattcaatcaagcccaaaaatattaaaaatagaaaaaatatggtatttttaaaaatcaagtagttttatttgggcccaaaaatgaatcattcggacttagtctaatgaaacctgaacccgaccacattaaacccgccaaatctgacccgaaatccgccaaacccgaccacccgaaaatcaggttcggttacacattttaaacacctaaaatccgaaaacccgaacccgaccacccgaaaacctaaaaacccgacccgtgtgcagccttactctaaacaacctctgcactaaactttcaagaccaaaaccagcaatagttttattccaactctccataactgtctaagcatagcctggataggaaggccaatgattcccaaatttaaaaggtttaacccgtatattattgtgctcataattttgaattaaacaaaggaaatgatctgaaataacctcccatttaaaacaagcatcagaattaggaaaatcatttggccagatattgtttataaaaattgtatctagtttagaaaaggttctatccccaacctcatgtttgtttgtccaagtgaagaaagaacccgagcttttgaattcctcaacttgacccaaggaaagcaaagattgagcatccactatgtctttattctgaattggtcttccaccacttctatcttgaaagctgaacatagagttgaagtctccaaaaatcacccaaggctcattcaacttcgcaaagacttttacgaacctccattgagttacttccataaactgttgtgataaagaaggccttgttttgaccacaaaacttcactttacagtgcactagctgtgcaaaatcactaataatatccacttgaacatacttagctttccaaattaacatgattctcccaaaaatgtgattactagaataaaaattctaattaggaaaattattcatcatcatgtcatgaattttctcatgtttcaccttagtctcaaacaaagctccaaaaccgattttattcaacctacaaacatcaagaatcgcattttgcttttcttttttattcatgcctctcacattccaccctattatattacttgctttcatcaagaattagattacagctgggaatcacaacctcatcagctgttacaacttgtagaacaacatatccattactagaacttacgatttttggagcttcctttgacatattagcttcattctgtctcagagctcttcgtttgggagtaatccatttgctgccagtatcaaaactagctattcccctctcctttgtaacctcctgagcattagacaattcctgaacaatagccaaataatctacttcaggcttattttctgtcaaaataactttccctggaatatcccctgtgccctgattaagttgatcattcttattttctatctttgtctctttttcagcaatcagtttattctaccaaacaactttcttttccttattatagttggcaactgtatgccccaagtttgcacaagctaaacattgttcgttcttgagtcacattgtcaatcaaaataggcttgccaattgtgctcactaaggcactaagattattcttaccccaatattgcaatcccaacccattcaaacgaatccaaactggcacaaaattaaccattctaaccgagtcaagatcatttgtccatggcctaagaaccacaggttttttgtcaaagtgaatgactccaacttcaaggataaggtcacggctagcttcatcactaaaattaacaagcgtgcaaccagagtgcattctaacaaccttctctactcccaaatttccccatattctcttaacaaatccatcaaacaccttaaaaggagggttaacacccagaacaatacaaactatagcatttttccagtatgatgcctctacctcaatctcctctaggtcaagtttagccacgagttgatcgccaactctgataggttcagtataagagagtctagaagaaggagatggtgcttagtttgacttgaacttactcgataaatccctagcactggattagaaatcagcttgctcgacttcctcagcctagcttactggtttcgggtatccacgaacatcttgctctacttcccaaagctctgttccattctcaatcaccaggttctcgctcgaatcatgaaactcttcgattatctctggttcagttatcacatcttggattaaaaggagatcctcctcagcttcattgcccaccgagattgcattatatttttactttttataattttatttaattttaaaatgaattttgaaaataataatgttaggtgtaccaatataaacgtgccatgtggacaagagtgtacacataagcagcccatagtgacagttaactgaatgacaccttaaatttgctactagttcagtagtttagaggattttactgccaaaatttgatcttggagggttaaatgcaagtgaaatgacaattgaaaaggttaccacagaaaactctccaaaatataataagttagaattatacctattattctaaattttgtccacctcacgtgacatgtctacataagtcaagacagaggacacgtggagcacaatcttgccaatagcaagacaaagtctccttacaaagcatgacaaaactgtcaagtagtaatcgaaaggagttaagtgagccgtcaaggagttgtactaccatatcttgttagccaaggggagcatataggccacccaagatgagcttatatggccgcccagggcttgggcagaagctagctggccagcagttgactttcaaaacaagggagggtccgttcgaccaaggaagcctgacctctgtaaggaaaaggtgtacaaaggttttcctccacctacaaaggctggcatccacctccaaaggttggccatcccatgcaaagacctggtcaactcttgacaaagctgacaggaacatgacctgccagaccctatctagagcatggctggctagacctcaacctgcaagcattgtatggccggccaacctgcatcctgcaggtgcatggttggccagattttccctagcaggacattgatgtgcagccctcaattgtggacaacaagccaagctgtgagttgggccttgacaacccacgaaaataccataaaaatatcagcaacttccttatatttaagggataatttagtcatttattatttatcaatttaatatgtaaataataacttattttacctatttctaaggatattatgcatgtgagctctactatataaatatcagtagcctatctctaaaaccctaagtcatcaggcctccaagctccctaagctctcaactctaagtctaaaaatcctaactctctcgtctcctctcttctacacgccctaaggtctctctctctctctc

SEQ ID NO: 37303 - DNA, 2180 bp, Cannabis sativa
aaaaaaaaaaaaaaccaatcaaacaataaacatctatatttatttcaaattatcatctctattttgacagtttaattgtataattatatctacccaatattattttgtcactcctaacgtacacccactaatcacattttactattaaattgtgtttagccatagcaagaacactcaattggtaactgaaattctacaaaaacagaaatgatccaaagatttaccaactataacttttacagatcactattaaaaacagcgtgggattgggaatcatggaaactaggaatgaacgccttttaacatttaaacttaaaaggtgcatagagaagtaagtaaattgtgattatttgatcgggagtaaatttgtgacaaattcaatgaaggttttctatttcattggttacctcaaatggagtaatgagataaataaatagaagaatgaagactgttaataagggtgggtcctaactcctaagctaatcaacatttgtcccataacatcagtcagccgtgttacgtttgataccataacatgtcatcagtgtctgtgtctctgtcttcatctcactatcagtctatgaccgtcgctcgctactaatcgaaaaggccttcatcatgccaaatatctactaagaaatccaccatctcctgcataaccaaatttaccaaaacttttgagatcaccaatacactataatgtttatatatacatatattatggtattttcgacaagattaatgctaaaacaccaccacgatgcgattgaatacaaaatcgacacccactacttattactaatctaactagtattagacacagtttactatgcataagcataagctgtcacctcatatggtggacatttgcctaataacaaatctatttagacacataatgctcacgaaaactataaatacacaaaccattttattcttattttattaatttataattttaattaacacattcaattgtattttaaaactataaataaaataataataatataatatcaaagacaggtaaacagaaaacaatattttgtaaagggtcagttttagtggattttgtaaacagaaaattgttattagaattttctaaaataaagagtatggtattcagcaataacacataactaaaacaatattttcactataattacgcaaacggactcaatattgtaattgtagactaaactatgaatgagtactgagaggcttacaggtaaaggaattggctcaggaaaaggttcatgagttgagagtaaatcttcatatgcagttgaccagctgcatgaaattattacttgcattatatcctccacatacttattatcttagtcataacagaattagaaaaatagcaaattccccatatcattgaaaattgcatcacaggataaaacacaagaacaaaaatagctttagggcaagcaatgaattttttgatgaggatgtaccttatgattggatcctttgccatcctttttacctgctgagacttatctccaacccactcttttctactctcattccaagcaatggcagctgcatgatacatcagccagattatacttcagagaataatttgaaccagagtaactatgtactaaagtactacttggtaatatgatgacaggctttgatttgctgatcaattagggaacatattatttgtgaacatgtatcaagtaaaaaaggggaaaacaaatgtaaaaggcaaccttgactaatacaaattttatctgaaaaaaattggaaatgtaagacagttggtttcaaattcaattgcttctctttccatcttacctagactcatcattcgtatatttttctaatgccattctaagagatcatacacaatgtttctattgcacgttttgtatgttttaagctagcagtgatgagacaaaagcaacaaaatatcttgtgcattgacatagctttgctgtgatgggcaaaatagtatctaaaaatacttaccgtagttgacaaaaacagatgtctttatttctttttctgcaggttttttattggtattggctaaattggggtgttccgaggcttgttttccattggaaggggagtttccagcattcacctccattatttccataatgaattaccattcattgccttctacagcgtcacaagaagttaacaagtaaatccttcca

SEQ ID NO: 37304 - DNA, 2563 bp, Cannabis sativa
tgatatttaacggtaatatttaactggcatgtcaaatttgcaaagaaaaatcaaatttatataaaaaaaaataaacttaagaaagttttgccacttaaaaaaataaaagagttaaatgtgtaaaaattaaaacaaaaaagaatttcaccacaaattcctcttgcaaatatagcatgcactataatataagatgactagctagcaataatacatgtgttttctttttttgtattgacatatatggatctaccacacacgtacttacttattacaaatacgtaaattaattaaggtcttttggcagagcctcaatttgacttttactctcaaatattttaaacgaaaactttcttttttaattagcagccgtcacctttctttttgataatctatatatttctttgttttatgtattattattctttatgatggtgatgttaatcgccacgaatatgtaatatattgcttttgctttcgctttcaatatattacactttttgaatttactaaattaaattattttaattcaggtgaaccataaaaaaaccccacatgatctaatcttgatcccatatgaggaaaaagaaaaccgcgccattaataaattaaaataaactatataattataaagtcattaattaattaattctttttaattataattctacaggatgtatttgtagctgggacaaacacgtcttccatcaccttagaatgggccctagctgagctaataaaccacccaaatataatgaagaaagcaatggatgaagttgattctgtagttggaaaaacaagactagtagaagaatcagatgtggtcaactttccttatattcaagctatagtgaaagagacactaagacttcacccacctggcccaatattaagcagagtagcttctgaaacatgtgctattgatggctatgagattaaggaaaatacaagattgttgatcaatgtttgggccatcagcagagacccaaatcactgggaaagcccacttgagtttaagccagagagattctataatgaacaaggaagtgaaaatttcaagcaagttgatgttagaggacaacatttccaacttttgccatttgggagtggaagaagagtgtgccctggtaccactcttgggttacaagttgttcatacaagtcttgcttcaatgctccaatgctttgagtggaatgtggaaaatggaagtgttaatatggatgagggacctggcttgaccctcccaagggctcattccttggtttgtgtccccaaggctaggcttactcccttgcccttgtgaattttggtgtagtgtaatctataaaccatacttaattattgatataaagtccttaattagtacagtaagattgattgaggtaagggaattagggaactattctatatttcttatgaaataatgtacaattttagtgagtttattatgatcgtttaacatttataagtcttgttagtcggccatatatggtcaaaattactgtgctcagcttttttattgcgaatagtattcataattatgagtgtgtgctatagttttatgttcattgttttgcactaaatgtttttccggtgtttttaatgaaatttgtacccatttagatttaatatttttatgaatacggttatgtttatatatactaggtagcatgtattatttgttaaaatttgtatgttaattatattttttttatcaattacttttaaacaataatataatgtgatacagttcgtttcttgaagttaagatgtattatctttgttgtgttatttaaatataagtactccattttcaaaaaaaaatatataagtactccatgtaatttttttcaatgttatgaactaataaaacaacacaaaaagatcaatatcatacctaaaatcatatttggtttggtgtaataaatataaattaaaattacttttataatttttaatttcttttaaaagtgatgtataatgagattacatgttagaaataattatataggatcgatttgcaaagcgaaataataaaaacatatcgaatgcatacgcgaacaacgaaagagatcgaaatatctctagtcattaataattttgagcttcaatcttgtgttgctttgaattggataatcgcacttccaagctctttctactctcttagatagaatttttagtttgtacagaatgagtgagaagctcgagaatcgatactctatatttataggtgtgatactctctattagtatttgcaccacattaattatcaaaatattatgacaattaattaattcagaaaatcaaattgagaaatgaataattcggcaaatcgaaaactaaccacatttagaatattcattatcatcacatttaatttgaaattaaaaatcaatgtaattgatgttgtacacatatagaaaaaatattttaatgttctcccacttggtcagcatttagttttaccacttaattaaacttaacgtcctcattacataataaacacatgaatcataatgataggtcctcattatatgtcgagtattatcttccatgtattacgata

SEQ ID NO: 37305 - DNA, 6154 bp, Cannabis sativa
ttgttgtagaattcaaacctgaataagttgttatcttgaaatttctctcacctgttccgacatttttaagctcagttctatgtggtggacctgatggcttttctctttgcacagcattgttgagagagctgtaaagcatagtaatttgatgtgccaaaaaatggtactttcacttccaactaaatctaaggaagtattaggttagtattggattggagagcttaaaaacgaaagaagttaacttagaaatccaacactgctgttatagataatacattagtgagtaatagtgctatagaattttgagataacacacttgtatttatttattttgcagtcttccttcttactgaataaattttgtttcttataataggaaaactaaaagcccttggtctttttagactttgctttttcattctatccattttcccagttagttttgatgcatgctggatgatccacacctcatcataatgagcactttaagtgttagagaagaattaaaaaccttccaatccatctattttgtttagttgttcctttgagaaattatgattggaagctatttgcatatgttgctcgtgctcctcaatttagtgaagagtttgttagtgttgagtaacaggacaagtgccacaaactatacttttgctgtctctactattttatgagaacctataaatgatctgcacttccattataaagttccttttcccctacacttttctttgtgtgtgtgggtcaagttagttaagagtttgttagtgctgggtaacagggcaagtgccacaaagtatacttttactgtccccgctgttttatgagaacctaaaaatgatcagaacttccattgaaaaagttccttttctccctaagtgttgtgtgtgtgtatgttttatcatggttttaagctattgtcatttattaagcttttcaatgaaaacattataagctcaagtccttccattgtaccgcatgaactgaatttatgcttagcaggttgcagacttgaaagatatactatcagaaagaggagcttgtggtgttggattcattgccaatttggataatataggatctcaccaaattgttgcagatgctcttacagctcttggctgcatggaacatcgtggaggctgtggagcagataatgaatctggtgatggttcaggtgtgatgacttcgattccatgggatctattcaacaattgggctaacagtcaagggattcctacgtttgataagttgcacactggtgttggaatggttttcttcccaaaagatgatgaaattgtaaaagaagtcaaaaaaggtagttgctcaaaaaaggattacataaagtgctttgtgttttcatttatacaagggtcttgttttgttgagtattttaaaattacctacatacaaggtgggaattataaaagcttgacagtccgctggtgtatatacttctaactttttttccccttgttccactagtcctggtagttagttaagaaatctgaaagcaggaaatgggtgagaaaagaaaggaactactagtcttaatgcttgccagtcctctggtatatatataccttctaacagtttttcctttgttccactagtcatgggtagttagttaagaaacctggaagcaggagatgggtgagaaaagaaaggatccttattttagtctgtaagaaatcataatttcatttattagttgcagttatatgcagcttttaatcttgtagaaaggtttatttttatctaatttattgtcactctctttctctctctctccatatttttttagtgcaacttctatctgtacttaattgtccttttctcatttgtactttctttctacctacacacaccatccatagaccaacgttttattggttcttactgtagcaattctttatattttgtgctgcatactgtgtattatttgaccattaatttctgatttcctttgtagttattgtcaatatttttagacaagagggtcttgaagtcctaggatggaggcctgttcctgtgaatatgtctgttgttggttactatgctaaagaaaccatgcccaacatacagcaggtatttgtaaaagttgttaaagaggagaatgttgatgacattgaacgagagttgtacatatgcaggaaattgattgaaaaagcagcacaatcagaaagttggggaaatgaactttatttctgttctttgtccaatcaaacaatagtttacaagggaatgcttcgctcagaagttcttgggttattttatactgaccttcaaagtgatctttataaatcaccttttgcaatttatcatcgaaggtacagcacaaatactagtccgagatggcctcttgctcaaccaatgaggttacttggtcataatggagagatcaataccatacaggttatttttgttttcacttttggtagcctgaaataacatggcctatattgcttgttaaatttcaactagaaactttacattgacacaaaagttatatacaggggaacttgaactggatgcaatccagagaatcctcattgcagtctcctgtatggcgaggtcgagaaaatgagattcgtccatttggcaaccccaagggatcagactccgcaaatcttgacagtacagcggaagtatgcatcacccatttttatactgctgtttcattaattacttgctgagtgctctgattaataaagatccattggatgtagatattgagaaaattataggtcatgtagaaactaaggatattattgaaagcttttttgttcaagatgtagagaatatttttgagtgattagcaatattatgctcccacaggaaatgtgtaactaaatgatagtccttcatcattaatgtagtgggtatttcagtttttcaaaatttattcttcccccatatatatcatgttcagaaagaacacctttcacgtgaaggtgctattttaacatcatagccatgactttaatatggagccatgctctgctgttggctatgctgttaatcatatgttcgtttgtgtatgtaataggatatgttatacaaatgaacatattataacatcattctttcttctgggggatgtgggggtgggggagtgaatatcaacttgcttgaatttcctttaacttcatccaagctgacttctttatatcattattttggtatctttatgtgttgcttttcactattttctcttttcttttcagttgctgattaaaagtggtcgtactcctgaggaggctttaatgattcttgtaccagaggcatataaaaatcacccaacattgacaatcaagtaccctgaggtattttaatttgagatttgttatttaagtatgatgattgagtacctgaggtattttaggttaatattttgtatcaggcactgcaatgaaaaaccaatggtacattattgttttggattgctatgtaaagtttgcatatataacttacaaaaaatggtttcattctttaagcacttaacctcctaaactttgatttcattgtctatcttgaacttttcaggagtctgttaatttcatgattctctccaaagttcccaagccatagccttatttatactctcccttgtagtcttgtttagtgatattgtccaggataaataacttattacattattagttctagggaaatttaggcttcatgatttagagtgctttactttttgactagtaatattcatttttttttgattaaaaatattcatgttatgtaaagaaatattacaggcagaggatatttatatgtttctttctgatgcaggcagttgacttttacgattattacaagggtcagatggaagcttgggatggacctgccttactattattcaggtaattttttccccagtgtacatgcgatctaaattgatcagcagttagctagtggttttctttaattctctagagttaaaagtagttgacagagttcaattatattgttcagaaaatagaacaatagccttgtctcagtggtagtctttatttattatggctcttattacaatattactgttaatcggatccttaaattcttcataagaaaatctagataagcagctgataatagttatctaatattgtctggactgataatggccatgatgagtattgtagagtactggagacatgccagttgaccatatcattcatagtgtcagattaaatattaaagagaggcaatcaaacattcccaatcatggtcctagtgatcaagtgaatgttacacatgttactaaaagtactctgtgtgtgtgcatagttttacttatgataattgtataccatttatatggaacagtgatggaaaaacagttggtgcctgccttgatcgaaatggattgcgcccagctaggtattggcggacatcagacaatgttgtttatgttgcatctgaggtgtgtttagttctactttatttcttaaatttcttttatcaaatgtcatcctgtataattggctagtgcacaagtgtctttcatatactgacttaagaggtttcctacgataaaccaatcaaatttgagttcagggtactaaaatatgtaagatttcaaaatgtagggtaccaaataaacattattgaaagcatggggtaccaaatctgtattttgataaaatacatagtaccaaatgagtgcacaccctattctctgtctataaatattcaaatataacaaatatttagaagcttcaggtgcatcagttatttcctcttaaaaatgcttttgaatggtgtgtcaaatacgatggcaactgtattggctttgtttgttaatagagtattctgtatttgattgttatggtatttacctcatctttcaagttctcctaccatatgactatgaagccattaattatgggtcccaaattgatggggttaataacatggggcaaggaagttaatttttctataacatgagaaattctaacttcttctgttagaaaccgattaaccagtttttcttcatttgctttgtgcattatttacatcaaataatgtatttccttggagtcctttcaaattattcgattttggtaggatgatttgcttgctgctgcattatttatttacaaaactcacaaaataagctttggcgttgttttggagtctaaagctgtttcttctggtcttcttcaatatggttatgatttcagacttcatttgtgttgcttaggttggtgtggtgcctatggatgagtccaaagtaacaatgaaaggtcgtctgggtccaggaatgatgataacggtggatttgataaacggacaggtttgtgttgaagttatattgcttggtttttttgtactgttcttctaaaagaaatatttcttctaaaaagtatttgaaaacttttctaaagagggttaatttataaatataatatatatgtctgtgtatgatatttaactctcttttcttttactgatacaatatatattatacgtatttatataattgcattttgttggcttccttctgtgtatgatttttaactctcttcccttctactgatagattattgttatatgttatataggtaattgtacatacaatatatatttatagactagtatccatttgcatttggttggttcccttaggttggacgttctggctttttggatattccaaagggtagaatttgttcagtgaataggataattgatattctacgaccaagcgaaataacttttaagcgacgagtgctgattgagttgagagattggcttgtgaatagtttcccaattttctccatttcacaaagttgttttcatgttttcatgatatttgtccatacattgagccttttacttgcatactacacttttcattgtatattggaggactagagtggtttgttctaaatcattagcctttttaaatggtaggtgtatgaaaatactgaagttaaaaagcgagttgccttgtcaaatccatatggaaagtgggtcaaggaaaaccttcgatcattgaagcctgcaaactttctctcagctgcagaaatggacaatgacaccatattgagacgccaacagtaagctctatgccattggctgatttaaaatgttcccaatgtgtgttattttgtgaaagagatcgtgtgctttttctttt

SEQ ID NO: 37306 - DNA, 5884 bp, Cannabis sativa
  modified_base (1097)..(1098): a, c, t, g, unknown or other
  modified_base (4932)..(4936): a, c, t, g, unknown or other
  modified_base (5428)..(5432): a, c, t, g, unknown or other
acgtggcttggcacgtaacaatcacctagtatatatatatatttctacctcaaataaagaataaactaataaaatgttaaatatatatacaaagaaaaaataagaaaataatataaaaatcatatataaataagataatgaaacagacaaaaatattatacaaaataaaatattcttttaaagggtataaggtagacaaaaataatactctatatgtaaagaaaaaataaaattataaacaataaactactttttttaatgagaaaaaaggaactattaaaatcaaagaaaaataaatatgtgattgaaaatgtttggagtgtgttgagtgtataagaaaaaaaaaataagaacaaatttactgccaaaaattaatggagtggatttaagtttgacaaatggaagaaacttatactttttattaactttttatagtaccagtataatttagttttttttttttttttagaaacttacaaaaatactaaaattttggttaaattttacaaaaatactatcacacgaaatttttttcaaaaatattgtgttttaataaaacaacagtggaacacaaaacagaacaactaaaaacaacagtagaacaactagaaaacaaccgtagaaaaacagtaaaaacttaacacagtacacaggataaaacttaccataaaaattttctatatataatatataataacacaagaagaatataatcactcactcccaattttaagtttaaattaatagagatcaccataacttgaacaatttttacaaaagtttattttccatcatctctaagcactaaaagaactcttataaaaataaaatttagaattatcaagatttaaaattttatattaagtgcttttgctgatagaaaacttcatatatcaaataaacacattaggtaactatttataatgtttaggatcacacacttacaaattcacaccctacatctcatggttgttaccatctcttaattgggaataaataggcctaaatgagtcatttggaagttatgagagctgttagaatcatcctcagagttgaaaaccatccatacaacaaagctgaaaaaaaaaaaaaaaaannaaaaaaataaaaaaaaaacagtaactggttacttgttaccaagcttttcagcttttctaaataactttctaaatcattcccccgttgattttatttcatttatacacattataaataataaatataaaacactaataacaactatattttcattatagctttgaattgtagaaatttaacttaacatctctttacacacttagtgacattataaaagttacaaaatataattaattctacctcatatattacaattatttacacttaattaatttgttacttcatatatattttttttaacatttacatcatatatttaatcgatatattatattattttatatattaaatctctatcatgaaattcatggcaataaaccagtggctcatttgaaaaatctgtcatttaacgagctggcatgtatgcatacatacatataaaataaacttctctttgcaaaaatgacaaacaatcacaaattcacaatagataggttaggttgcccgttgccctaccttctaggctccgctctccccaaattatacatacacctcaatgtaagagttcatcatatttgtataagttaagaagaagaataatatcatggaattataataataaataataatttgtgtcatatcaagtaatattggagatgtaacaaacaattaatgtttactagggaacgaaatgattgtgtcatgtatcagaaaaatggtccttatttcctagccaaagaaaaagatgataagagaaactggtccagcatttctgacctgaaaaaaaccaaccattgtaccttatcatctaatcactttttattcaagtcaatttggaatttccaaagaggagtagttctactttcaattctctgacagaataaaatagaataataatagcacagtttagcccataaattttttgttattttcaaaccaagttcctattagtaatgggagaacaaaacaagaacaggtcaggtaaccaactacttcatttactaaaattcatcacccacttctactttgctttagggtgaaatataggtcctaataaaactaagcttgtttccatctgaattaggtagccaaaactatgttaacaagtagtgagataagattatcatgttgaaatatttttccaattctacctaataataagataactagtcttacaaaatgtaaagtattgtatgcagcaatggtattaaccaagaagaaaatattgtaaatgtatatgtaaagcaggacttgtttacacaaaggataatatttatatccaataccaatatacatatataaaatggtccccttttctctgtctgctaacctaattaatatcatcttcggtacagtaaaacagagatctcaaatagtgggtccaaatatctttgatagtgaaattacattcgaaggggaccatcaaacggttcatatcaaaagtatcacatgaaaattaataaattgccttcccaactcatcaaccaaaaaatatcatataatattagaaattgatttgaaaactcgaacaacaacatagaatggaagaagaaagctatatactaatcaattgtgtcattcatttcactatttttaatttccttttctttttattattaaagttatttagtattatttgattattatttatattattctcctgccagaaaacaaagagacacaacattcacgctaaacccataaactaactaaatagaaattaataaaccctgcaaattcaaagttgtgttttgtcgttgtttggttcctaaacaaaagaaacaaaaaaaatccatctctctacttttcttttcttttcttttttttcattttgctatttttttttcttgttttttctggctaatgaactgtaataagccgtactgagaccatccaacagtgacttggtccatcatgatatcaacctctcatatattagatcaggcttctcattagtccacccttttgccttttctttctttcttcttccttgttcttcctcttctaccattttttttttctttttctttcatacctagtcattttttctttttctttttttgggatacattggtggcagctcgagctttaaaagcttatagcttcaaaagataatagcagtagctgtgaaatcagtatatatagtctaatcatcatcagaactggcgaatctgagaaacatgaacagtttgattatggcaatagtgactgattttccttctcttaatgtccctctctaatcgaagagtggtcacagtattggattttccactttctgagcttgaaaaaatctggtcaagcacgttgaccggcgtgaccgtgcttgaaactgcctcggacactgactcgtactcctctaacaccacggcttgtaaagcattgtaacagtggagcaagttgtcctagaaacagtgaaacaatagtaaataaaaaaaaaaaaaacactttagagattctcacaagcaatatcacacttttttctaaaatcccactccagtcaacacacatttgcgttaaataaattactataataataacaataataattaaataaggaaaagtacaagaatcgtatttactttgtttaagtatgaacagttggaaagtgcattttgaaagcatggaaattgcagagggaaaagctcgtgggaggcagagagtagagccgatgcagagactattgatgggttgtaaaccaagaagttaatatctgcaaaaaagaaaagaaaaattggtatattgtaaatattattatatgggttaatgtgttatggaatttcatcaacatttggttctgggtgtctgacctttttgagctttgaagataatatggacagctctagccttgagagcttgggttagtggtgggtcttggagtttgaaaagagatatgaaatgggaaataaaagaaaagggagtgaccgaacgcatcctccatttgagagcttccaaaataagggtttccattcttcctattgttctggtgtcaaaaattataccagcatcaccctataaccaaaatactaatcacaagttaaaaacttcatttgttttcatctttccataatttttttaaaaaagtataaaatgtatatgtatttttacctgaaaatcggagattgaaatatcagttttcttcatcttggcagctaaagaaacacaagagattgcaagtagctttataacccattgcttcggttgctgttatagaaattgaaagcaacacttttagaccccctcactcaaagcggttaacccataaatattttagtttaaggaaatggagatagatggatgagtatgttctgagaagcagaacaaaacgtaatttataatgtgaatctgtaaatttaccagcattaaatggcaggataagaaccgatcaagataattaactgcgaggtatgataagagaggatcgaagttacaggagaactgcataaacgagctacgaaaagttaagaactaaaaataagtgaaagccaaaataaatgaagaggaaaaaaaaataataaaaagaacatttttttgtttgtttgttgtgtttgtgtacctgtgcgattgaagcaatggcttctcgtctaacaagtatgtccatatctccagcctgaagactggagaagtagctgtgagaaggcatgtgatcagactcggtgagaaacagagaagcgacagagtcagaggttaggtcttccaaatctgtaagagggttttcaaggtcgaactccatggagttgggaataatgatggtttttcaaggtcgttgaggatagaaaccagaagacattgttaaagaagaagaaaagagataagattagagagagagagagagannnnnagagagagagagagaggaataaagaaaaagttgtttggggttaggaagatagaagacttgaagttcactccttcgttggtgtgtcttatagagagtagtcagttctgtttgcattgacattatagtatagtaggagtggaatactaaagaaagagagagtgtgtgtggggatgatcagatagaaccagatcgactgggctgtagagtttctacatggtacgtcgctcaaccattggctacagctcactactatttactctttcttttcttttatttttctttggaaccatacaaatatcgggattttgcttttttttttttctcaaattaacttttttttagcatggaacattttttagggtaattttatatatcatacttttatataagagtatcttaaattttaatttatactaaaatattatatacttaggtatccataaaagttaataccacatttaattttacataaaaatattgtataaaatacannnnnatataatacaatacaatacaatctaatacggcgttccaaaggagccctaagggtcttttgggatgcaggactggattggattatacaaattaatttgtctagtccaatgtttagatatattggaagactagataataatctcatacaggtgagattttttttaatttttattttgttaatatattttaaatttaataagaatttaaattatagaattattacaaatttatttataatttttttatcaaaaatttatttattaaaattattaaaattttataattttaaattatcatataaggtttcaaattttaaaataatattaattaaacaatagttactaaattaattctaagagaaatgatataacaataaaattatatattctttttaaattataagaaaattaatatttgtattaaattaggatttaacataaataattttatatt

SEQ ID NO: 37307 - DNA, 3142 bp, Cannabis sativa
atgagaaaaaatttgactaaataattatttccgatgctaaaacagataggggtgcatcaatatatctatttcaaggaggtgcattgtacaatttttcaagaattgtttagtttaattttttttatatattcgtgtgtgttatatttatttataattacaaaatttttaaaaatttgaaataatttacaatatagaaattagtgtccaaaccttctatttcacacgcgaataaaataaaatagtcacgcatgcaatacactatttgaaccctatttttgacgtgttaattttttttgaatttctaaaagttttactaaatgtcttaaataactataacgtacatgacaatgagaaaaaatttgactaaaaacttttttggaatatcaaaatacataaagatgtatcgatgcattatatttgaggaggtgcatggtagaatttttttaatttatatattaaacaaataaggccgtattaaacatcgaagcgcccgtggcctaatggataaggcgtttgacttctaatcaaacgattgtgggttcgagtcccaccgggcgtgctttctcttttattttcttcttatatttttcctcacgttttttaattcgttcaatcactttgtcattttctctaaccaatcacccacatccccatcttctttttctctcactattcaataaaaataattaaaaaattctataatgcattctcaaaaagaatgcaaccatacatttttatctgttttagtattcgtaataattttttaggctattttttttttccatgttcatgcaaattatagttattcaaaatatcctcgaaaattttaagaaattcgaaaaaatttaacacgtcaaaaattgtgtgttacacgcgtgactattttattttatacgcgtgtaaaatagactgtttaaatattattttcagtacataaattattttgagtttttcaaaattttataaaatattttaaatatctataatatacataaacatatataaaaaaaattaaatttaaaaaaattcttttacacaccaaaatatttaaaaaaatgtgcattgtagaatcagtttcaaaataattaagtataaatttggaatttattctcatttcaatttcatctccttacttatataatactaaactactaagcacttattaccagttcacagttcactctcctctttcccatggcggcctctgcttattaccatccaactaccccacgcgcttgctcacgcgctctccaatctccactctctttgctctctccgtcctctcgctctgacctcaacgccgcttcgtctttcgtctcatttcccctccattccaggttcactgaggtccttaaggtttccaatcttaggttcccttctctcaaggttctctgcgtccgtgaatccagaggtactctctttccgaactcttttgcgatttcgattttggtttttcataagaggggaaatagggatcttgatgtatgacaattgaagatgaaattaagcttgggcaagggaatagtttatttttatattcttttttgtaatgtagtgggaatctttggttgaacatgtaaaaatttatgttaattctaattaagaacttgtttttgaattggatctcaaattaagggtcatcttgatagtattgggtggggagtgagttgataaacctcgttagggatgttattttctgaagaaatgttcagttactattgcgttgaagtttgatctttctgctggatttttagatgtcttataggttatcttgcagagaaacttgtactgatgtttggattaatctatgatttagaagatatccattgacagttactgaaatgggttactgggcatctttgagatttgcatggagtattgtaactctatgggaattgtagtttatataaagcttttctttaagtggtaaatttagtttaggatgtttaatcatgttgactccttggataaagaatgctagaaatgaaagatttgattaattgttctgatttttggatgctcatgcaattcaactcgttagttaattattcaagttgtattttctttaattaaaagtttcattgggaaactccaacgatgagatgaaaatgaaactccccttgtccttaaattcaagggaattgttagttgttgaaatttgatagtctggaatgtgtggcatctacctggaacttaaaatcgtgaaattaaagtttcttgccatggacttttgtctcaagaaagaatatatatccttcactaatagaaaagaatatcattctgtttagtgcccaagtcttcttatcattttcctttgttgattcatgtttgttagaatattttcgtttgttgctttctaacctttgtgtgagctaaaagatttatgtgaaaatgtagatgtaaattttgactctggctaactctctggacatttgatatatgcagctccagaaatttccaaggacacatgggaaacttctgttctaaacagcgaaactcctgttctagttgaattctatgcgagttggtgtggaccgtgcaggatggttcaccgtgtaattgatgaactcgctgcagagtatgctgggaagcttaattgctttgtactcaacactgacaatgacttgaaaattgcagaggagtacgaaatcaaggctgtaccagtggttttgctctttaagaaagggaagaaatgcgagtctgtggttggcaccatgccgaaggagttctatgtagctgcgatcgatagggttctgaagtcataaagcatgtttcagggtgcattacaagaaactacatgaaagtttatattttcttccggcaatgtgttctgcaaattttttgctgagaatcttcggcttggaactatataggctgtacatatattagatgtatgcctacctagatagttgttaccagcgttgtagtacttcttgttatataaaaatggtcttgttctttacattttgttagtcattcagttctttcaatttgatactaatgcatgagtcacattctaccggtcttagagaatttcactgggcattctccttattttggagtcttgacttgactttgaggcaaatccctggctaagattttgcatttgctagattttcaatgcttttaagaaactaattta

SEQ ID NO: 37308 - DNA, 6566 bp, Cannabis sativa
  modified_base (803)..(812): a, c, t, g, unknown or other
  modified_base (6063)..(6063): a, c, t, g, unknown or other
agttaaaattcagcatagtccacgagtcaatcttatttagactactgatggttttctctgagccttttttgtatgatttttcatcccctttttgattttacctaggactatttataattacctagtaggtagttaattacatagttgactgtaatctttatacaacaattatcccctaaaatcatggggttggattacgtatcacgtagtgtacatgcggttactatttaaaaatcatacagttgtgattttcccgcttttactgggtcaaaatgatcgtgtgttttaacacatctttaatttttacgtcagaaaatgtctcgataagggtttgattccagtggctgtaatagcgagctggagccttttttctttatccttccgaggtcaacgaactatgccttgtcgcttctttgtgacgatcgtggttcttataaaaaatatttctttgaggctcatttgaatgttagcttctgactcgtcaaaattgtaagcctcattgagaagatgtctgaagttaattggggcaagttacaggaatgaaccttctcatatcgagatagacacctcgcttatcaggtctcgagccaacccgactgttatacttagtttgcacgttatgtactaagtgttttcgcggtcgatatgcgtcgctttcgtctcccaagatgtaacgtacttgatgcctcgctatatgcctttaatgacatatggtttctcgttaatatactaagcaacaatttgtatatcttttcctcgcataaaactttacagtcaatgggttgtgaatatactctgctacnnnnnnnnnnaatgagttattccataaaaagttacataatcgatccacattccctttatcttgacacgtgtcttccactgagatggtacccgaatttcggttataacaccaccctaagctaattggacgtcgggggtacctgacctaagtaatcggacgtcggggtacccgaagtaattggatgtcaagatgctccaccccgaggtaatcagacatcaggatacccgacctaagtaattggacgttgggataccccacctttagccaaagtaatcagacgttttgataatcaaacctcaggttaccgcacctcaagataaatagatttttttagcgtgccaagaaggtggttggggaccttggggttcactaccctgagaccaccatgttgaggtcagtgtgcaccaccccaagaccaccacaaagaggtcgagggtgcactaccccgagaaggaattgattgggttcttgaggtaccctaagattgaaagtaccagccaccctgagattatgttgtttctaccccgagcttggtaaaggatgtggtaccccgagtttggccataaaccgtcgagatggagttattgttttggatctcagggtgtaccacaacctttggaatggggttgctaaaataccctgagatgggcttacgggggacgattgtcatggcctcttgtgtattttttttttgacactcacgtgtatatgcaacatattgtaccatgaacacttagtaaaaattttgacaatttccaatgaaattggcaccccaaaatccaccacttataattgtcttcattgtatttcactttagctatatggacaatggttgccttttgatacacttccttttttgtgcacaatgaatgttacatatgtgtgtcttattttttagtttggagctatgttgctctattactctatgctactatgtgttaacttgtctggcatgtaccacactatgtgtaagtattttttttatagttaaccatgtaccacatataggtcgctcaagacattgagcaatgcacaagcactttagagtttgaaaagaaattttcaaacttgtaaaatctatttaagtgagtgtgttttatgcttactagtccatgtatgagcgtggttgcccccgaagtgactaagtaggttcacctctcgatcacttgttaagtaatcagggctttcatataggaactattattgtcacgggttgccactataatttcatacactctttacctcagttaggcttgcaatttgattcaataacaatcatacaagctgcgccgtcatatgaaaaataacttgcaattttttcttgatgaataaattgggcaaaaatgtcttattacatcaaaagtgggtagtttgtgcctttacattatcaaactttgctggtaggtatgacgaccagctatggaattacgggtacaccaaccagcctaagacattgctgaaaagcaacttatattggtagtacttttgtaggtgctctccattccaatggaaaggcactagtactaactttgcgttggcaccatgacatgctaacttgtatattctaggtgggatgaccccaactactccatactcggtggtaagtcatcctttggtgggatgataggttatcatacccgtaggcaaggacaaggggaatgttgcacgtggctaaagattatatcaattaggaggacatagtcatttatgatgatgctttgttaactttttgttgttaataaagttgtttccactattatcgtcattggccctatttccattgttaaacccatttttattgttgcccccttgaccctgggggccttggccactagatcttgctctgttcctgtttccctaagcttggttgaggcctttagcatttcgctcaggttcttctagtttaataaattcaccagctctgtcgaggaagtttgtcttagaatgagttggcttgcttgcttgccgttgtcacttaggttctttacttcagtggcttcatgcatgaagtgttggatgtagtcttttagtaactcatcgggcctttacttgatggcgaccaggtcacccaactctacgagtatctattgggctgaagagaattgggtataaaataacccttcaaactcatcccaaggggtgattctcccttggggtagcttagtaaaccattgttgtgtcgtgtccgtgaaggttgcagggaagatttgacacttgaggtcacccttgattccttgaaggtccatttggattttgaagttctcaacatgtgttagggggtcttcagtacccgtgtacttgtaagtgggcattttgaattttgctagaatggggaggtcattgatcgtttgggagaaggaagaccctctcctcctttccatttctaattcagtgagttttggtgtagaaaggtcattgaccaatcgggttaactcgtccaaccgagcctggatcaccgaatttgtggcttcttggggttgagcaacattaatgccaatattcgcttggtatttttgaaccggctcaggtggatttactatgttggaaccgcggttgtccttatttctgttaagggcatcccgaaggtctctacccccttgggggcctacacgttaaaaagcttacttggttcttggccttcctcctgcattttgaatgtcagcccttccatcgatcgggggtggtactttgtcatctctacccctttggggcggattcttaggttgatactgcctattaggggcatatggccctccagtttgataaccccctgctcaggattttgttggttgttagcccgacttttagcttcatcatcaccgtgactgttggggtagtttggacggtagtcactgttgactttggggtcttcccttctcaccctggacctactatttctcgggtgatcatcgccctctcgtggttggctacgttggtagcggggttgccactctctatgttgggatgttcttccaccgtttctaccacgatcaccattgttgttcctagagtttcctccaccacgttgccttagactgacattatgggagtcatcacgtcccatataatgaccgggtaggacttgcttattaggtgggattggtcgattattattgcagggaaccctattagaagggtgactcctagctctctcttggttccttgggcgctcttcaggtccatagaccaccctctcgtactgcattcttggggtaagggcttcctgtggataggtttgaggtatctattgattgtgggcgtcagtacccaacccttgagtgttttggttgaagtagctccgtattaagttggtagcatcttgggtgcgacgatcttggtcgtcttggcgcctcctcatttcacaagcataatcttccaactaagattgaaattctctcctttggttagcaagactttcgattaaggacactcgagcttgagtgtgctcttagtgcacagtctagaattggccttgcatttggcctatcgcatctcgtagccgatccatcttggggtcaatttctttgatatcaacatggggttcactcagcggtctaaagatgccagggccttggccagtttgagcatggcccgtgccgtcattaggtgggccaaaatttccagtactaccccttccggtggctctgttagtagtgctgcctcctgcaacagtggtgttcgtggtacgcccaacagttgtctgcccagtggcagcagtttggctagttgctctatggccagtagtctaagcagtgctggctgcaccgtcgtttctcagacgcgggggttgttctccattattttcagtgggattacttgttgatggacctttctaagcattatccatttcctcctcaggtctctcttgagatcttcaagttaacaccatttttttcggtgaaaaacttcaagattttggctaaagctctcaatgaaagcaccaaaatattgactggatttttaggcaaccgacgcggagtcgtaataaatgagatttaaatcaaattcgttacaataaatttcattaatgatactagaatatgcaataaatataaagaaagacaccgaaatttaaagaggttcaggcacaaatgtcggtaatatcctgctccccttgtgttttactaatctgagttgcaaatgttaagaacatactcttaactgcaaagaatgataattgttcatttttctaagtgttcaaaatcgtggattccccacccaggtcatggatgacccgttaggggagagggtcgatgcctttcgcttcaggagacgcaacaaatgtggagctacctcaaccgtctccttgatttttgaaggtagttaaagtctaatttttatgataatatctcgctattttcgtgggttgacaactatctttgagcctttcgtgggatttgaacatttgaaagagttactgacgacgaggatctcttatgggtgttacatggtcgtcaagcacctttggggatgaagctcatacttggggcaacacccttgagacccaacttgaggagggtgacaatcttcatcattgggtgccccccgagaccaaacttgagggggtgacaatcatcatcttggggtgaccccccaagaccaaacttgaggggggagacaatcgtcatcgttggcttacccccgaggcccaacttgaggggggtggcaatcgtcatctcggggtgacctcccaagaccccttgtacgttgtcagtagttatggtgtaatgtggatgtccccatatacctttgagaatgtcattatgtctatggtaaaatgcctgacttgagccatgtgggtgtagagggtagggtatacccctagactaaccccttaggggttaaggggtgtacccctagactaaacccttaggggttaaggggtgtacccctagactaaaccccatatagatcattgcagttgaggtaagggtagtagtatataccccctagactcatttgactcccgtaggtgtgtggtgattgttaatttcggttacgaaggtgttagcccaacattcttccttcttggggatgcctaccttactcaagctaggggtaagggtgacaatctaacttcgactctaacgatcatgaccacccttatggttgacggtcatcccaacggtcatgactttacatattcttcattaatttagtcccgatatttttgtgccacgtgttgctactcttgatacgtcatcattgttaaaatttgggtaaacaattagtaaatctcattatattgaaatgagttttanttagggcacaaaacccaactgtaagaatttatgatcctaaattgaaaaagttagatctcagaacagttcgctgttatttcattggttatccaatgcatttaaaaggctatcgcatttactgtcctactcgtggtacgcgaattgttgaatttcagattgctaaatttttagaatttcatgtttctaaaaatatttcttcaacatctcttgaaatgggggagtcatctaaatgaatttttattcctatgtccttttcaagagataataatagtagtcttatttatactcaagttggtaatgctcccattgctgatgaatatattgcccccaataccgaagatgattaaggtcctattattgatgaagggcctatttattattgatgaagggcctattattgatgaggggctattattgaagaagctcctattgttgatgaggatcctgttatcgaagaaattccagttgtggaagatgttattcaaaataatgataaacaaata

SEQ ID NO: 37309 - DNA, 3542 bp, Cannabis sativa
tgtttctgtgaaattaggttcaacaagcaccaataacgcggctatgtagaacccgtaatagaatcacagtcaatgggatgttcccgggaccgacattggaagttagaaatggagattctctggtgatcaaagttgtaaacagtgcacaatacaatgttaccatgcactggtaaaccttaagccttaaattctcaaactagactaagctttcatgtaactcatggatgcatgtgtttgctcctacatcacctcatgttgcttttaaattttagttcatgctttgtaacttgttatacttcaggcatggcattcgacagctgcagaatccatgggcagacgggccagagtctgtcactcagtgcgcaatccaacctggtgcagcctacacatataggttcacaatcatagaccaagagggaacattgtggtggcatgctcacagcagatggcttagagctactgtttatggagctctcattatttatcctaaattgggttctccatatccatttgctacacccaagaaagaatttccaattcttcttggtaataacaaaacaccaaacgtttgtttgttttaaactatttccacttcaattgtttccttcaccactacttgacattttcaactttgcaaagtcatctcttaattagaattgttggaaattgacaggggaatggtgggacagaaaccccatggatgtcttgaggcaggcacagttcacaggaggagcaccaaatgtatctgatgcatatacaatgaatggtcagcccggtgatctatatgcatgctcaagcaaaggttagcctaattctacctccaactataattaactttaaattaccaagcttgaacatggagataatccttgtatgcacatctgataagagtttcaaattcagaaactgtgagaataccagtggatacaaaggagacaattctcttaagggtcatcaactctgcactcaatcaagaacttttctttgctgttgccaaccaccagttgactgttgtggctgccgatgctatgtacacaaagcctttcaatactcgggtcattatgataggacctggtcaaacaacggatgtccttctcacagctgatcagacaccagcccactactacttggcagcacgtgcctaccaaactgctatgaatgctgcctttgacaacaccaccaccactgcaatccttgagtacaaggccgcatcttgcaagaaagggaattcaactccaagaccaatcttaccacaattaccagcattcaatgacacagccactgcaagagcctttactactgggctcagaagtccttcaaaggctgatgtccctacgaaaatagatgtgagcctttacttcacagtgggtttagggctaaacaactgttcgaatccaaatagccctcgttgccaaggccctaatggaactcgctttgccgctagcatgaacaatgtctcttttgtattcccaagaaggacttctctaatgcaggcttactaccaaggtatacctggagtcttcaccactgactttcctcctgtcccccctgtgcaattcgattacaccggtaatgtgccacgaggactatggcagccatctactggaacaaagctatacaagctgaaatacggttctagtgtacaaattgtattgcaggacacaagtatcgtcacaacagaagaccaccccatgcatcttcacggataccatttctatgttgttggatccggttttggcaacttcaacccacaaagcgacccagctaacttcaacctctttgacccagcacagaggaatactgttggaactcctccaggtggatgggtagccattcgttttgttgctgacaacccaggtaactttcttgcactatcatgtgagcaaacatgcttttataccaagcatccctgccaaatagaaatatcactaatttaatacttctcactcattgtctattgcaggaatttggttgatgcactgtcatcttgacgctcacctttccctgggtttagcaatggcttttctagttgaaaatggatctggacgattacagtctgtgatacctccccctgcagatcttccccgatgttaaattatcaatatgaaatcaccaattgttaaatccaaacatacccagaaggatttgtttttcttttattgtgtgctttgatttataataattatgtacttacagattgaaatatatgtatgtatctggagtagtaatccagaattagactttcttgaattgaaataggtgatttgtcgtgttcttaggtttatgtaatttgttctttgattgaaagaaaggattacaatatctgtgcaataaacacttatcaaatttcacttgagcttccttttcaatggtaacaactcagaaaacacaaacatcagatgttatcaaagtaacatgtaaattagatgcgaccaagtagaccttaatcagttattacttcaaaatttaaagccataaagtaattagtatatgataagtcatttatctcaggaaagagactatgtaaaatccgaaccaacattcattatttgtataacatagagtttaagcatccattttcaacagagcaatcaggcaacaaacttaagacaacgagtatcattatgtatagtctggcaacgacatgaacaaaagcgtataccacacctcacacaagtatatttagcagcagaaccacaaaccgtacagtaatgccggcgagaggttgagctcggaggtcctacagcggcctttagatacgagggaacattgggaggcaaagattccaaattggcctgttttagaagaaacaagatgtatcagtgaaaagcaataaaacaccacttatgaaagccacattgaaaaaagaaaaggatatgcagtcagcatttcaattgttctttttacctcatgtagaagctcaataaatgatcttggagctttcctagcctcgagggcttttgcttgtcgtgttttgcgcttcatggtcttggaatgtttcttttgcatgtacgctacaacagaggccataaaaatttaataaacgagtacttgcagccattggaagacatgtttcaatagcagccattgcccaaagaaaagaaaaatcttgtaaattatgtatttcagagcaaaaaaaccagcaatggaatcaatcaatcccaaacatcagtaatgtttccctattaaagagctagatagttatgttatagcataccaaaacccattaaaaagcaaagtgtgttgtggaatagaatccctaaagattgaaactttgaagcttgaaataatcaaaaaaggtactttcagtgaaaaggaaaaataaatcctgaagaaaataggaatatttcagtgtaggggagtaccatgatcgtcttcgtcgagagaatcctcgtcttcgtcattaacttcaactgtttcaataccggcattatcattctccaaggcttcaagacgagctagagctgcctaaaacgacagattttgtcaaacactttcactttcactttgggtgtcggcaataagagagagagagagagaga

SEQ ID NO: 37310 - DNA, 2866 bp, Cannabis sativa
aaactttttgttcaattaacaggttcacaggcataaagaatataagcagaagataatggcgaattaccaggtatgttgtttaaggctatagattttgaattcttgagaacttgatgatattatttgtagtttttgtaatttgcattcatgaatttcatgtttaccactatgaaaaacctcaaattttcaatttttctttgagtaattatattagactttaggaagatattatttttttaaaggctagtaatcattagtgttgcatctggttggaggtaatgaaatgaaaatgaatcaattttcattccgttcctttgtttgtttggttgtattttaaagtattaaaatgttattcaaataccattttgaaatgaaaggaaaggttgttccaatgcaagttaaaaaaaaaacattttaaattttattctattctattccatttcttccaaccagacgtaccctaattgattccgtattatctttccatttctatctcacaattataatatttccttctttttgtagcctctacacagggagttatatgcaatgcatgccgaaaacttctttgtaccttcgtttcttagagcaattagtgaaaatacagaggagagttttaggagtatgattattgaaccgtctcagggagtgtatatatttgagatgcttcaaccgcgtttttgtgaactattgtttgatgaggtatcatctttgttaatatcttcttccttgtattttagtttccccttatatatattagttaatattttcttatcaggttctaattgcttaggtggaaaattttgaaagatgggttcatgatactaagttcagaatcatgcggccaaacacaatgaataaatatggtgctgtccttgatgactttggaatggagtccatgcttgataagctcatgaatgagtttatacgacctatgtctaaaggtactatatatcttcattgattactgggttataatacttttaaatgattattttgttttcttattttttcttttggtagttttcttctctgatgttggcggatcatcattggacttgcatcatggttttgttgtcgaatatggaatggacagagatgttgaacttggtaggtccttcctccttactacttccaactctacatgtagatttgtagtggatgggaattttgtatatacatatttatatttttgttattattattattttgttcatcaattaatcaaccctatctttgatttcttggtccatgtccttaaaataacaattcagtatgggggttaataacatacgattttcccttttgttctttattttgtgaattttttaaattattgcagtgtagaattcatttcgaaatcatcttctttcttgtttttactttacatttgcaggcttccatgtagatgattctgaagttaccttgaatgtttgtttgggtaagcaattttctggtggagaattgttttttcgaggtgtccgatgtgaacaacatgtcaactcagagacccaaccagaggtaaactaatgtatttgtttgttgaagtataataaattaatcgattaaaagatatgatatttgtttcctgttatgttgatgaatcatgatgtgaaatgtcatcttgatattaatcggtttctttccaatttcctgtctgttttttcatcttaccaaacgttgtcttaatattggcttcggctggttgctattaattaggctttaaaaattcacgaaacatgacattgttgctttttttcttttttgcttataggaaagcttcgactattctcatgttcctggccgtgcagttcttcatcgtggtcgtcatcgacatggtgctagagcaacaacttcaggaaatcggattaacttgattttatggtgtagaaggtgcttttctttctcacattttcttgcaatgtttcttccttgtaagagaataagtggcgtaggaaacaagaaataataaaaacaaagaatttggttttggagcgtcgacactttctttttggttctttttttctttggccttaacttctcaaagtttgttgcaaagttttgtatggcaatttactcccaggatacaacaaaactcgtggccaattgcttataaaggcatattgaggtttaagctttaaaacttagatttaaaatctatactcttttttaattgttaacttctaatcaaaactattaaaacaaatcataacacaaaattctaaaaaagcacttcaattaaatgtttgaactttgaactagcagcctcatgtgatttcatgtggtattttttgagagacgctaggatgctacgtgtaaatcattattttacgcacacctctcctttcttcttttctcttccctaaggcataagcctcacttctgtcttttccctaaggcatgagccctaacggggtctcacctctaagtctttttaaacattgcctatagtgaatatccaacaaaaatattaaaacatctaaacaagatataaaaaatgattttttttgaagtatttataaatgttttaacacctacttgaactatcatcctgcgtcatgaagtgatgtgatgattcatgaataggtatcaagatggttcatgaagcaatgtgatagttcaagaataggtgttaaagaatcatcacattggctccatgaaccaacctattcaccaatcatcacattgcttcatgaatcataacattgcttcatgaaatctgctttggagaaatactacaatctctccaacaatctccctattaaaaattgcattttaaacacttagcaccattacaaccttgtggtccatcttggattcataaacatttacaagatttaaacaatgctcacataacaataaactt

SEQ ID NO: 37311 - DNA, 6804 bp, Cannabis sativa
  modified_base (6746)..(6773): a, c, t, g, unknown or other
cggcccaaagtatttttgtaattttttttttctttttttgtatttttctgttttttccctaaaaaaaagggaatactttccccactattttttttaaggaatgtcataaaggtaatggcttttatttatttttattttattttttaatactaaatacacaatgacaatttatcttttaaaatatgtcttacaaaatgactactatatattatagtttaactaaaaagggcaatttagtcaatttaagcattctgattatgttttctgataaaataaacaagataaatcattagtattctctaaataattttagtaaacaacatattataaatattgattctgattattctttatttattatgttacatttctccattaattattctaattttaaatactgtgtagtaaacgtgccattattttattataattaggaaatagagaatggataaaagaaatggaatacttctcgcactaattttctaagaaatgccattaagggtaatgacttctattaatatttattttatcttttaaaattgaatatatataatgataaatttgtcctttaagttatatcttactaaaagttcaagatatgtcgaaagctactaaatcacaattaggtactctatcacaagtataaaaacaataaatcaattgcaaacctaaattacaaacttcccctacattggaaactcatatcaatcgggtagtgcttgggttcccaagaaccgagtaagataacctccactaagaaatcattcaaacatacattttccagttttgatatacacatcaaataatgttaacttaatgatttcatacagatgataccaaagaacttgaatgcacttcaagcataaggatctaagaccacttagatcttggaaaataagaccccctttcttctagtaagctgaactcccttcaacagattagtctgaactcccatcagacattgcagatcaacattccttcttcaaccttgaagatccaatgatttacaacctcaaaaccacagaatatatacagacaaatttttccctagcagagcaagaatctaagaataattctatcaaagatgagagttggttagaaaaagctagcttagcttttgtttactaacaaagctgaataatgactaaacacaacaaccctcaacaactttgctgcactggcaagaaacgaacaacaaataaacaaattaaatgctgacatggtaaaaacaaaatgagaagataaaatagatgcaactaacaaagataaagcaacactaataagaacaacacaaatgtaactagacaagcaacaaatgaactaataacaagcatacttttccagagaaaacatagcacttacaatctctcccttggaaaatgatgatcagcgaacaaaaacagagagacaaaagaaacaaaaagaccaaactaagaataaaccataacagagttcaaacatacaaaactaaaccagggtatactgtaaattgtcactattacacaagccaaactcaaatattaacgaggtttggaataatactagatctctccctcgatgatcataatcattcactgctagaatagttcactagagcagcaccaaatgcattgaaggaggcagcatcaaaatcaacaacctaaggaatcagagatgatgtcataggatcagaagtagaaggacatagggaagaagtatcatcaacagaatgaatcatcccttgaacatcagcaataagagactcctcctgagtatgaggatcaactccctgatcagtaaccaatttaacttcatttgagataaaagaggccgtaggattgacctcagactccccttagacaggagctactgtaggaagaaactgagactccccctagacatgagtagtagcaggaaggaactcaaactccccctagacaagagttgtagcaggaaaagactcatactccctagacactaactaacatagagtcatgttcagatgaattaacatgaggctgagatgattctaatggaagtttagaagagacaccatcatctttagacgaactacaaacacgttcattagagggaacagattgagcaacctttgaagacttcagaactttacaaatgttagtgagaacagtgatcataaccttttcaaatcgaagttggcactgctagttacgagcaaagcctcaggtagttgcaataccactgaatacaatttttgttgccaagatgaaggactcaattttggaagatgtattgtaaaagcactagaggaagatgggacattagtagctaaaacggttgtagtagcaaatatccattgcagataagggaattcgcttgccaaatgtaggaagttttaccgatggaaggcacaaataaaattttatctttatcaagtatcacaggaaagcccctttgcacaactcggttgatcaaactcaaatagggtagagtgtgtttcactcccttagttgtggcagttattacaatttgatcatatatgagcgatggaagatcattactcagtatagtccctaaggcatagaagaacctcccagtattatagttgatggtggaaatatgggaattagtccaccaattcgaaagagcaatcttgtgaagaactcgataaaactctatgagcacagtaataggtaactcttttccattccacacaaaatctgtgttactagtgatctcagacctaatttttgaaatgaggacttatagttgtcatcaaatacatgcttatcaatcattttgattttcaaaatacaactaatggttgagggagcaaaccaaaatctgttacctctaatgtaggccatgtattttaacttactattcttattaagaatgctaccatcaagattggcataaaattccccagccaggttatcattaggttgttgaagatgtgtaacagacactgaccatccctagactgtattaactcacgaattttcgaaaaaaaatttaagcttgactcgatactcaagccacaaaggacggatacaaatattatctttcaaacgcaacaacttatcatttgagtaaaaaggaggaaccaaaggaggtgtcttagacaagctagggtttgaggatgaacctagttcaatagatttgactttcttaagagcaagaaggtttggagattcagaagggactgtcttacatttagacgaagacttaggacaactggtcttggatggcaacgacaaaaggtcaggaggggacattggttgagatactggttcagcaaaaggtatagacattgagtgagtaaaatgcctagctaaaccaaaagacaacaaagacaaacctaggtctgacgatggtggaataaagccagagacaatagggtagaagctagaactaatccccttgggtaatgaggatgatcccacaccagctgaagatcctttgatcttgtgacatgctttcttccccataactaagcaacagagacacacaaaacaatcacgagaggaagaagatgaataataccaaaagtgggtgagatagaaaataacatatcgaacaattgtaatttatttaacactttgtcaagattacatgtaatcaaccaaaataaaaaaaataaacattgagatcgtcattagtgtatgaagtgtcctcatgtgagcaaccaaaaaattaattaagacaacacactcatctctctagagcaaagaccaagagaaaagccaatgaagatttttgtttaatatgttgtaaaaaaatatcttttgatgaaaactacactcaatgactttttccaaccagatgtagcttttacgcccccactgagatgttgagcagactactcaagtcatatattggtacaagggtagctcttcccattgcatccatagagggtagccttttcagctgagacaactcaatgttcactactaaaccaagtaagacataagtgatttgactcaaagatacacaaactacaattgaaaaatagaatacaaccacatacaacgttaagatgtcagccagatgcaactctatccaggttagatggtgcacacaccaataaaatttttgagatgagcaaaagtgtgggcatcaagtgctttggtgaataaatcagcaagttgagcacttgtggatacatgtgaaatagttaaaattttagattccataagctctctaataaaataatattgtatgtcaatgtgtttggttcgagaatgttggactagattttttgacatgttaatagcacttgtgctatcataaaatagagccaaggaagcccgtgaaaatccataatcagttaccattttgttcaactagatgagttgagtacaacagcttccagtcacaatatactcagcttcaacagcggaaagagagatggaattttgtttcttactcacccatgaaacaagattattgctaagataaaaacaccctccaatggtgctttttctatcatctatactcccaactcggtccgagtcactaaaaccaacaatagacatgctggtatccctcgagtaccataagccatactcaaaggtaccagccagatatttaaatttacgtttcacatcatacaaatggaattgtttgggattagcttggtaccgagcacataaactggcactaaaacaaatatcaagttgactagctgtaaggtacaaaagactccctattatggccctatacatggtttgatcaactgactcaccaaactcgtctctataaaatttagtagtggtgcttaaaggtgtaggagcatgtttagattgatataaaccaaatttttcaagcatgtttttaatatatttagactatgaaataaaaattccatggtcattttgtcaaacttataatcctagaaataaggtaagatcgcttataagactcatttcaaactcactggtcatgagatcaacaaatttggtaacttctttatcacatgtggacccaaagataatgtcatcaacataaatttggacaacaaaaatacaaggattcaaatgcttaataaacaatgtgttatcagcattacctcacacaaatttatgagaaatgagaaaagatgttaacttgtcatacctcgtggaacttgattgagtccatacaatgtttttttgagtttgtaaacatgattaggatactttgagtcctcgaatccttggggttgtttcacatagacttctttttggagaaacccattaagaaacactttttacatccatttggtgtaacttgaatttaaaaaaaaaagccacgggcagcagttatcgaattgattcaagctgagcaatagatacaaaagtttcctcaaaatccactctctcaacttgattgtatccatgggccataagccgagccttattcctgaccatagttccaaactcatcagacttgttcttaaaaagccactcagtcccaataatgtttagttcatctagcttaggaaccaaaatccacaccttgtttctcttgaattgacccatctcatcttgcatagcattgttccaaaattcatgtagaagagcctcaatgacatttcgtgattcaatgagacacataacaagcaaaatctatgacattcagtactttgcaatgagttaccattgtagtatttgaggccctttgtatccacaatgaagaccctttcttatacagtcgagcatgagttgaatcatcaaatgatctatttgtagattgaccacctgcaagatctacaacatttgtaacatttacaatatctacaacatctgcaaaaggacttggaacacagtcagataagacagggtgatgtccaaatgatttagcatttgagaatttagaagcttctaaaagatttggcacaaaaggatatatttcaacgtggaactaagagtttcatcatcaatagtgacatcatttgacacttctaagtcatcaaatttcacattcatggactccattaccatggaagttcttttgttataaactcgatatgcatgactatttgaggagtaacctagaaataccccttcatcacttcgtgcattaaatttttcaaggtgatcatgatcatttaatttatagtaaatgcagccaaaaatatgcaaatgacttaagttaggagtctttcctttccaaagttcatacgttgtttgagtagtactaatccttaaatgaacatgattacatatgtagcaagcagtattaactgctttagcccaaaaacgagtttcaacacctttggcacacaacatgactctagccatctcatgaagagttctattattcctttccacaaccccattttcttgaggggttttgggagaaaaaaactcatgaaaaatccccatatgttcacagaattgagcaaatatagcattctcaaactctttcccatggtcacttttgacccggtacacttttccaatcgtgacatctttttcagtttgaaatttcaaacaaagagcagagaaagcacaaaaagtcagacttgtccttaagaaaatttacctaagtaaatcttgagaagtcatccacacacaccatgatataacgtttgccagcactaagtttgcataggtctcgtcaaatcaatatggagaagttccaatactcctcatgtaagcagagcatttattggagaatgagaggccttaatttgctttccttgttgacatggaccacacattcgatctcctcctaatttaaactcaagaacaccatgaactacttatacagtgacaatcctgttgttggaatttattttaccnnnnnnnnnnnnnnnnnnnnnnnnnnnnttattaacatcctaaataagaactttctaaa

SEQ ID NO: 37312 - DNA, 5950 bp, Cannabis sativa
aagtcgaatattcagaggaagaagattagccataatatgtatgataccatgtaagagcagagaatttagagagaaaaagaaaacagaaagaaaatgaaaaaggaagctcaatcaaaatgtgagttgttatgggcttatatagaacttgtaacaaactgagttttacatcagacaacaacaacaagataacagaaagtgacagttaggaaaataaccgaaataacaaaatagaatatataattactttatcttgcattgaaatagactttcttctattttaaaatagaatatatagttattttactagatagtggaacatttattctattaaaatgacaaacctatgaaagtttaggagttgaacaccattttatacatattaatattaggggtctctgtcaagaataatgaggttccatctcaacgtcaattggtgatgagtaaagtagtataagttcttatatatgacttaatacttttacatttaatatatttgggacaatattttccaatatctcctctcaagatgatagctatttttgttcgctaatcttgaattaccttatcatagaccgtgccatttttgctagctttattattgttcggatctcaagtttctttgcaccatttggatttcatgcggctggctaaccatctagataggtgtgaatcaaaaactcgctagagatatagatctgataccatgtcaagaaacatggggtttcatctcaaaactaaatggtaatgagtgaagtagcccatattcttatatatgactcaatacttttatatttaatcaatgtgaaataatgttcttcaatagtctcattgctcaatatcaagatgaatttgtttatggtagatttatagactacaatatttggggaatatgatttagtacatgaataaataaaattgaaagaatggacaaatgttttttaatctaacaattttaataaaaaactttaactgcctttcaaaaggtacaatttagtacatgtaaaaactcctgctgcatgcaagtgaaacatatttagctgtatatacactatcatatatatatatatctagctatatataaatatagcaagctagacacataatcaatttatgattttggtggagatgagaggccacatatatatcattatactgatgatgtatatacataaacatcattaataaatctgtagaagaaagactaattaatgtccttgacttaagaatcaagataatatccaatccatgaaaaacagtaatataatttaaatgtattaaccagtgattgcttgtggcttgttcaaaaggcaataacaataataataataaatacataaataataataataataaacccatatatatattttctcgataataatgtaataagtaattggttttgacttttgtcaacatcgctatccatgcagagcagatcatgcatgacgattgcacgggaatatataccaattaagacaatagttcccaattacaatttgaatttctatatttaaatatcttaattaaatttgggaggccccccaaaccttattaattaattaattaattaattaagttggtatgcttaatctttgtcattgaaaattgaatctacaaacttataatacacactgctaattatcttataatggtccatctcacttttacctaaacataaccaaaatgatcatgatgcacatatatatatatgcattgcatggactatatatataaatatataagtgtgtatttatgaactaataataactacaaggtctaataagataagacacgtccaactagtaagtagatcaaaacacatgatttgtttataacctgtcggttcccaacaaaactcaaatcaatttttgagaaatttgcatgccaacaaagaaaaatatatagatacatattattaaattatacgagacccgataaaccgaaagtacagattttcttcttattattataagatatatatgtggaatttagaaaggacaagcaaagggtatgcagtagagtcagctaaaaacacattatacatgttataaggagtgtggtgacattaaagccattataaatacacataataataataataatataaatagccatatttatataaaaagtttttctcccattaattttttcttttctttttttgttatttgttgcagtagtcccaattgaatgccacgcggtttcaagagataatattgctaagagctgactttagtatacccttgagttaatgaccttgctgtcaagttttgactctttagttttctctatattttaagtcaaactacccttcttagcctttccccttctttagttttattttttctataaatgaagagtgaacacaaagcaacacaagctagtcatcttaccctttactctcatctcttccacaaactaatttttttttttcctctaacaatttttacagtacctgttttttcttttccttgaaaaagccttagtttgtaccactatacatatataaaatagtactatagtggactgaataagaaaaaccaagtgaaatggggagacctccttgttgtgataaagaaggggtcaagaaaggtccttggactccagaagaagatatcattttagtctcttacattcaagaacatggtcctggaaattggagggctgttcctactaatacaggtacaaatatttcattttttttttgtgtaaattttttcctaataaaatataaatcctaattattttgattattatcaggtttgcttaggtgtagtaagagttgtaggcttagatggactaattaccttcgaccagggattaaacgtggtaatttcactgacaatgaagagaagatgattatacatcttcaagctcttttgggcaataggtattttattttatttttttttaatttttttaaaaaaattgttttttttttttgttatgaacaaaatgtttatgtgagttttgtttggttataatggttttagatgggcagctatagcatcatatcttccacaaagaacagataatgatattaaaaactattggaatacttacttgaagaaaaagctgagtaagattcaaaatcaatcatcatcaagagatgatcatgaagaagggttttcatcttcacaaccaagtatgtcaagaggtcaatgggaaagaaggcttcaaactgatattcatttggctaaacaagctctgtctgaggctctgtctcctgaaaagtcaacatctttgactcatcatgatcaaaaaccttcttcttcttcatctgatcagacactttcaaccacaacaacatatgcttcaagcacagaaaacatatcaagattgctcaaaagttggatgagaaatccaccaataaagagatctggtggtacaacaacaacaacaacaacaacaacaactactacaactacttctagtactaatacaacattaccaaataataatgttgatttgtctgaggcatttgagtctttgtttggttttgagtcatttgagtcttcaaataataattctgatttttctcagtcaccagatcaagatcatgagagtaagcccaatattggtaataatgctcatcaattgccattttcattgcttgagaaatggctttttgatgaaactgttactactacaactactcaaggcaaagaagttgttcttagtgatatgattttagatgaaaatcctaattttttctaattattttatatataataaatatatataaagcttcttccccatctttttgtattattattggtttttaattttgcttacttttggatctacaagactactactaatactactacaatattatcttggaaattgtttgatgaataagctggaaaagtttggtggtggtagttataatttgcctttattttttatttaaagcttagaaccaaaagaaaagtgtaaattttcatatattattattaatttgtgttacgagtaattattccttgttgatgatgatgactagatttataaacatctctctttttcttttttcatttcattcgatcaaatatatgtgatcttggatcgatggtatgatttaacataatgtattaaagagagatattaatgttgtaatgtagaacaagaagttgaccttattactgtagacacttgtaaagatttacttttttacttcatatatagttaatgcttttatagcttattaagatgagaaattctaaaacacatcaatagtgtgtcacacattccatataatttaataaaaataatatctgtaaaataatagtaattggtccatatagttttaggaatggacagacttaatttatgtgaataaaaacagtgtaacaaagtcaaaatattgcagctgcttaattaaattaagtgtaccagtactgatcagtttataactatagagtattcctcagttttctgttgaaagctcagtgagtgagtattgagtatataaatataaaatatatatgagacgattgtccataaatatttaatgagaaattgatgtctatctactcccctacaaaaatgataataaagttaaaaccttcacctattatatatatgtataaatatatatatatgtggatcatcatgtggccttagttaaattgagacataaatgctagattattttatttttcattaatttaaacttaaatttttcccattgtttagatataaatatatattaaatataaatagagatcacaaaattcatggaagccatattattcatgatcatcaacaagagtaatgttgaattgtccacatttcatttttagctattgtaacttttttctctctcgtgggacaacttatattcactcatatatatatatatatatttagaaattaatattgatagttagatcgtatgaaacttaacacatgttttcctttattattgttataataaatgagatataatttgtggcctaggaataatttacaatgtacagcttagaccaagctatagtgtgaagctttttaggtttttgtgataaatttcaccataaattataaagtaaaaagataccaattaaaaagggtagagaggattcttaatatagcttttcactcagaagtagtgaagccattgtttcagatgaaactttagttagtgatatctgtcataacaactaaggttcacaggatactctttattgtattcaagcctttgatttaattcatcttctctttctctctcataataatattcacaagttcattgggaaaaaaaagatataaatattgtataataaattcaagagaaacgttaaaagttattagtggtttctagcactttcatcgttaatatcatattgttatttatgctagccaatcatcttttaggaggtgttaggtactactagtgccctgagtaataatgggcccaattgtacaaaaaatatcatttctttaatgtaaaaaagtatattatagaaaaattttgggttttgggtttgggtgggtcctaggcacgggcctagtctaccttagcctaaagtcgaacctatctaaaattaaaaatcattactattgggcaacagtggtgcccaacactttctatagatatagccttacaattgtttcacgatatttcttaaaagttattatctttaagtttttaagttatatgagacctgataccaaattacacccataacagtaagaatattcttaaacactcataatgtcttttaccatttctcaaaatcaaattaaagaagtttatttataattattgcgttggagatcgatatagttgattccttaacatgtgaattagttttcacattagtgactttgtcttaaaaagttaaaattggatgatgatcactagtttgaaataatcctttgcgaaaacacgtcccaatgttgtgtaaaggcatatgggaagaatcgtaattagctgggaaatgtatgtatg

SEQ ID NO: 37313 - DNA, 2658 bp, Cannabis sativa
catgcaaaaaaaagtgagtgtgactagatttttcatgcaaaagtaacataacataagtatgcatactttttctagatacccttttggttttagaatctaaatttgatgtttttcatgtaatatgttactatacttttatagatgttctgcttcaactgatgaaagtatgcatattttttgttggatatagaaaactgttgcctcaccagggcgtggaatcttggccatggatgagtcaaatgctacctgtgggaagcgtctggcctcgattggcctagaaaacactgaggccaatcgccaagcttaccgtactctccttgtctcagccactggacttggaaagtacatctctggtgccatcctttttgaggagactctctaccaatccactgttgatggtaaaaagatggttgatgttcttaaggaacaagacattgttcctggtatcaaagttgacaaggtaaatgatcattcattgtaaactatgtttgttatcacaaacatgtcatagtactatgttatgttgtattgattgtttatgagtacaacagggtttggtgcctttggctggttccaatgatgaatcatggtgccaaggtcttgatggcctcgcttctcgcactgctgcttactaccaacaaggagctcgtttcgccaaatggtatgaaatctaataccaaaaactcgattaaattatacttttgtctggttgagaaatgctaaaaagcacccgtagtgcctaataatgatgttggacactataatgccttatagcaatgctctttaatcggtatttgacacaaaattacactatttaaacaggcgtactgttgtgagcattcccaatggcccatcagctctggctgtgaaggaagccgcttggggtctagcccgctatgctgctatctcccaagtaagataactaattagacaagactaagctaatcttgatttttgtacttgtgtttgtgaaaattgattatgttttgttatgtttaggacaatggtttggtcccaattgttgagccagagatcttacttgatggtgagcatggtattgataggacttttgaggttgctcaaaaggtttgggctgaagttttttactaccttgctgaaaacaatgtcttctttgagggtatccttctcaagccaagcatggttactcctggtgctgagtgcaaggacagagccacacccgagcaagtcgcagactacaccctcaagctcctccacagaagaatccccccagctgttccaggaattatggcaagtaccataaacaaatgacattagtgtttctttgttcacttgctaagtcacttgttactaatgatgtttttgaaaatgttgtgtgattttcgagcagtttttatcaggtggacaatctgaagttgaggcaactttgaacttgaacgccatgaaccaatcaccaaacccgtggcatgtgtccttctcttatgctagagctcttcagaacacttgcttgaagacatggggaggcagaccagagaatgtgaaggctgctcaggaggcactccttatccgagccaatgccaactcgcttgctcagctaggcaaatacaccggcgagggagagtcagaagaggccaagaaaggaatgtttgtcaagggctacgtttactaagcaacaatatgttgaaaaagctttgtagatgatgaaacaagagtttggtcaaaattgaaaaatgaaaaatgaaatgaattgtattgctctatatagctccatggaggaaaagactatttttgttaaatgatgacaatgtcctttttagcagcttaataaacttgttcctggtgagtttagttagtgtgtatttataaatcccaattccttgttgcttgaatttttaccattttctgatcctaaaatttatcagaaatccactaaagaatcatacaaaaacctttaaaatcacatgtttaagcacaatacaattcttctaattgtttttgattaaggatctttccattattgactaaatgtcaggaatttaaaactactatccccaacataatagagtgaagaaactcaaatgcaactaactccaaacaacttgaaattgagccgccttttcgcactttttcttgttgttttgtcttctaaactgtaagaaagtccatgcttttgtaacaagaagaaacagaaggctccattctaatacatcagagagaaaaaaaaaaagataaaagggataatggaatggagcaagtgagatagtgccaaaagattttgaaaagagcacacaatttggaaatttaagaagtaaaggactgctgaggctatctttaacaaagttgtttttatctgcataatagtaatgacaagaatgaaaattcttgggtaattctatagtatactcgaaagaatttcggtaggagagtttttttttcgtcaactttttttttcggaaaatttttaatctaatctttttcataatcgcttatgttatgtatactatatgctcttcatgatcgataaaaagttcttcaatcaattattttcttcataatcgataaaaaaaaaatttagtctagttatttacttcactaactctaaaactactaaaaaaatttcaaaaaattctgaataatatacaatgatttttttttggggggggggggtttttttttttt

SEQ ID NO: 37314 - DNA, 5535 bp, Cannabis sativa
ttaatgatttttttatcaatattttttatgcattttaaattttatttcattctattcctattccaattcgcattcctatgttttcattcctcccaaccaaacgccttgttgtgttttattattattattattgttattattttcctttatgttcagtcttgactataaaggcatgctaacagttaaacaaccatttagtctagccaacaaaagcatattgtcaaataagagcgagggaaatgacgaggaaaaacaaaaataatgggccatacatactatcagaagcaatttccattatttttattgtcatacttgacaataaaaagcatgcccctaaattatgacagaagtaatttgcaggcaacagacagtcaacaatagagaaaattcttctgttgtgtttctcgtctacaaggaaaagagtcagaattatataccgtcaacatgagtaagccgggtaatcccgcctatggcttcttttgctttgcgaggaacagtgagggagttaacatgatattgtctggtagcactgacacctattgctgctggaattgcctaaatgacgacaaatataaagtatagttaacaattgtattagccaaccataaaactttaaacagattaagcttttataaattacaaccgaaaaatacaagtcatactgacattgaaaagaagcccatttgtatcttgaaaaaatagaacccatctcaaaccagcagcacgcctgtataaaataagacaattaatatcatggtgtgcaaattctccaatcgcaagtatttctgatcatataccaaaatttaggcaagtaataccgacgtaccaaacgttaagtaggccactagaaaacaaaagggaatgcacatcaccatgaccatggggtttagtctgccacagaagatagaggtttaagaaaattcacataaacaatgatgttattcttgttcgtgaggactgctatccctcattttgcactgccactagttagtgaatagtcacacacacaaaagcttgtatatatgggaaaaatgacttgcacaaacagtacctgaatcctgtacttgttatgtggatccacagcaagcctggcttcattatcatctaagcatgcaactttttcctgcagttaaaaaacactcaattataacatcccagactcatattacatcaattatgagctttcatcgattacaataaaacatcagtagctcaatcaatggatgtttatacctgcttcagaagcattacttgtgtaggctccatgccaaaataagaatttgattctaaaagttgcagagtgcgagaatgtgtgtcatctgatgtcattattacaaaaggaatcttttttttaccttctcctacagattacaaacatacattagtactcaaaatgaaatgaaaacctggtgtattaaaaataaattaacaataattaagtttaatgtggacttttctgagacagacagacaaggatagttttatttgaatataattacacatgtgaactgaactgttaaactgacagcactactgcaaagttgaaatggaaaatctaattctccacagtacaatcttgaagaagttattgactgaggttgcatggaaaaatatatatatatataactatatgttgttcttattcttcttcttctatttccccaatatttacgtaactagtccctgcctgcgcgagacttgttccgtctgaggggagaatatcaagttgatgtatcgatgttcttctattcctaatctaaccactatatatgtaaggtgtgaaacatgcttgacagaccttgtgtgaggccatagctagcttcttcgagagccaaaacagattcaatgtaatgttgtaaaaagcaagttcctgtcgaagtctctcttggaagagccacctgaaacatgtaaatgataaagttacctgatgtactggtaccaattatgcatttcataaagagatatatgtacatataaatatatttaaagatcatatatatagagtacctaaaagatttgaacaatagacatccaaatatagttgccaaagaaaactatactttggagtaaagaaatatatttaggggtgctaaaggagttgttacattattttttataaaatacatttcaaatgacaaaatcaagagcagaagacgaaatcaaagaaaatgtttccccttgagcatagaaacttttagatgtactatatgatgtgagatgaagaccagaaatagcccaagcaatgagatagagaaatgctaaaagcacctgtagtgtctagcacctttatgaagtgtaatatcgctattgatgcaattcaatatcaggtcccacttattttaatttaattaaaattatagaaaaccgctaactaattataagacgccatgccatagaggtgctaagaggtgatatgcaaatgatgcaaagaaagcaagcttagctatatttaaaacatgaaaaaaagtttgtcaaaaaaaaaacatgaaaaaaagaacgaataaactgagacttcttttgaaatgccaaaatatttatactttaaaattattgtcaataacttaatgtcacttataccttaattccattgtagcctaaacgttccccgagaccaccagcaacaagaacaaaggccgcattctgaacttccctaacacctgtttcctcaaatctaatgaagttatcatcaccaaatgttaagatatcaccttccggaacctgtaaacattattcaatagtcagccaactccaatatttattctcaacattgtactgaaaagctcaaaaagaagaacttgaactagcatcacttcttgacaaatgtagtagtctacaaataacttaatatctacttgcttataaataattctcagctaaatataaacttaggcaagagataattccatatgacaccagaatgtaaaatgagaaaagaatcacaattcaaaagtctattcaaatgtaatccagctagcaatatgttaaatatatgagtatatgaacttatgtggcagtattcacctgccagtgagggattaagtttaaagatgcaatgcgtgatttctggtaaatgacaaggctataatatttgacagacaattgtaacagcaaataacaaggtcaaattgtacatttgaagttcagaagtacaagtatgaaattcagaaaaccaaatacactcttggcgttaagttaggattgtcaacaaatcactaaggaattcaagtatgagatatcactcactgaaggtgtgaagccatcaaatgggttcttcccagcttttgaatctgctaatagttctctagctgttttaatatatgaatccaagccaccagggtagttttcattaagcagagtcacctgcaatgaaacgagaatcgtaagcaaccaaactcaaaaaccaaaaaaaaaaaaaaaaagttggtagttttaacaaatttaaaactatagtcatccaatataaaacgaacacttggagatcctaccaccataagatcgtataattccattataaataggaaaagtcaagccaaataaaaagaacctgatcaaagaaagctctcttttcatcgtcatcaacccctggttccgcccaatgcttgaacaaatgagtctgtcccaactccaacaacgtcttggcaagctcaacctggcaaaaaaccgcaaatttacagaatagaaaccaatcatctccgaaacttcacaaaaaaaatcataatcatttcactaaagaaaaacaaagaacaataaagtgtggcggtacctggtgaggagaaagaaggtggagattcttctgaagattaggcgcagaagattcgaaatcaccagtgatatggaggttggtaagagcttgagcggtggaagccatggatgaagatctgattaatggatgaaagcttaagcttttacgagggagtatatatatatgaattttgaattgtggatctgaaatatgaaattgagtttgatttgtttatgggaaaagttccgttgttgcatatcagtagaagtttgagtacaaggacaatccaccgttctctttcttcattgacaccttagattctctaaatcctattttttttataattatatggtactttttatacgtaattatatgacaccaaacttcaaaaaaaaaaaaaaaagagagtactagtattaataatgtcttttaatattttttggtgtgccaattacaattttttataattttttaatcaatttttaagttaaaattaattaatttaattatgacatatttgattgtgtttttcttttattacattgatttaatttctcatcattttagttatatttttatataataaaagttaaccttatcgaaataaataattgaaaaattctcgtttactttcttttcatctcttcatctttttcttttttttttttcttatatatttatattattttataatattttaaaggttttaataattaaataatttttttaagaaaaaaaaaactaaataattatatatatttagtattaaaatatttttattatattaataaaataatagaataataaaaaatatagaatttattataatttttagtgttgtgattggaattagaaaaaaaaaaaattaatgctagaataataattttttagtattaatttaataccaaatttaaattttatcattagatatggttaagatgcagttccacgtcaatattatctgaaaattattattaattaataattaaaaaaaagttttcttttcttttttctttgaaattaaaagcgaatagaaagtggagaaaagtgtgattttagctttgtgggacatgtttggtgtgtgtaaaagaaaaacattcgggtggggttgattttcgggaccatcatttaattaatttaatttagtatttataaaaaagaaatttatttaatttaatttagcatataatggtgtttggcatattatgagagggtggatttatttgcatacactctaattttaaaaggataattttaaaaaatcacacttcatattttttaaaattttatttttcatattatttttattaatgttaatatttattttaattttatttttatatattttttttttgaattatgtataatttttttatttttcataacaaaatttcatattattttttattttgaattttttgtcataatatttaaaatataatttatttttatttaaaaaaacatatttttaagaatattgaaaaaaaaaactaaaaaaatactattataaattaaaaatatatattatatatattttttaatacaaattggaatatttttcaatttgctaacttagccaacaaaaagactgtaattaatgtctataaatttatagagtgcaaatcaaaatctccattattaaattgtttatgagactacttttttattttgtttagtttggatggatataattaaggaaaatttacatgatatactaacttttgtaatttttttacaaaaatattgttaggtagtattttttatttttttactgtattttttttataagtttc

SEQ ID NO: 37315 - DNA, 3267 bp, Cannabis sativa
taactgtttacttagttgtagtagaaatttgaggcctttttcatgtatgggacaagacttgaagatagatatggcattttgaattttcattattgtgtgttgtgttattattgatttagatacatgatcatttttacaaaagcttgtttatgaaaaatttcacaatgaaaagaatgagctctgctaaatggggaattggggagacatgttatgacaaatagttttatttgaaatggatgcttgtttatatttgatgtgataatgagttaaatatccaatgcaaatcaagtctttcactttttgtttcaatctattgctgcattatatgattatgaactttaggatgctaattcttgatcaactttatgtaattaatgtgtttattttctttctccagcgtggctaatggaggtaacagtggcagacccttatggaacgaatccaggaccaattgattgttcagtactttatgatcaagagaagcatgtttcctcagcagtttgggatgggcaggtggggtttactcaatagggtctaagatttctctcttttatattttttttgtagtgcctttatttactgtttggtaatgttttgaatttcgattacaggagcgtggtgcgcttagatgtcatgaacacacttcaaagttagatcaatgggcacttacgcgaaaacaacttgagtttgtagagaaggctgggtttggttatttaaaactgatccctgcgataagtcttgacaatcctcttatttctgccttagttgagaggtggaggagagaaacaaacaccttccacttgaatgttggagaaatgactgtaaccctcaaggatgttgcattattgcttggactagctatagatggagaaccagtaattgggacaacttacaccacctgccaatttgtttgtgaaaaatatcttggaaaagcgccagaatctggttataccagtggtggaatggtgaagctaagctggttgaaagagtttttttctcggtgccctgaggatgcgccacttgagattattgaacgtcatactcgtgcttacctcttataccttgtaggcagcacaatattttccactactactggaaacaaagtccctgttatgtaccttcccttatttgagaattttgagcagtgtggaaggtatgcttggggggctgctgcattgtcatttttgtatagggccctaggtaatgcctcattgagatctcagagtacgattagtggttgcttaacacttttacaggtaatatttggtctcaaactcttacttccttatttttagtactgcctttgggttttcattcaaaatctttttctaatgcatgattaatctgctctcaacacttcgttaatctgctattgtttttgcagtgctggagttactttcacttgaacattggtcgaccaaagctcaatcatgacttaacacacgatcggtttccatttgtgcttcgatggaaggggaaacaaagtggccccactgctaatcgtgatgtagtattctaccgtaaagcattggattcactgaagccatgtgatgtaagttatatttcaactgtttggataatgttcaatttttggttattatggaaattatagtacaaataatctgccttttcatatgtaggtggagtggcttccttatagaaatatggacagtacattaattccagaagatataaagaataatctgattttaggaaggtcaacgacaatgttgatttgttttgacaaggcagaaaggcatctccctaatcgttgtcttaggcagtatggtatgcttcagtcaattccagaagatgtacagagatgggagagaaaaagtcgtggggttgacggcggagttgacttgtcagggaagatggaatctgaacttaatgaatggtcagaacgtcgatatcatatagtggaaggtgatgatagtacagatgaaaatgactacttgcagtggtacctgaaaattactcgtaaatttgtagggagacctatatctctctcatcagagtttcaaagaacagtaaggctgagataattgtaaatttgaagaatagtatctgctgctgttagaaagcgtatcatctgttgatctaatacaattttgtttaatgttgaattttgcagaatgccgggttgagggatattgcacacatagcggacacattctccacaaaagggttggattctcaacaaattgaattgatttctagaatcagatatattgcccatgaatgtcttagggaccaagttggaggtccagccatcgtgactgctactcaacaagttgaagccggaaaaagggttagaggaaaggagagagtaagaagaaaaagtacatcaaaacgtattcgtaaggatgagctgacgcaatataccacagttggcgaggatgaccattctcattttggtgttactgttgctattgatcattataaactacatcaagcagatagagaagagaaccattcgcacttgtgcgctttagatagcgaggaacaccctttagggattatacatgctgaaggtgtggttgaccacatgcagctatgtaatgatgctgatattgggatcaatcagtcagagctaaaccatgcaactgatgaagtagctgatgctgaaatgagccatgcattgaccaaagatgatgaaacagagtttcttaatgatacagaaaataacattgacactcagccttgtagtgcaatgcaggagatcaaagactcccacctttccgttgcaactcttgaggttgattcacagctaacagatgtacctaaggaggttgattcgcagttttgtgatccgcctaaggaggttgtcttgcagcaccctgatgcaattaaggtcgctgattctcaggctaatgatcccacgaaggaagtccctaactcgcagcttcatgatacaaccgaggaggttgtcaactcacagctgagtgatacagctgaggttatcgactcacagttaattgatgcaagggaagttatggattcacaacttcctgatgcttttaacaatgctagcgaatcacaaatttctcatgcaattagcgagagtgatcaggagacaggtaaagaaactttaacagccgcagaggttgttcaacaatcgtctctcgagccttccatagatatggtacaacaacagaatgctgtagcatcatagcacaaacacaaaggtgttatcatgcaacattttcatggtaattaattcttccagaacagtcaaatcttaggtaggtttttctacttggtata

SEQ ID NO: 37316 - DNA, 2535 bp, Cannabis sativa
tgggggttttaccgccatttacccaaatataaaatacctaaaaaattatatacaaaatttatataaataaaaaattgagggggtgcaaatgaccccacatgtcccccttccttctgcctctgcctaaacctcactcgcaaccttttgcctacgaaaaaactcgtcagcaaaagttttcgacaatagatggtcagggacagtcgtttcgccaatgaaattcgttacttcgccagcaaaactatttttcccagcaagttcaatcaccggcataaagcatacatttgcattctcccttctgttgagggcttttctgcctttttttttttggcaaagtaactcgccggcaaaactttcgtgctttttttccaactcctgcaaaagttttgttgacgcaactaaatttgccgacaaatttttttttcctttttcataaaataatatttatgttttgctagtgcaatgaactttttcggcaatatgtttcctattttttttaaatatttgtttcatattataatatatatataatataactaaatttaaatcaaaattataattttataaatagtaatataatcccaaccgcattataaaactataatttcatattataattataaaaaattcaagttattggaaaattaagtaaagagttgttagtttataaaaattagtaatatttacactgaaatttataaagtaaaaagtaaactataaatcaacaatatcattatcatcatcgtcatcgttctgggtgggtgcagcctatgatgaagatccaggaggacgtaacaatggaatcaaagccatctcaggcatgttgaagctaggaacgacgccgaacaaatacctaaacttctcttgaaacgtattcaaatattgagtctaagcctgcatcatttgttgttgataatcattaagtgattcctgctcttccaccctttacttcagcgcctcatagtcctcgacgctaacagtaggttgactggagggacctgccctaggagtgccattttggcccctaccctaagtctcagaaactggcccatgcctctcaagcggcgtgatagctaactaagcacatgtttcataacaagcatgtctacaagaaattaggtgagatctatatcgtactgacgatggacattggtaagtggaagttgagtttcacacatctcaactatttgggcttacaaaaaagtttaataaactgttagatttgaatagaaattaaatatagaatgatataattaagatataaaattatttgcatgcagttgttgtgtgtattcatcgcgtcatttgttgttcttgtggtggaactttttaaaagtatcaacgacattggaaagttctcccgtctcgagattagcctatttttatacataaaaaaaatagtaatatattattcaaaacttattaatttttaggcaataatatttgtaacatcataccccactgacgatgtggccgacaatggtcttagactcccatctgccttgaattttcattgggcttcgatcttttacattttgtttggctcttgcctgtaatttaaagtaaatttattatcaactaaatgcataaaaaagtataagttaatggaaattcaattctataattttcaatttctacctgttattttgggtctttccagtaggcgatgacctcatctcacctcttgtggatgtgatctcctagtcgccttttcctctcccattttctcaatattcttcttccatatttttttcgtgtctaatctctggacgcataaccctttagagtttagacattgctaactcactgtagtcctcaaacttagaattatcaaatgagaactcaaatttagtctggaaaaaaaaaaacattaaagtcatatatatttttttacagaataattttgtttgatctattacaataaaaattgaatgttaccgctagtctgttcgagatagtctaaatgtcccttctataaacatcctcaaaatttaactttttcataggaatatggtgttgtgaacaaagaacttgaccatgttgttaaacttgtttctatagtcgtctatgaggcccaagtccctatatgttatctaaattttaatttctgtctgcagacaacttggttagttcttcttccacatttttccccttgtaatgttctctaaatactttatttttattgtttcttgtacttgtgtaagtcattctacacatacaagctatatttattaataataaaataaataattacaatcttaattaatttattaaaaaaaaaacatatattttatataattaatggtgggtttaaatattacaatattttaaagttactaagccatcataattatcatcaccaacggttacattattagaagggcttttttcataaatgtacaaaaaaaaataatataattacaaaaaatgtgcaaaaaaaaattattttaaaatctaatatattttgaaaacttattacatcaaaccatacattttaatcattagataataaacaatgtttattaaaactcaaaataa

SEQ ID NO: 37317 - DNA, 4036 bp, Cannabis sativa
  modified_base (3313)..(3336): a, c, t, g, unknown or other
attacacttatttacttacttatctcatattttatctcgcaaatctagcgaacagacgttggccaattttctgcgtcaacatatataacaacctagttaatcattcaactaggcaaaaggttctaactaaaaataataagtaaaacgtcatcgaaaaagatattaaaaaagatacatatcattttatttttattttccagaaaaatacacatcatattttgaatcaatatataatctcactatttattgatcatttaggctgagaattaaaactattttaaaatgtatttaattaattagtaaacagaaacattttctcctcaaatttttagccacgatccaagtctcccatgattcagaaaaaataatttcccatctgtttatttttcctatgtgttctctatataatgtatcagaactaacaggagaaagatattccctcttcacaaataattttcaatttttattattttttagaagtaataataatattaaatattagagggtgtatccgacgattctctacagtacaatagaaattcgatacagtgttcaacatggttattttatcttaaggatgattgatatttatcgactgcttgcacattcctagacaatatcacgaacatcttaaagagagaaacctagttcgcgactcaaccataaattttattcggtaatatagttccattattgtaatgatttaccacaatgctaacatcaacattcaacttcttaatttcttggtcttgttccattattgtaatgctttaccacaatctttagctctcatcttgaagcctcttgtcgacccaccgaagttcccctctcccaatgcttcacaacaatgtcttggcactctacctcctcacaccagctttcttgaaataaaactgacttcgacgtttcacttgaccacatttatcatctgggtttcgaatcagtatatctatcactaaggctctgttgtctaaattcctccagtccaatacattgatgtccacaccctcaaacagctgcaaccattcctcattgcataatcccctatccaatagtttcatagactagtttcaccatggccattacacccagtgagctttattttattacagccaaaatcgattaatcgacaatcatctatcacttctctaaaatccttcataactctttaatttctaactctccctccaagtttttcaaattcctacccccaacaacaccagcgatgtggccaggtgagctagagtcaaccctcaactctaaattaaccttccacaccaacaataatcccccactcaacccaattctgtcaacagtccaaaatttactaaaatgtaaaatgctacctacttattttggttgaaacctcatcaaattactctcagctaaaaaagatgatactcgggtctaactcccgaatgtgtgattgtaacgcacgtaatatccaagggttcccaaacccttgaatatttcaacacaagatttttattgttctcgacagccttacatcttaaggctcaccgcttccatagtagtatcaagaggagggaaatccatagaattagaaatacccacctcgccattaatctccgtagttaaaaattccaccttacaagaacaaaccccattgtcgcatttgcatcgatctgagaattttgtaatcccgcacccaccctcattttcccttgaaatctagttttattcttgatcaagatacatttttgaggtccagctgcaccatttttatgccctatcgaactcctagaatcacctctgacaaaaactccactagcactgtggactaagaacttcagagccgacaatgtctttttgtcacctccattcacactaaaccctcgtcgttccttagtctactcttccatttcttttcttttgacacacttctatttttttagatcgagatatctctcgaaagcttcacgagagttcttcacatttaacttttaaaaaataattaactcattttctcacattcaacgtttggcctaaacccaaagaagcccctttgttccctttgtcaacaatattcgcaggcccaatactatcattatctcatgttctaattattgagggtctaattatgagcaccattcataacccctccaagagtcgggcccatcccatccggctcaatccccatcatctctctctcacacctcattcccatcgtggccctgagtctcagccataattttcgcacccacatgtcccacgtcgtgacccaactcattgtttgaattttctttttccaccaccattgccctgcagtcgtttcctttactaaccacttccggtggatcatgggctacatctttattgtcactctgcacctgaccatcattttccacaacatcattctcctctctatccaatcgagcttcaacattcaccgctctagcttattgcaacctggcttggtattgattgaaagccatgaagccattcagggttggatcttcttcttttaaccaatttccatatttaggaactcaccgttcctaaacatccacttcagtttgctcctccctctcacaatcactatgttcatggccctagatgccacaacgaatgtagtgtgtcagaagccgatcaaattttatttgaatccaaactttccttctccccaaggaatacgttgtgctgaaaaaatattttcattcagtggaaagccaatacgagcacaaacatatccattaagaaacatgttgtggattagttcatcggatcgccacaacttctccaactagtgttcctatgcgttgaacattattcaatgtgaaagtctttaaggggaaatccccgaacccaactaaacaatctatccagtttagcatctttcgagttacccatggaaggccactctttcaaggattaataatattaatatgcctccattggaatctgtggttgcttatcaagaatcaatttagcatccttttgagagttacaattgatcttaaataagggtttgtccccctgttcatcaatcaccttaaccttccaattcaccacattcttccacatgccaacaaaaatactctaaaacaaattaccattcacttcccttttggccaccagtcccttcctcagtctttttcattttcaccatcaaactccaaaatacaagtattccaattattgttgcggatgcaatgtaccaataacgacaaatgctttctcgcagggtctttcacaccatttttttctttgttatgtcatagtttgaacatacacgtataatggttttaaaaataatctgtatttatgttcaataaaataataataataatannnnnnnnnnnnnnnnnnnnnnnnataataataataataataatctgtgtttgactgcttcaataaagattagcacttgatttgattaaataaattacaatccaacaataaatatatactggtctaccgtattgactttatataacacagcgtacgggcacatttatttgaaaatgatattattagtttaatcaaataaagaaaatattatgtaaaaaaaatatgagtaatttgtggcataaatacttaaagttaatttttaattgtaaataaatatttaaatttaatttttgacagtaattaagttatatttctcgagtacttaattatcacgtgtcatttttttattggtaaattcaaattattttttttttaaaatataaaaatttaatggcttgatcaatcaaaaattgcaggtacatactgaagttctagaattataacttaaatattattggcaaaaattaaaattaattatttatttacaactaaatattaaatttaaatatttatattgtaaattaaaaaaaaaaaaatattattagttttcttttgacaatttaaaattttgaagttagaatttgaaaaggaaagattttcttttttttttttttgaagaatgcagacattattaatttaataccccaccaaatgtgaaaagataaagggcagttttttcttttgtatttttaatctaattttttttcaaatatacgctaatatt

SEQ ID NO: 37318 - DNA, 3508 bp, Cannabis sativa
atttccttttggcgggtaaattaagagaaaaatatttatgtattcattatttaagaacattttattggatgggaaattgatagagaatttttttgtggtttgtaagtttgtaattatcaagttaacaataacaagtcggtctttaagatgtttttcctcattgactaagaatcaattgttgatgaaattcgttcattcaaattttatagatatttttatcctaaaatttatacacattcattaaattctttatatcatctctaagacataatttatgcccaaattatgtatcgtatgctttataagctaatattttatctcaaagaaagtaacaactatactaaaaacttatctgtaaggtcatttgataaaactcattacaagagctcaaagctcatatttcacttaactcagtcctctttactcaccccaccccaccccaccccatggttacacataatgaagataatcctaaaaatatctcatactttcaacacttattattaactgtgagtgactatattagacacatcaaggaaggataattcagtcaaaatgtacttccatacatgttaataagacataataggatcctcttctttttttttttctttttacaattaaacccaatctctcagtttcaccagcatctcaacttgtactgagaagcttttgcaattgaccattcaaaacagcatttttgagatctgaatgacaaagaaaggcaatacccataaattttcttacaaggagagaaacattgtaatcaaacaaagaggtagagatctaaccatcagagccaccaatatgctggccattcacaaatatttgcggtacggtatgtcgtcctacaagatctagaaggacatcctgaatttgtgttccatcatctgccaacatatgccacatgtagggtagctcagtgaaaacaattttcatagaattagaatctgtagataatcaaacagcagtggatggacattcacatacctcgaagatcaagctcaacaacaaaaggttgttgatgtagctcgcctaatatacgcttggcacgccggcaatacctagcaacaaccacaacttgggtcattttacatctttaaaggactctactcaaaccctacaaaacagagagattaacataaggccattccaagttatggagctctgaacaaacagtcattgtttctgcttgtctcaaactcttatgcatcattacatccaatagatttctctgctgaaccccacaaccaatgcaggaaactctagaactaggtaagtaagtcccatgaaaaagagaaccacagaccttaagagaaaactggaccttgacactagacctaacccatgaggatgattttactttcttgtttgtttaggcgagaagatggtgtgatatcaatcaaacaatcaataaaacagtactgttacttccattagattgattggctatagctaatataggaattgcagcatagtacttaagtagctaaaagaatcacaaacaaacttttaattttaactaattaaccagatacaactgtacaatacaaaaatcaaaacaaacacaaagagggcattttcaactagaaacaaggttcaattgttaaagccctaattagttggtaccctatgagtatccatttatttgcaagaacgaattattatactcataattagttcatgaaacgatatgaaatcacaaatctcatacgcctaaatttcgaaattcgaatgagagagagagtagaggcgtacgggcagtaagacttggaaaacatggcgatcttattggagtagatgatgttctgaacgaaggccgaagctgaattggaggcttcggcacccttcgttgatattccaagggccaccaaagccaccactgctaccagaagcagagtcaccgggaaacgacgcattttggctccgaattcaccactcaccagaatagaaccccttttctctggccgagagagaggagagcagttatgttgactattcagaactaaatacaattacaaaggcagattattcttgttagttgttaatggctccaatcccagctattattttatctgttttttctagatttaatcacaaattatattattttattttagaaaaaacctataataaacaccgtttgaaaaattattttaaaattagattaaaatacctttttttttttttgagattaaactcttattaacaaccatcagagtttaatacatcaatgagaaaagaagaaaaatcggcaatccaagccaattcaccattaactgtaagtgcatgcacagctgattcatgagcagccttgttgggtgtacgtcgaacatgaattagggatgcctcaagaaaaatagaaagcaaactagcaatatcatccaataaggaacttagttcatcacaaagggaaaaacgctttgggagagctaaaaccaaggctaagcaatctgactccaccacatgaagaggaagaccaagagtgagagaccaatccaatgcaaccattaatgcaacaacttctgctaatatgactggaaaagtccctacaataatcaacaaacagaggataagttcaaaaaataaattacaagcagagaaagtaaatggtcaatcctaataaatgaaaacaataacgaaagaagcaaaactacaaatccggtaaacaaaaaccatacacggagagaaaagtctccctcgggtcgaccccataatccaaacacaaatactccataaaataaacagccttacaaactaaacttactagaagtcgtaacctccgatccttagaaactacaacacttatcaaaaagctaaaattcctaacaaatacattataagattcattccttaaaaaaacatccatcaccatatctaaaaagtgaggatagtatcaacttcttaagattggacaaaacatacaccataaaggaagcgccattgctcaccctcataactaatgaatatcataaacaacaaagcaaaaaaacacctcctatcataatcttataaagtcataaactataccaaataaggatttacatagacatccaagcacattcccagtagtatctcgaactattgtcccaatgcctatagtattagaattaacatccagcgacgcatcaacatttagtttatacgctcccaaaggcagcttaacccatcgttcaggagacaagcatgtcgacccctttgtcataatattatgtctcaacattgactgtattcattaaataacttaaagatttgtgagaccacaacatcagaagggttggctttgcgaccatggacaatttggtttctttcaccccaaatataccaagttgcaacaaggaacaattccgtaattcagatctagatagtatcttcgaagccttcagaactatttgtttgaatgagatatccattgagagattattcaatagagtaatacgtaattccttccaaactttcttaaaaccacgacataggaacacaacatgactgtttgaatccacactga

SEQ ID NO: 37319 - DNA, 6946 bp, Cannabis sativa
  modified_base (6913)..(6920): a, c, t, g, unknown or other
atgcaaataaaaaacatctctgggcactttacccctttttgattttcatggtagagtggctaaaggtgaaacataatcaacttgaattcggcacagctattcgaaatcttagtgaagaagataacaaatctgcttgtttggcaaaaaagattaaaagggaagggatagttgtatggagtgcaaatccttcaaaatttctaaatttaaaatccttccgttaatggaaggatttatccgccatcttcaattgttagagattttaactatgcccttttaatatattattaaaaattacttacaagaaaatataataattttgtaaataaatattttgatctatgcattcaccactccattcatttcaccaaacaaaaaatgctactctattttgccttctttctattctatatcattcgtcaactctccttgctctttattcagctctatcccttcctacccaacatagtaaaataggatgcaaaaatatttttcttttgaatgaatcagagaagttgtattgctttttacaagctaattgcacccgtcaagggccaaaaataaactatacaattatcacatgttatttatttacaatctttacgaactttggaaccactctttgtctctttctttcactcgctttggccagcaaattgaaatacgctgcttaacagtaagcttaacttgttgtgttagccgctctgtatccatctgatcatcttcccaaactttagcattttgggcactcccagactgtacaccaaataagcaatggaggcagcaaggacttgcttcctaaatttgctcattttagctctttctatccaccttattaacctgggcaaagtggtagcagtagcatgccattgcaaccaatcttttactgcctttaaacaacccgcaacaactaagcaatcaaagaatagatgggaacatgtttcagaatagatgggaacatgtttctttgacttgacagcaaaatacacactgatcatctcctgagattaccatccgaagtaactcgtcttttgtttttagcctttcttggattgcaatccatgttataaaactgtgtctgggggtgttcaacctcccccaaacttattgactccagctaactttttcttgattcggccacaacaaacgataacccttaacaatatgataaggttggagagaggacacctgacctgcaatgagctcttaaaactgatctttcagcattacaagcctcctccaataccaacttccttggttaggagacttgtagtgccaccaatttttatctcgaatatacacacaatggatccatttcatccaaagactatcttccttatttgaaatggtccaaatgtattttcccatagtcgccttgtttcattcatgcacctttctgaaactaagtcctccagtggctttaggataacataacttatcccaaacaatcatgctaggaccagctgctatagcctgcccttttcacaggaagtttctacaaataatttcaatatcagtcacaattttttaggtaatatcattacctgtgacgagtaggcatggattgtcaatagcactgaatgcaaaaatattatgctatgaaaactgttttttgcactctctatagtttaatgataagtgtgatcttaagtgagattatttaatttgtacttaataatttgatataatcttattatctcatcacaataatattgtaatatcattctaataaaattagaccactaatttttcacttacaaattgtattatatataatatttatttaattatttatataattaattaaaactctaggaaagtgagagaaataaagagggttcatgtattaaaaaaaatttattggtatatttgataaaatagataaaataatatatttgatattttcaaaattacttgtttatttgcatttaatatttttcaagtttctattttcttagtgtgaaattttgttcagaccaaattatggtttaattggtgaataaatatgtgatttctttatttagattatttggtatttacttttatatttttaaagaaagtcttaatatttatttattcattgttatttgatttcttagtcaacaaaccttgtacaagttgtagtgataatgtttatcatgttttcttatttatataaggtaagtgattgaaaatttgtctaggctcaatgtatttatttgaatggactgactgtctattgaatagactctgactttcttttttgcgaagattttctatttgttggctgatggtttcttgtttctttttccatgacctagagagtttctaaagtgtataaaaacatccttaggtcgttggctttcaacatctctcttggtgcatcattttctaaaccacttttcaaatttagagagagtttttttattgtgtaaagaacttgagtccaacaagctcttagtattttgttattgtgttattctacattgtttcttgttgaaattgtgcaggttggacaatttggatatcgtttatcaagcttcaggagatgactttctcatgagtcacttttcgagaggaaaagtgcaagtgagtcactcttcgagaggaaatgtgcaagtgctacaattttaagggagttcaaggtgtcagcacttcaaaaatttgattcgaatgatagattacaacagttgcagaatatttaaaagtgtagtctttatttgtataagtaaatttggttttgtaatcacttgagattcttctaataaatttcattttctgggtgtaatcccgtggactaatagcaattcaaaagaattttcgataccacgtacaatcttgtgtgctctttatttcatgttcattttaagtttctattaacttttatttaaacctataaatgttttgttcaaataattcctatggttatttaaacatcacgataatagtatagtatttaattaattaatttgataatcataaaaataaaatttcaattggtatcaaagcgattcactaaactcttagtgagatcttgtagttattatctgtttagtcatgtttaggtggaatatctatctttgcagaaggtagttcagtatctcgtcctccacctcttaatgactcaaactttccttactggaaagtgagtatgagcgcctttattaaagcacaggatgaaaaggcatgaaatgtaattttttctagatggtctccttctttataggaaaatgaggatggtagcacaaaggtaaaatctaaacttttgtagaatatagaagaagaaaaattatctagttataacaataaagctcttcatgctattttcaatggtgttggagaaaattttattaaactagtttctacttacatttaagcgaaagatgcttggactattcttcaaactcggttcaaaggagatgtcaaaagatctaaatttattatgttacaacctacatttgatgaccaaagaatgtctgattctaaaatactatctgagttttatgagagattatctaacatttctaatgagtatttttctcttggtgaaaaacctgatgattcagttcttgctagaaaaattatttgagttctttctgacaggttaaatgttaagttgagtgctatggaagaggcaaaggatttcagctccatgaaaggagaagaattgatgggatctctccatacttttgaattgaatcaaaaattcttcctaagttacttaggctttttccaaccaagtttgacttttcttgagttgtaggtaacttgaattgttgaacataagatggctaggataaagagaaagagaaggttacctgatgaatatgatccccatgttgctcagtttattagagctaagctgatagtgcctaagtctaagaacttggacaaggcgcatggaggaatagtgataacagctaagcttctcaaagttaccattgagagtgatgattcgagagatcaagcctttaagcttaggcctttcgtgtttagtaccattatcgagcttcaagctcaaaccatttgagattactactatctcccagaaactatcgtttggaagcctcgacatggtgctcccaaaggttcccagaatacttgctgtagtgcttggttaagattctatatgaatgcgggtgcttacttgcccttgcattcatggtttatatccatagctgactttttcggtgtcttcccttaccaaataaatcccaatggctataggattctacccaccttcttcatattttactgccttaggaactagcctatcccaactcctcgtgagataaactttctctacaacttgaaaaggagtccaacttgtagagatcaaggcttctaccacttccatcagttcagtccattcatagaacacataacgaagagtaaatatggtctttactactaggagtatttctatactcttgttcttctgttgagacacattactttccaaaaagttgtccttttcaaaagacttgcttctcttattgatatgaagaggagagttaatgccatattgcttgatattgatttgtatgagagagattgttgaaccctctttaatactgaaaatctttggaaggttaggttgattgtgtcatgctagagagtgaattctaatttagccttctctgatgaatcttggaccataccacttgagcaaagagatgaagatgctcagagtgctactgttattctgtctcaaactatgacgaaaaaagtgtcttctgtttgaaatgatacaaaatatttagggagaatatctatgttcttaggctaggatggcagagaagttacctttgctaggactgatctagagaaggatagggaatcagcaagttgctgacactccatgttgtgttcttaacttgttcacttgtttctttttgttgtactaacctctggtctttactctctgcagataatatgaggttctttgttgccatagcatcttatttgaacgtgaagagaaagatttggacgtcgaaaaaagcaaagcctccggtaagggaagtggttcaaggcatcccttttgcctctgctgctttgaagaagaaggtcaagaagagaagtagaactattgatgtttctcctcctgcccatgactatggtagggagaagtcaaacattgttggtgtagatgagaagacttcgattgacctctctctggataattcagaacatgctgctccaaactcgagctcagacttagtggagcaattgcgtgagcaaggctcttggcttcttgggaacagtgaaaccctaattggtgctagggctgagaacatttcgttgcagtggttggttagcaccaagcctcctcatattatttctcaaagatgcttcaccgacatctttggagtaagtactttgtcttgtttcttctgacataactttctttttatcatattatcacctgacattatttcttttgtgtttaggcttgtgttggttatgcttacaccatggataatgaacacaagaaggtggtggagcttattgagaagcttggagtttctaaggaccaggttgttgctgatgaaggccaagtgactaccttgaaggaaaacgctgcttctcttgagagtgagatgagcaagctttaagaagtggttaataaggccaaaactcgagaaagtactttgaagaaaagcttggcgatttcttgaaagaaagcttttgatcttaaggagtcttctcgtgatgctttgaagaagtaggttgttgtggctgagggactaggtcaaggtcttggagaagaaagtgactactctcgaagatcaggctttgcttgatgtcacctactataatggcttatgctttaatgtcattgacacaacatgggttgacaacatgcgttagacttcatcgagcggtgtgagaagcattttgatgcagaaccctttgaagaaattgacttcactataatagtggtgaaccggctgccatagaaactttaagagttgatggatacaaccttgagtgtcctcacatccctccttctgttggtgaggtgccttatggggagaatgaaggtagggaggaaactcttgttgatgtagcaggcctccaggaccgtctttgagtccattcttttttttagcatttagctttagtgtgctagttggtcattctcgggcggcctttcgatgtggataagccgtagtaaaatgtgattagaattttattttaattaaattagaaattatttccaacttaataaaacttcaattccaatacttattttttttttattttactttatctattaccgactgtttaacacttgcacagtacaccatgtcttaagaaactcgattaatgggagtaatgtcactattttcttaaagttattattaccatgagagtacttacatagatgtgcaaaaaaattttgaatgctcgtgtaacatatggctctcgtataccataatataacctatgtgccccccaagtgatcaaagaagtgccttcattggtcacttgccatactaaaccccctaggccttcttgatcatgactcttaactggtgttacacgtgagaactctccacttatctgaggattcatgggtggtagtatttaactcatttaagaaacaaccgaagttatctcaagaccaactcacaagctttactcagcgcttagagaacgtcgtcaagtttgtgagctgtaattgattaatttaaatgaagtaccaaaaaaaaatttacttatgctttttctaattaaattaagtacaattacattactgtgagctaaattgaaagaaaaaagaatacactttgatgtagtagttgcagaatttcttcttcattcaagcttagctaaagtgatcctcactgtgcttatgcgatgttcaacttttagcatatgagtcataccttagcgatggacctctttgttggagatattttaccaggatctnnnnnnnntaccatgtatgtttcattaacatcct

SEQ ID NO: 37320 - DNA, 2899 bp, Cannabis sativa
cagaagaggttgagactgcaaactcttgaactacattgagattgtcactttgaaacataacacaggtctccccgagagagattgacagatctgctgctaaacacacagcatgtgcctcagccagcatgggatttgtcacctgaatcacagctgttttgatcgccacaacattaccccattcatctcgcagcacagcagatatcacactttcagaattgagaatggcaacatcagaattgcaacatttccacttaggaggtggcggggtccaactgaggacatcaggaagagtcttcaaagaggccatgacatggtctttaatcttaagggtgattatatcaatgatacgcatcatgtcctccttcttttccccaattgtccttctatttctctctttccatatttcctcaacaacacaaagagtatgaaccataaactcatcaaaagtcacattaggaggtcggttcacatcaattttaaaccaatccatccattgagcccaagtagaaatactcaccatctcagttcgaataccccaaactagcttgaaccaaattgcttttgcaaaggggcaggaccagaaaagatggagagaagattcatggctatcattgcacatggtgcaaaggttagaaattccatcaaaaacactagcaagtttatctttggtagggagtgcatcacggtagagttgccaccataaaagttttagtcttgaatggagaggggagttccaaatccatttccaatgttccgccccaacattatctagaagacctcccttaattgatcgataggctgatcgaatggaaaacgccccatttttttcacccaaccaaacccaagaatcatcacccccttcatccgacatatcaatgtttaggatttcattcacatccacctggttgaaccactctctcaccattccaacattccattggttgttaggtagcagaaactgatttacccaagagacaccgaaggacacatccttgaggggagtgggagttcgatttgaggctggcacccaggggtcgaaccaaattgaagtacttcttccattcccaatttttttgcagatgcttttttgaagaattggtcgagcttggagaactgctttccacattcccgagtcactgctattgatgtcaaggtccaagaagtttttcccctttacatacttcgcattaatcaccaaactccagagactattcttttcagtgagagccttccaagcccacttcgtcatgaaagctttattcaccacttccaagcttctaaaaccaagaccacctctgagtttagattggcacagcgtactccaattaattaggtgcatctttcttttgacctccgtgtcgccccaccaaaagtccctaagacttcggtcaactctatgggcaatctttaggggtatcgggtcagtcgcagccacataggttgcaagagaggagccaacagcttggataagacaagctcttcctgctttagacaagagacgagttttccaactcttcactctttgcattaccctttccaccaaaaagtgcaaatcttttgatcggtttagggatcggaacaagggcagtcccaagtaagtcgcatcttttttcattctcttcatgttaagaagctccgagatttctctagcctgagccaacgaaacgcctgaagtaaaatgcaccgttgatttatgataattcacagcttggccagagcaggcacagtactcctctagacactttagaaatccttttgcttctttgagggaggctttcccgaacaaaattacgtcatccgcgaacatgagatgggttacggccggccctcctctggtaatcttaaagccctgaatgatccctgcctcagtccttttcatgataagccttgaaagcacatccgccgcaatgataaagagggcgggcgatagcggatcaccctgacgaagaccacaagagggagagattgttccttgaaccgatccattaatgagaaggcccatcctttggatagtgatgcatttctccacccactttgtgaaagttggatggaatcccaaaccttgcaaggtattcaaaataaatccccaatccattttatcataagctttttccatgtccagtttaatcatcatgaaccccttcttccctttcttcttcatcatagaatgcacaatctctcgggccaccgcagtattctccgcaataagtcttccatgaacgaacgctgtctgagcaggggagataattgtaggcagtaggggctttaatctaagagccaggattttggatatgcacttataattaacattacatagggcaataggtctaaagtcatttactcccacgggacaatctttcttcgggatgaggacaatatttgtgttgtttatgcacggagggagatccaaatttcggaaaaaatgggaaaccatggcgaggagatcagttttaatcacatcccagtgatgtaaataaaagcccgttgacatgccatcggggccaggggctttgtcatgccccatacttttaatacaagtctcaatttccagatcagtagggatggagataagagccaaattatcacaatccttaattacggggttaatcagagagtcatttgcaggagcacataaggcagaattctttgagaaagtagaattaaacttggtaatgaatagatcagtaatcgatttgagattactcacccattctccgttctccatctttattgtttggataaagttcttccttcgtctgatcacagttgaagccatgaagaactttgtacattgatcgccctccttaagccacgcaactctagatttctgtctccaaaaaatttcctctcttcgcaaagcctcattcagcttagatcttgccttctcaagggaatccgc

SEQ ID NO: 37321 - DNA, 8348 bp, Cannabis sativa
  modified_base (3269)..(3274): a, c, t, g, unknown or other
tagttttaaaacggtataaaagaaacgttaaatttgttattgagatagattaggttatagttaataataaaagacaaaaagcgtgtctatatgtaaatatctctaaattatttggccatgaaaacaataaattcctattttaagaattttttcaataatatacttaaaatataaattatttacaaaaatattttaataaatctcaattatagtaatacctttgccacatcattaataaataccttaatttcaaaataatatgcctttaacaaaattaattccaaatttcgttttcttactattttcctcggttttcaaaaataaccttttggttacttattatgttgataagaaactaattaggtactcttacgtaaaaaaatttattgttaaattatataatttgagatacaatttggttacctcaaaaacttatttataaccatcttaacaatcaattagctatttttaagttatattatgctatcttattatttaaaatacatttgggtaaccttaaggtttattttcgaaactaatgaattgtcatataatataataaactctttttttatttactaattattctataaacattttatgttactttgaaacttatgtgtttaattttagattatattaaataaatttattattttaaatatttttacgcatcttttttattttatttttgtaaaaatatttatattagtttcaagtctatttaataaattaataagttacaataaaattcaaaaaaaaaatcacataatttattggtaaatatttaaattgttaattaattattttaaagttataattttggttacatttaaatttactgtagaaaccaattaattttcatatagtataacaaattataagcataaatataaaatagttttatttaatatacaatataattatatttaaataaaattgtgtaatctacatttggtctttcatattttttattatatatatattgattaatacatataaaaaacagtgaaatttacaagttatttataaatcaaacaaataacacatgcacatattattttttaagaaaataataataatgtaactacaaaatcatttccataaataatataatttaattaaccaaatgttaaaaataaactttacttgttaactaaataaaaaacacattggagaatgtcttgactattgtcatggtttgttcgtactttgtttttataagtagtctgttttgatttttgtcttttgattatggcgtcatctagtagttcaagcaatcaactatacgacatagctattgaagatgaaaccaaaggtggcctcgatttgcaagaatgggatacgaggggggaagaggagtttgtgtttgattggcggctgtgcttgttgggaggttttatcacggcagggacagtggatttcccgtctatgcaactgactcttgctgctctgtggaagcccggtaagggagtttatataaaagaattggatgctaaccgctttctgtttcagtttttccatgaaatagactttaagcgggtcattgaaggcagtccatggtattttaataggaaggctttgattatctcacgtatgaagaatagttctaatcctcgatgtatcacccttgatacagtggatctatgggtactgattcatgatcttcaaactggatgtatgacatcaaccattttgcaggcggttggaaattatatagggacatttgtcgaatcctgacctaataattttatgggcatatggagggattatatgaggattagagtcaccattgatctatcaaagcctctaaagaggagaatgaggcttcgcaagcttgatgaagagtggttttggatcactttcaaatatgaaaatgtccccactttttgctttatctgtgagatgttggggtattcagagaggttctgtgcaaggttatttgatacactagcacatgaaattaaaaaaccttatggcgaatgtatgagagcactgctccgtcgacgtacaaagatcatcggagctcagtggctgcgtactggattagaaggtatgaatgctagctgtcatgggaaataaacaccagctattgatgcctcaaatcgtgggagtaaaggagttgttaatgtcccgaatcatcaggggatatcagacatggccattgatcgtgggaagaagcatatgtcagggaaggaaattgatggtggaaatagtgaactcagtaactctctacaggacgtgattcaggagttggttactaatcagcctggtttcaaaaaaggaatgtgactagttgagactaaaaaaagaaggacttataatgacatgggccatagtgttgccatgtgtgtggaaactgaagtgggcctaatatctgacgaggaagaattgagtaccttagttcctatggaaaacagtggcccaaaaaacttgtctggggcgggttccgaatcaaggacctgccaaggattatgagcattttaagttagaattatcgtgggcttgggaccccgtggaccgttcaattcctaaaggatattattatccaaaagaaacccaattttatttttctttgtgaaacagtttgtcaaaaagaaaaaattgatagattgaaaatggccattggttttgagggctcttttactgtaggaagtcaggggcatagtggaggacttgctgttctttggggaaataaggaggaagtggaattaaaaacctttatcacaaaccatattgacatgattatatctgcccctaaatggcctcaatttcgtctcactggagtctatggagagccaaattgatctaaaaggaaactcacttggaagcttattagtgatcttgcaaagttatccagccttccatggtgcctcacaggtgacatgaacaatgtcacttgtcaaagtgataaaagagggggaagaccttatcgtaattggctcattgaaggttttcaaagtgtgttaactagctgcggtctcattgacatggagatggaaggatacaaattcacttgggagagaggaaagggtacataaaattggattgaagtcaagcttgatcgagggtttatcacctcaagttggcttgataagtttccaaatgcaaggctcactaatcttgaagtctctacctcagaccactgcccgattctccttgtccctgctgtccaaatccaaagaccatcaagtcgtaacttcaaattcgagaatgcctggctccgcgagccaatgtgtaggttgttggaattattttaccaggaactnnnnnntactcacaagtatgttgatttatcctttcctgaaaaaataacaaagtgttttgacgtgctagccgattggggaagagagatcactggcaactttcagtccaaaatttctcaatgcaaaaaaagaattaagctgttaaaagggagacgtgatactgattcagccaagagatataaggaggaaaatgaaaggcttgctgagatgcttactaagaaagagatattttggagacagagatcaaagcagctatggctaaaggaaggtgatcacatctctaaatattttcatgctgctgccaaaacaagaaaacaaaacaatcggattaattctctccgtaatgattctggtactatggttggatgggatgatggacttcaatatgtcatggttggttactttcaacaactttttacccccacggttactagtatgaatcaggtgatagattgtattccaaaaactattaccccgcttcagaatttgctaattgtggcaccgattgaggagtgtgaagtcaaaaaagccttatttcagatgcaccctgacaagtcttgggaccagacggaatgagtccaggattctatcaaatattctgggatgtcttgcgtcatgatgtcgttcagctggttagagattttttttagaatgcaacttttccagatcaattacctgctaccactattgtccttgtgcccaagaagaaacaaccaacttcgatgactgaaattcgaccaatctctttgtgcaatgtcctatacaaagtcgtctctaaggtacttgccaatagaattaagttggttcttaataaggttatatctgaaactcaaagtgcgttcattcctagccgattgattaccgataatatcatggttgcttttgagataatgcactacatgaactagaaaaactgcaggaagaaatggagtcatggccctcaaatttgacatgagcaaagcatacgatagagtggaatggggttatttgcaggctgttcttactaagaggtggtttgataatcatacaacttctctcctaatgagctgtgtcacctcggctagataccagattgctcatgctagcaagttatttggctctattattcctgggagagggttacgtcaaggagaccccttatcctcttatttgttcattatttgcacagaaggcttctcggcattactgaagcattatgagcacagacaacagttaagaggcattcaaattgctcgtggggctccaactgcatcccatatgttttttgcaaatggtagctacatattttgcagagctaatgagagagcaacttccaatgtgcaatcattgctgaatgtgtccgagcaagctttgggacaaaagataaatcctaacaagtcatcaatcttttttagccgaaatactgatgtttatacaagagacgtcatttgtggtgatatgggaatacatgaggctgatgaccatggcacttacttaggccttccgaatataataggcttgaaaaagtcagcaatcctcgggtttttgaaagagaaagtgcagaagcgtattcagtcctgggatggtaaacttctgtcaaaggcgggtaaagaaatactgctgaaaactattgtccaagctctccccacctatgcaatgagcgtctttctgttaccaattgaaacaagtaaagagatggaacgtgctatgtgcaaatactggtggagttcttcttccaaaaaggataagaatattcattggatgagttgggatcgtatatgcaagcctaaattgcaaggaggtttgggttttcgcaatctatatgattttaatgtggatctatttggaaaacaaggttggagattgatggtacaacctcactctcttgttatccgggtgttttaagccaagtattaccccaatggctcctttctttcagctgagataggtggcagcccaagttttgtgtggagaagcattatggaagctcaaccactgctcaaaaaaggagctgcaattcgggtatgttctggtgcatcagttaatattctaaatgacccttggttgcgtgatatttcagacccttatgtgcacactgtatgtgattccctcctcgacaaaaaggtatctcagctaatgtccatagaccaagatcaatgggatatggatatactccatgacatcttcaatgagagagatattaacttaattgttagtatccctattcaagtcacagagccggatattttgtaatggaagaaagaaaacttgggaaactattctgtgaagagtgcttatgctatcattcaagaagggaaacagccgcttgcaacacctgacctttcaggtttctgacgtaagtgttggaatttaaaagtccctccaaaggtgaagaacttcttatggcaagcctctactaattgccttcccatgaaaactcagctccaaacaaagcatgtggctgtcaatgctatgtgtcctttctgcaatctcgaaaatgaaactataaaccacattttggtcacatgttctttctctagagcctgctggacagagctagaaccaggtatttctactgatgtggctagcacgtttcctagttggctcaattggattttcaaaaattggagtggaagaagtagacagctggtggctatgctatgttaggcactttagaagagtagaaacgaactggtgtggaatcaaaagaatgttgaagtcaaggatgttgtagtgttggcacaaacggttcttaatcaatggctttatgctcaagataaaaatttcgatccatctttaggattacttttcctgaagatggtaatgagcattggaccttaccaaatgttaatacgattaagattaataccgatgctgtaatattctcttcaaccaactgttactgctactcttgtgttgctagatctcataatggtacactgttggaagccaaagccaaatgtgtaagaggagttgtctctcctgaggttgccgaagccattggtatacatgaagctttgagttggattaaagaaaaacaatagagtcgtgtggaagtagaatcggactgccttgttgctattcaatctatccgtagctcttctaccatgttttcttattttggtagaattatcactaaatgcaaaaggttgttggatgaattgaaagattgttttgtttctttaaagtttgttaaacggtctgcaaacaatggagctcactatttagcgagatccacttgttctattgctgatcgtagtttgagtttgagcaatgctcccttggagttcatttctgtattgatgaacgatttgattatttaatgaagtttattcttcttttatcaaaaaaaaaataaaaataaaacacatttgagtaatcttcaagtttattttcaaaattattgagttaatcataaaactattgaattgtaatctagagtgtacagtgaaatttttattaattgttttttttttctataacaatcttttgttatttgattttatagtaataaaaaattagttggaggtaatacaccttatgtataaatgacaaatattgtgatttaaatatgtaacgtcattattgaaaataaaataagaaaaagggttcttgatgtagatttttcttaaaataatagtttttgcgaaattggacaatctcaaaatttggagcaacttatatacatataggaatagaagaattctcctatatacagtgtttactgtttagttttttgttttttttttttttgtaacattacaatattttataataaattgtaattaatcctatctattatatatgaagagaatggactctctcttaggggtattcatcccattcaatctgtattttttttttgtcaaacaacatccaatccacattaggtgcgaattatttcaatccgcataacaatttaaatccaattcaatccaatctccaatagtgcggatttgatcgattattttggatcggttgttttttttcatgataaattatataacatttcgttaaaatttttttttaaaaaaaaactattgtttcttaatctccaataataatctattttcatctctatttatatacaaataaaaccaatacacatatatgtacttatctttagatttacactaatatataaatactcatatttagatttgcactaatatatatgtatccattactaaaataaataagctaatatatatttaaatttatgtgtatgtgtctatatatgtaaataagaatattttttttttcgtgttttctattataaaacaaataaaatgtgccaactcaatatattactaaaaaattaaaaaattaaaagttagtgtcttttttgtaatattactagaaaattaatgtttattatatattataattttttaaaaatatatatataattaagtgcgcattggattgggtcggttattttttgcggattttaaatttttcaatcttatccaatctgcatcagtgtagatatctgcattttgcatattgaattagattggatcgtgcggactgaattggattagatagtttgtgaatacccctaaactactaaatatatatatatatatgggtgtgctcttaatgggtattacccataaacgggtatttaattattgaccattagatttgatcaaatggataatatttattgttattaattatttttttaaaattaatattttttatttttacttattacatgatgatatgtcagtcattttattttcaaaccttattctttttattttattcttattcccgaatataaaataattaaaaaaatattaatttataaatattctctctttctctctttctttctgtttcattagatatgagtgatttgattaaatcaaaggcttatttttttttcatgggatgacacaattatattgtattctgagtatttgtttgatttaatggtttgaattttgcaggagcctaagcttctccgagtccatgcagagcaaattcggaggcaaatgtaagaggttcctgctgataattaccgagcttttattgctattgatgaggccttgctctcaattcaaggagaaatatcttccattgataagcatcttg

SEQ ID NO: 37322 - DNA, 10061 bp, Cannabis sativa
  modified_base (986)..(993): a, c, t, g, unknown or other
  modified_base (1697)..(1704): a, c, t, g, unknown or other
  modified_base (2792)..(2794): a, c, t, g, unknown or other
  modified_base (9087)..(9088): a, c, t, g, unknown or other
ttatctaaacctatggcttgtggtatacctggtaattcacttactctggtacaggcaacttacttagtaagatgttagagaatttttctaatggctaactctaaaggaagtcttttgactcctagacatagattttatttatctaaggaatagtttcaactattccagaaaagataaaggccaaggaaacaattctttaagctttaactgtgagaggtctcgtgtatgccctggtatgcattagacaagatacctactgttgaatgggagttatgagtaggtagcaatttaattcaagaaagaaacaattgaagacaatcaaataaatcttaagatcaaagtagaaactatatgttagtcgataaggatggtattttaatacccttaggctacaccaaattaggtttctagacttgcgtcaatgatagaaagtctacttatgagatggtgataactatggaggtgtagtagtaatttttggagaagtgtaaaaacctatataaagcctctaactctactagtgagagtgaatgttatagtgctccagaaggctactagaaaatcatggattaaccaatcatggattatagttgccaaatagtaaagaatccaatcatggaagtgtaaaaacctatataaagcctatggaaagttacagtttttgacattattccaatcatggattaaccactagtgttacttcatgataacaaagatatagttgccaaatagtaaagaatccaataccctaagaggagtaaacatatcgtaggaatttcataatatcaaggattttatgactaaggagatgtaatggtggttgaaatttatattgaatacaacctgtcagatcctttaataaagaaaatactacatactacacttgattcggacatcaaggagttgagattaattaaaatgcacttctagttttatattagtgcaagtggaagtttgtggtaattttatgccctaaataaaacccnnnnnnnnataattagatttactaattaataaaagatcaaaaattattttatgttgcatggttaacatgattactttcatgatcatattttaatgtataaattttattaaatcctaaacatatagttattcatgattatagtgttgtgtactcagtgaaaaataatcatgattgtatgcttcaaagtatttagtcttgtgatttattagtacactgaatttacactgacgtgataattagcgataaagtttacttacgtaataatacgtggaatgtcctttcctgaacattagcaaagtatactagtatcagatgtatggggtatacattggactgggccgatattgacaatggaaaagatatcataaacttaccggtatatcttttctaagtcaatcacctagtttatcttagatcaataaatcttaatcctgagattgttaggttctactttaaagtattgtttgtgttctttgacttgttcattaaacctgacagaattgattggaccaatacttacatcttgggaacatggtagtgcaattgagtgggagtgctaatcatggatacggaatctatagcttctataactattagaagtgaaacgatggtttccttcaagcttggcttaacgcgataaatgatagagtgctcatttcagtaattatattagtttactgaaatatgatttacaagtagctaagtgttttannnnnnnnatacattgaagggtagaacggtaagtttgtccctactcaatgtaaatcatctatagaggatctctgattatttggattgaaataatagataattcatagtgtatatatatttggtatatagagcgttcttatgtaatcaggagtgcaatttcaaatctatagtggagttaagaggaactaataagttaggaaatttatttagtaaattttagatctacttagtgggagcttggttacaaaggcctatggtccccgcactaactgtgataatattattttgtagtctcaattaatggattttaattaataattagaattctaaataagactatgtcttgtttgtgaattttcactaagcaatggcttatttgagaagaaaagagattttagggtttgtttattaattaagtgactttataaggtataattaataaataaatttaatgaaattttctttgataattaattataattattaaatagatagaattaatattaatagagttagaattaaaagatgacatctgagaaaagaaagataagtttcaaataaaatggcaaaattaaaacccaatagcccactaagggattcaatcataatggtttaaataaagcctattttaacctttatttgttccatttaaattctaaacctaacactattagctatcatataaatagaaaagtatagcccttattttcataacctaattgactcattgtcaaaaaaattaaaaaataatgagagcctttctattttttcgaatcccctcttcttctcttctcaataattcgaagcctataatgattgagaatatgccagacatgtcaaaacaatacctagtatagtgaggaagattgtgtagaaaaattgacaactggaggagaatctaggttcagatcttgatcatactctgcaacaaaaaggatcaagagttagagatttgaatggaaggagtcatgcaattccattgtcatcaatgtaatgttttctacaactttatatgtataattcattgttttagggacttcatatttagggtgttagattatagttttataataaacatacatgttagtaaatctannncctagtaaaataagttccaacaaacacctcattgcaaggtgtcgcctccaaacaatgggtcgagaagccacaaagattttcaaaaacagaagctacgccccttagaagccctaataagtctcaatgggaaaatagaaagaacttaaacccatgaaaatagaacctgcaaaacttgaaatttcaagccactctctctaaaaaacacccatgacaagataatctcagcctaattttggttttcatatctaataacctcctaaatcctagttctagcagtcgcatgcacaagaaacccaaaacatggcttgaacaaaaatttctaccctagtgtggaatggaaaagttctacaaagtttggaaacttttttgctttgctacttgaaaaggaagggttgttgtaatgaatggcctaaaggtggcgaacccagttgatcacctggtcaaaacctccttggatatcgaagtcttcgatagactaggggtggatcatgtggatgtcaaaaggcatagcatttgggaaatagctcgcttgattttcaagaagatttacgttcaaaaacgaagggagttaagaagtttagagatgataaaaagaggaacaagaaggagctcgtgcctatttataatggaaaggccatctcatataatttgaaaattaaggcttaaatcatgccaaccaaacagcgcgaaataatccaatggttaggaagttaaaatggctacatttaatgctcattggaaaaaccaaagcatttaatcatgattcgcctcgcgccctgtttactgagtttttttagaaaccaaatatattcaaagcttaaataagataaaagataataaacaatagatagatagatttttacgtggtgcatgcattaaagatccttagtctacgagtttatagtattagccttcttgggtaaatgtgtatgagattacaatatggttacaatgaaaactactgtgcttcacttgagagagagctttcttagaatttcaacagagtgactgtaagtaaaaaattatctctctttgcctgaagaaaggtaggactatttataggcacacatagggtaaatggcataccctttaccaacctatggttttgtaccccatactctactaaggtcagtactgcgagaggaagatctgaccattggctgggaagaaccttcttcatcgtgtggtgtacagtggcttgtgaggccttttgtacaatcttggacacgcatcgcgcaaaggtccctcctttgcaaaatactctctaacgaggccgttaggtaaaaaggcacgagggacataatctgatcctatctaaaaaaaggtgtaattgtctatggagtgatatttgcaagatgctgatgtggccagtgtctctaagaccttcattacctttctagttctttactaagggaagttactcccgaaagccatcgcctctcattgccttccaggtttgggagtcattccttttcttagttacctcgaataattcttcttgtggttgtatccttcccttcgatcatgacacgtgtcttattaatgaaaactcggatgacatttacttcccaagctttctagatcttttggatcatgagatcttgctattgcttctggtgttgatcgttgacatgtgccgcagatttaggtcatggatacacccgcacatgagctatattctattggaggtacatatgatgtttgcttcctcttacgtggtaaccatgtggctttttagaaagtatttcttaacccttttcatgtgtggcaaggtgtgtttagtaataaaggtcgagtgtaactggcagctgaatgacgtgcagaaagggaccttgacattttgatggggcccaagctgatcatatgggacttctcatctccctagcccttggatctattgcaaaaaatttcagccgttgatctttcataggcatgtcttctttttaaaatataaaccgcctttagtggtgttctttttactccgtatactcaaagctccatattttctctaaaatttcttttccttttccagccatcttttgcatggaagaagcgttaaaagatctgatcgagtgattactcgtcattcgcacagaacgtttgattggaccagcaaagttcttccttagggggaacgtttgatttttaggttaattgcgactactccatcgactggctacgaaactttcaggaaggctttcttgacacgccacttatccctcctgattcgacaagtatgttcaccaaccccctgtgaatttttggcatttcacatttagaacaaaagggttcttgcttaggttagggctaggactattcacatgccaaatagcaggatagtctgtacgaaagaaactccatccttgcacccattagtcatttcaaaaggtttgctttttccttcatagcaatggatttgaaccaagaccttctcccaatcgtggccatatctgttgaaggtggatctattccatctgtcaaaagatctttagtgagacaggaccaaatcaaggcacctatggtaacatctcaacttgaggaggccttggaaaccattgtgaaaaatgatttcattgttgagagatacctacttgtggagactaggagaggcgaaggggtcaaaattcctccgccagtgcaggcctatactgagtccatctgggaattggatgagaaagccaactgcttttgatcttatgggatgtttcaagcgtattttgaagttgttggcctccgtaatatccctagactaatgtggcacaaactttctgtcacggggaaatctgcatctattagtgttgatgggttcagtgcataaagttcgtcccacatttctagtggcgctcaccttcccttgagaacctttttcacgaacctgattgcaaaaattcgaattatacctttctagttgatccctttgtcatataggctcttggctaggtggtatgtgttctgtaaaatcaacaaactaaaggttccttccacgaaggagatcctttacttttatagtgtccaaaccaattccatgaggacggatagatcaaagatgggtttcttcccactagataagtgcccagactcttactgccctatttgtcaaatggatcgcactcatgacctcttggaatattggttcttttctttcgggttccttactagcaatgtgccatctcttcagttaagctttcaactcccaagtattctaatgatttaccttgagttttgcctactttttaaactctactagtttccatacttggactagcatacttgatttgtagcagagcttccccctcaaagtgtttagactaaggagatagtcaaggaaaaagcccaatatagggccttctcagaagagcaattgatggttgggcacctggtgacaactaaactcctccacaagtccagcttgattacaaaattttagagaataaacacagtcagccttcgaggaaagtcccaagctccgagggaagtgaaggaggtgattgccaccgacatggctgttataatcacaaatgcagccaaaaatgataatgccctaaactctgattaggtgtcgtgccatcgcgatcctctatctgaagaagaagagatcttaaagaggtttaccgctacttatcctgatatggggaaaccaggtgccagtacttcgaaaagaggtaatgaacccttctgcatcctccgtacccctagcctgggtcacatgtcccagagtactcgaggaggatttgacaaatatttcctaggcataaaccaccgtagataccccatggaggattatatagacaaagtagaccaaatagttaggagccttagaaatccaggaactccttcggatactgtcaaagtaaaccctttgatggccatgtctctaccctaatttaaggagtatggcagcttcattggtcataggggtattttagcttttactcatggacaaccctatagcacttcacttaatggttgcacccatgcacaagtttctttactggattcttcttcttactgctgtaagtttcctcatgactcaccatcgctcctctcatttacttatattgttgttttatgtgcatatacacaagaatctgtgatgttgaagtcttggagtaacatgatctcagtcgctatggacaaggccaagaaagcccaagaaaaaggcaaggggaagattaagaccagggcctccaggacctggaaacttcgtcccccctcaacttcctcatcatcagacgtctgggagattccccctcccaccaagactgggcctactacactggaccatttttctttggctggtggagagaaggactctagcactgaggctctcgctgctctaggggagcgattctgacaggtcatcccccatttgagaagaacgatcctaggcaccacaccaaacacggtgacttatgatgatagcttggacggacttgtctttcccccaaaaaggactcttattaagtccaaacgcaagggatcacatactgccctgggtcgtagcacaagagggttaaacgttcaatcccgaacttgggggcatctggcgtaccatcgtctagcctaccattacaacaacagcaacaacaaccacaacaaccatagcaacaacgacaacaacaacagcaaccacaaccacaatagcacaacaacaacagctgcaacagcagccacaacaacaacaacctgggcgagtgcctctaccacaatagtagtgaactctatcccctcgtcagttgcagattgtgccatctcagtctacctcacgcccctctcagtctcctactctttaacacgttcctgggtgcacaactcctaggccgcttttactaatccatctcagcacaccgtagggggtgaggttccttctttgggattctccttcccaatgaggccgcctattctcggccatgattacctcacaaaggcaggcaagtctgctgccattttgaaaatgtgccatgactaggaacaaataaatcttcaaaagagggctacccaactgtcttctatcaagatagttgagattgcagagggagttcgccagccttcatcctccagccctgtgtttgatcagactgcagtgagccagaatctggtacctaatgtgggtacagacattgccccatatgctgtagaaatgttgaacagtatgagccttagtgtgagcaaactcacatcagagaagtaggtcgtgagcagcagtgttgatccatacacattatcagtggccgccaaacagcaggtcgcggggttaaatctcaattttttgagccattcttccttacgataaaatttttattacgaaagtgcatgtgtaacattttccttttatttttctttctctagatggcattgtttgcagagaggaccaccaaagaagtgggtaacatgaccattgaactgagccaactttatgctaaagtctaatccttgacaaccgagaacggggccttacgcacagaagttgagtaggtcaagacgcaggctgtctccaacaccaaaaaggtccaggaagactacgaagccaagatggatgttgaggagaaaaagtgggatgccaaatactggaagatgtacttagataataaggccaaaactgagcaagaggttgagaagactgtacgctcctttaaagagaacctaagcaaggccagggaggagaaagatagagtcgaggcccgcatgatgcttcagtttgaaactatctccacctagatctaaaaagtcaagaccctccaagaggacatcccataaaaggacctactcattcaaagcatcagtgtcgaacacgacaagcagaataaataggcaaagtcttagatatcttaggatgacaatctgaacattctttttaaaggggcccgtcatattacaagaaaccacatttttagcaataaaattttagctaccaaatataggttccagcagttaattaatattagttactaaattttggtagcgaaatgattttctagcaagttccaataaaaaaaatactatgagttttctaccaaatttttggtagcaaatttatattttatagctactaattatttttggtaattaatattttcagcaccaaataaaaatttgctactaaattttagtagcaaaatgagttaacagagaacttaatcaaaatgacactaaatatgcttgttacaagaatttttggtggcatatgaatacttttagctactaatatttttttgtagctaaaattatatattggagtaaaatataaaattgatgcattttatgtatatattagaatttattgcaattataannttattgctactaaattatatcatatttttacactaacaaataaagtatttctagctaaagtgtgttgacctcgcttttagccaacgacaatgagtcttaattgtaagcgataagggatataatataaatataatattgtaagataaataaagaacatagagtttttaaagaggttcggccccgagcaattcggtaatagcctactccccttaatttgtattgagttaagaacaaagaatacagtgattcttctcttagagctcttacaatgatatctctaagtatactttattagataactttttccaccccatgcccagtgagaatggatcactatttataaggctatgtgcttgagtgattgtttccccttcgtttacaatgtctataattggtaatattacacattaaatgtatagaatacactaattgagggatttggacagcttgccatatctctgtgatataatcccagatttctagggattgttcttatccttcacgatgcaaatgctgaggatgctaagtgttgatatgttgttcaactatccactgttcgactaggagaacctcgtcagagtgccaaaattgggataacatttccccccaagtctgcacgagacttcatccgagttgcctttacatttgaatgagtgacacatgtttgatgcgtctgttcgtgatttgatgtgagtctgaccaggcaaatcttcggttttcggctaattaatgccctaacttaattagtgcctcaaaacccggtttcttttgcatgcttcgacggttacacttgattatttttaatttcccaatattttcttttggggggaaatcgaagcgtctgaggtatttcgaaatgattacctcttttcaacaattttcctataaataaggctggttgtaatatcccaataagtctaatggtaaataattagggtttatatttataatatgagttaatcaggtaataagt

SEQ ID NO: 37323 - DNA, 2688 bp, Cannabis sativa
agaactaaaaaagacagaagatttagcaaaatttacttcttggccagaggcaagttgaaaagtttgaagcatgttgagaacattagagacttctctgtcgtttgctctacaatagacatagctatcgtcggcgaagagcatgtgggaaatgattggagctccattagccactctacatcctcttaaaagcctagatgattcaaaccgtttaatgatagaggaaaatccttcggcacagattagaaataagtatgaagataatgggtcgccttggcgaatacctctgtgaggagtgatagggccgacttcttttccactattaagaattgtgtattgaacggtggaaacacactggagaatcagttgcacaaaatgttcatgaaatcccatcttcttcatcatagcttcaataaaggaccattcgacacgatcgtaagctttactaaaatcaagcttcaaagccataaaaccttcctttccatgtcttttcctcttcaagtaatgcataacctcatatgaaatcatgatattgtctgaaatcaaacgtcccggtatgaaggcgctttgatactcggaaataagctgcggtagtacctctttgagccgattagccaccactttagagattattttgtataagacattgcataaagagattggtctaaggtcacccatggtcataggattctttttcttgggaattaaaaccatgtttgtgtgatttaaaccagcaggtaacaaaccagaaaagaagaagtttctcactagttttatgacatccgtgcctacaacattccaattacgctgataaaaacctggtgtcatgccgtctggaccaggtgatttatcggggtgcatttgtttcacagctttactcacttcctcttcggtaacaggtgcaagcaaaaacatattttgggcagtcgaaattgttgtgggaatgctgtcagtaatagcatcagctgtgtgtggtgaggagttgaatagatcagtaaaataatctttaattacatcagccaaaccactttgccaatccacccaataaccagctgagttttgaagcttagagatagagttagttctttttcgagtagtagcataagcatgaaagaacttactattttgatctccttccctcaaccaaagttgttttgatcgttgtatccaaaaaacctctctttgagtatagacttcaaacaaattttgttcagcttctttgtgtttattgacagataaagcatcccttcctttcttccagtattgaacctcttgtttgagatgtttaattctgtccttgaagttacccgagtagctatctccccaagtttgtaaaatgttgctgcagtgtgctattttttcagtaatggcatcagaaggacaactggaccagctatcctttatgacttgggcacacattggttcacggagccagcaattttcaaaacgaaaccttcttttaggggcagctgtatcataatagcaggggactagaagtaaaggagtatgatcagaactagtaacatcgatattgaataattttgctgaattataatggtctaaccaatgttgagaagccaacgctctatccaatcggacctcgatccaattgtccgttcctcttccttttttcccacgtaaaggggtagccagtaagctccaaatccctcaaattgcagtccgataaagcttgattgaatccatcaattaaccaagtaggatatggattaccacctcttttatcttcaatacagcacacattattcaaatcacctactatacaccacggcagagtatgtctagtagataaagtcctcaataaatcccaagttttgtatctaaagtttctgttgggttcaccatagcaccctgttaatctccacaccaaattattatcattgtggatactaacatcaatgtatgagttggaaaaaccaagcacctgaacgtcctcctcaattttccaaagaagagcaattcccccacttctacccacaacatcaacagcaagtagaccttcaaacccaaggcttacacaaagcctttccagaacatcctttttacttaaagtttcacatagaaaaacgaatttgggcctcttttggatcacaatatcctttaggaattgtaaagcccgtgggttcccaagcccacggcaattccaactaagaatactcatggtcctaggtgggcctggaccccaggacccaccctttgcccattttttgacagcccatcagtaacatctacattcatatctccatcatcctcgctcaaattttcaatcccatccatatttgttcttctacgcttagaatccgagacaattaatgtatgattgtctgagtggccctcaatcacggttgattgctgattaactccctgattcttccttaattccatgatactagcagtgtcaactctagcattaatggtattgatactgtgatcgtgagcattaatcacattgattgtttccatgttcacaccttggactgttgattcatcggaaaactgggcatctgtttctgtcccagtacgcagccaccgtgatccaacttgattgtgtcttttccttggctcagctttcatccatatgccatatggtttctctatttcttccagtggtttttcaaataaacgcgaacagaacctttcagggtgtcctattaaaccacaaatgaaacaaaa

SEQ ID NO: 37324 - DNA, 2028 bp, Cannabis sativa
gggaataataccgccggtattaacctaatttcttgtagtgtctactatagtttttctaccactttttctttccactccattatatatctaattaataatcttccaaacatatgtaactaaatgatctttatatgcttattaaaaaagaaagatctttatagaaaaaattacaaatttgatgaatttttatactatctatacaaaatgtactgtttttttttaaaaaaaaagttattttatgagaaaaatttaaaaaaaggttgagaaatatgagaaaactataaagcatgtttggctgtgttttcagttttcaatttttaaaattgtgtttttaaaagtgagaatagaaaatatttttttgtcatttaaaattttttttttgtcattttaatactttctattacaccaactcaatatatttgttggaaattaataagacttaagttctaaactaatagttcattttacgttcatacgacagagaacaaaaaaaataatttagtaacaaaaaacacaaaatcctcaataaacctagttcaaataaggttatttaagagtaatcaacaaaaccattaactctcgaaccctagagaccagtaccatcatcgtcttcctaattaactagagagattagtacacaatacatgattgagaagtagttatagaaaaaatattaatgaaatcagtgatgaaaaatatagaaaaaacacgaaaatttataaaagttcatcctaaaaacctaaaaattaagaatacatcctctttctatctttcttacatacacttgggagcacaactggaccctttctttgataaaaaatttcttgatctattgataaaaaatctaaagctatccctatttatatctttttatttggagtaagttgttggtattagacctggatcttgaatttgttgcatgtaacaattttaatatgtatctttgagtgatggcgaggaaagttcatgcatcgtagattttattttgattgtgtatgtttagttaattttcttttttttttttattcgttagtgacttagagggaaaaatttgtagtacatttatttgttttggtatttaggtgactaattttttagttttttttttttttcatgatcgtatatattttagttatttaagattgaccacttataaatttttcaaatttttttgaatagtttacaatatcaaaaattaattcaaatagttgattatatttatatttatatatatatatgtaaaaatagttacatgtcataaaatatttaaattttattttcgatattataaaatttttaaaaaatttaaaaatatttttaaaattttcctaaataccaaaatataagaactaagaaatttgtggggtgtactaacttatttaataattagttagtttgttaattttaatattgtgttcattatcatcatgttcatatataattaattatttgggttagcatatataattaatatataataggacaaaaacaatcctatctgattcttctggagaaagattttagttcatatatatctctttagagatgctagacaagacattgtgacaattaattaattaattaaagaagttaaattaaacactaaattaaccttttccaaatgggcaggaacatccaggacccagagaataaaggaagatcaaactttacaacaacacttatagatattttaattttaataattattagtttgatgcaaaaattatattccttgtcaaatcctatccttatatatatattaattatataattaattaaaacccaaatttttaaaccccctaaaaccattgggagactaggcacctggaaaattcttcaattcattattaaatttaaatatatatatatcaaaattataacaataatgacaaaataattgagcactaattatatatgtttgctaaagatggtgcattgctgaatcatgacatatccaaatttatttaattaattgtctctctgtgacattaattataaatggctctgatcaatactataataatacaa

SEQ ID NO: 37325 - DNA, 9679 bp, Cannabis sativa
  modified_base (3522)..(3522): a, c, t, g, unknown or other
  modified_base (3643)..(3649): a, c, t, g, unknown or other
  modified_base (7407)..(7415): a, c, t, g, unknown or other
tgaaaaatacttctgttacttttttgatattgaataatctggattacattgaaatagagttttatttaaggcataaaacccaacaataacctgaataacatgcattggaaagtaaatgtaccaaaagggcatgtaaaggctgtctactccttgtcttttagagcaatagcaatcatattataccctgaatatccatcaagaaagcgataataaggatgacctactagcctctcaagcttctgatcagtgaatggcaatgggaagtgatcttttcttgttgccgcattcaacttgcggtaatctatgcagactccccacccagtttgcgttcttgttggcactagctcattgtcttctttttaaactaatgtgatcccaaatttctttggaaccacctaaacaaggcttacccatttgctgtctgagattgggtaaataatgcccacaccaagaagcttcaacatttccttcttcactacctccatcataaggaggtttagcctttgttgtgcatcacatgtttgtttagctccttcttccaagagaattctgtgcatacatgtagtaggactaattcctttgatgtttccaatggaccatgcaatggcagttctgtgagctcaaaacacgcttatcagtttttcttcttgcacttggtcgagatctttagcaattacgaccggtaatgtttcattctcctaagtaagaatatttgagatgattaggtagtgtcttcagttcaagaataggagcttctacaatggatgggtaatttatcaattaagattggcaattccacttacgccaccttcttgtaaagctttttgaagtcgttattaagggcaattatgacatctaccatctcttcagaaaagttctcctcagaattcaacactaagttctctcgtatagcaacttcaagactatcttcactatgcagatgtagcaccctttgggagaggtcatccaacatatctataataaataacatatacatcacttggatacctcatggcctcaaaaatgttgaatcagattgtctctctatcgaattccgtagtcaaggttctctcgtggacatcaatcttggttcttgcaattttcatgaatgatcttcccaacaaaattggagtagaacaaggactggaatcatcttccatatcaacaacatagaaattttctggaaataccaattcattaacttgaactagcacatcttcaaggacaccttttccgtaggcattcgacctatcggcaagtgattatcctagtttcttcaggtggacccaaattcaagaagttatagatagagaatggcatgacattgaggcccccaaatccaacatacaccgctcaattatagtatttccaatagtgtaaagaatagtgaaacttccaggatccttacattttggaggaagcttcttttggagaactacagacacattttcccccacacttactatttcattaccctccaacttgtgcttattggtgcaaagcttcttcaaaaacttggcatatcgtggcacttgtttaatggcatcaagaagaggaatgttcacttccaccttgcggaatgttgaaagaatttccttttcaacctcttccttcttagtcttcttcaatatgcttgggaagggtggtggtgtgacaaaggtaggctttggtggggcaggattgtttagcttggttgcctctatttcatcttttgggctatcatcttgtggtttgggttgtgtcgtttttggttttgggatgataggtgggtcatattgttcatcacttctcaaggtcactgcactagcattctctttaggatttttctcaggttgggatggtagttgattgaacatttgagattgcatcccattacaggattttgagagttgacccaattgattctttaaatttatattgctgcttcagattgttgttggaaccttaaagaactagcatccatggcattaatgagttatttattggtaggcttgggaggtgatggtggggaagcttgtggtgcttgattttgtcgacaggtttccactatttataattgaaagtaggttttgtaggttgctggagattttgttgattgccgtagcggagatttggatgattctgccaattaggtctataagattgggactgtggttcataaagctggcttaattaacaaggaaaattacatactggattcacatcttcagtctcatcttcaaacaatgtagggcaggtatcagtagcatgtctcacaatctcaaaaattccacatggcctcacctattagcctaaagcaagttgttgtaccatagaggttaattgagctattttcttactaagttgcttctcaatgggtttactaacttaattaacctatcgtgatgttaagggagagtctcatgagtgccaaactgttgtgaattggtagccatgtttgagattagatttttggcttctgttggggtcttgtctactaatgctcctccacatgctgcatccatcaatcatactcctctcaaagtgactctccagtaacttgctgaattccacatattgcttttcatatgcttccatcttcagagactgggaagcatcgatccaagaaaatagtgttcatgtcattccatgtctcaatagtgcctggtggaagatagtacaaccactccttagtagcatctttaaaagagaaaggaaaggcccataacttgatttgtttttcagtaactgaagtaggtttcatactagagtattcagtatgaaactcctttaggtgcttgttggggccttcgccgggtaatccatgaaaagcttgtagtaagtttatgaagccagatttcagttcaaaattgacatcgaaaggttgataatggatgcacagtggtttttggtccagatttggcacgacgaactactttaatgtcctattttgagccatggtcttgtgagaagtaatcaagtcatcaaaatctgactcaggatcagttgatagtggctatttgacaaaaccaagaggttgaaagagttggttgttggtgatagtcttctatgatcgagaagcagatgatgactgaagaaattgtttaaccctttaaagtttctcttgagtatcatctccactagacatgtacacctgagattatcaaagtaaaagaagttagtaacaaaaattcaatatgaattataaaataaaactataatccccggtaatggccccaaaataaaaatacgaaattaatatttaagttgattttgttcaagatacttaaatattagatatttttcttaaaagatttaattaaatagacaaattatatttatgttaaaaattatttaattaattttagatcaatataacaataattttttgaaatttattttatttcattttaatgagtaattttaaaatatgttttaaatacattggatttcaaattcaatcagatatatatctatggaaaattaattttgagttgaaaattaattatttaattaatttttgaccaacttaaattaagtaantttcataatatttattgaaaattaatactaaggacttaaaataaatttttattttctgatctacttaagtatttatgtgattttataaatgttaaattaaaatttatatttagagttatcnnnnnnngtacttttaattaaataaatatattaacattaaaataaatagattaaaataagaatcaaatgaaaatacaactcctttaaaataatgagctttattataaggatatttgatctacattgtctgttctacatagttcctgttttaatgagattcatcgctaatagatcttcattcattagcaatttaacgtcgtagaatcttggaagatagtattattgaaagtcttttattcttagtaataatcacccccaatagtgactgctaaaagtagggcttacaaagtatgaaacaattgtagaagctcatgaaatagaatgaccttgactcttgcgcaaatgagacaacgtcagattctgatttcaatcgaataaaacgttgctaaaatggtgtccattttagatgagatgacaactctattcaacgaatgatatctttgactctcgcctaaatgggacatcattggattcttatttaagatgtgtctattttgtattttcacatgtttttcttacttgctaaatgcttgctaatttctgaatgtgtatgaatttatattgaaccttcattatgtttcctattattaatttttgtagtacaaattttgaatcttcattgttggtctaagttggttagttgtttttaacgggacactccaaagattgttatccgttaaacaaacataaaagtgttagatctccacagataaatatttgtaaatgcgacatttagttgactcatcaaaagatgacaacttagactagtgtttacaacataaaacaatgaaggagtttataaaataagaataactttgactctcacctaaacgggacatcatttgattcttattttaatcaaaattatcctttattgatgtgtgtcgtaagccacaacaaatttactgatatttttattcaaatacctccaattattttagtgtaattgtaagtaagggtggatcccacgagaactatgtttattcaattattcacaaattagtgacaagaattagaaaatgggggttttgatgattagaataaaataacaataataaaaattaaagaaaaaaaaaacaaatttaaagggagacaacaatatgagaaactagttaaaggtttttctcaaaccttgacaatcattcttaattcctattaataaatgtaatttcagtttccaatcaaactattaatcccgcagataaagctgaatcagtcaattatcccaatctccctattgtatgtaatcaacacgaagcgctcagtaattaactcttttacttaagcagtaaatccacgaatcatgtaatttctttaacttagaaaaagctttgagatttatggagatagattaatctaggcaataaattaatgaagcatagaactcatttaacccggattttgttcttcatcataattaaaaactgtaatttttcacaaatacttagaatcctagactattaggtgaatagtaatcataagatgatagtagattaaagtaaaacctaatttagcggccatctaaacaagattaaaataataatcatgacattaatcatagaataatagaagcaatttggtatataatggaaactagaaattaacatttaataatgaaattaagaattcatgtctcgagttttaaaatagcccttaactaaaagaaaactactctgaactagacattataacaaaaatcataatattcagtaagagttttaaggagaagaaaataactagaatgaagaacactttgaagttgcgatctctgtctcctccttggtctctctctctctctctaagtttctctctctattttgtagctctagaatgatcaaatttgtagcctaagaggtcctatttatagtactaagaaatatctcactaaaagagatgataattcatcttttaacaaaaaaaaaagataaaaaaatcacagttcaaattttgcctccttgccgcggggacggggcctaatgcctcaaaatttaatttttttatttgctcgctttcaccctcgctacaacgataacccatgggtttatgctcctcatggacttctgaaaactcttaaaaaatatttttttggcacatcaattcatctaccaacatcacctagaataaaaaacatcaaataattcatcatcttttactcataaaaataaatcttcttccaaaacttgagttattcctaaaatgagaaaaaatactaaaattactaagtaataacatcctctaactatgaagaaatcaacaattttactgcctaaaatgctcttgtcatttattttttctcttagctttttcattaagaaaattcttagatagtatattattgtacaaaaggtttataaatcatcttcttatgatgtcactctatttcttctgtaaaaatgagtggcgcagatgactatattctagatattctatcctaaaatgatataaattcttgatcgtaaagaatctcctacttgtataagcttactaaaggcaacttaaatttagagttaaaatagtagtggttgtctaagaagaaattattactcgagaaatatttggtataaatttaagtctttgactttaaattttatattccacatagaaattttaactttcaaattccaaaatacattggacaatatagtataactttcgcaagttgttaatatccattttctacaatggattcaaactatattataatgtatggattatgagtcttgtattctgtgaccagaacccacttgaactattctaagaactcattgttgtaacatgacctaagtcatcaagagaccacaaccacaataatatatttatggcatttgcatcttaattcatagaggttttgacaagatcattctctacaaagagaaaataagtcaatatccactagaaagtaggatcatctgtattcaaacatatggatgtacattcaggggtggatataagttatcattaaattcttaaggcgatcactctagattttaccctatgaaaagaaatttaaaatgtttgagaaatttcatgagaatctatcattggtgaaaaactattaaggtaagtggttaaagatcttgtgaactaataagcgtggagaaatatttggttatgctattcaaagatcattaagttgaacttcgaattgtatccaaacttacctcccccaaaaatttggattgcatattgatgaaaatgaaagtgaaaggtctatgattagtactagtagcttcctatgtccttcaagggaaataccctagtgataggaaaactttagaatgatggaatggttatatacttagtgtaaagcattactagattaaaggatgttccgatcatgaacttaagaaaagctagaattgttaactaaggtttgcatgtttaatagctattctaaagtgattaggggtggaccatcctatggtcattacgaggagaaagtgtttgttcaacaaataccactttactaggaatatgattaaatctatataaaaagtagcaaagtagaggagatattttcaattccaatgtgttctatcatcttattctacataagatggtctcattgcctttgttgtcttgacacaattgatgaggagaataccactaatgttcttagatagaatgtcacggtctctcattgtagtgggaggatttcaagggacccaccctgttatgacttggaagatacttgtaataaaaatctattattagtttaaacatgtagtggatagtacaaataaggaactaagaagcaaagccaannnnnnnnnggttaaaaccattcatatggagtaaccaaaagttctctattacaatgaaaataagggaaatttcaataataagtctattcactagacttaacaaaacttctcaatcatagtatcaaaggtttgagataatgcaaatctatggcttgtggtaaacctggtaatttatttactcaagtgcaagaaacttactttagtaagatactagatcatattctaatggctatatctaaaggaagtcttttggctccgagacacaaatttaatttatctaaggaacagtttcaattattaaaggaattccttaaggatcaacagtgagatgaattagaccagaaacatgttttagtgtgggagttatgagtaggtatcagtttaatacaggaaaggaacattgaaagacaatcaagtaaaatcttaagatcaaaagaggaactatatgttagtcgatgttgacctcaaaaaattatcagctgacagctgggtcgtataaatctaacgcttgccacgtgttacacaaatagaattaaaaagtaataaacacatagatgtgttatagaggttcgacccccttatgatagggagaaatgacctactcccctttttgtgtaatttacaccgagggaaacactatctagatcactataggtgggatctactatagcacctttaagattacaaagtatgaattagtaagaaaatctcaggtgttggacaacctagggtgctggccagcctagtgtaggagtgtgagagagatgaagagaagagaggaagatccttgatgggcgtctacaagagagaatatggctttcaaacctaaaactatttagaggctaggtgacttagagtcaacttaaagagcttaggtttctaggctaaggttaaggcctttatgtaggaagcctttaaccctaagcttgcaacttaaatcccttgaaaatattatagttagctagatatttacgtaagatcaaaatgccctagattctagatacttttcagcctatctattgggcttttggggccccattcacagccaatgtctttgtccacgtgtagagttgtacatggagtcttcgtaagtcaatcttggttgtccataggccttgaaggaagtctagctgaccatggccttgccaggtcaatcctggctgaccatggtcctgccaggacttggcacgacaaggcctacaagggctggaaggtcactatagcttcaccaagaagaggctaacctttgaccgtggaggccaacattttgtaagttgaagacaattttgtacgtcctttccttggagaggttaggctcccttggtcgaacagagtctcattgggtctggaagtcacttcttggcctgctaacttatgtatagatcctggccggcctatagactcaccctggctggccaaggatgttggtacaactccttgtgtggtttcttcactcccttcggtcactgcttgactgttttgatatagcttgcacagaggctctattctactattggcggggttgtactccacaagtactttatctttggcttacgtggacatgccacgtcaggaggacaaaatttgggataacatttttgccccaagtccctattcaaattttgggtcagatatgaactttctagctattttcttgtctatagtagtctctgttcaataaccttatctagccaagtgttggctttttgcctggcatgctttcgtaactttgatcttttctccctatatgcatctcatcttctcctcttaggtatctcttctttatacctgctattaacaagtttcttgctttttaagcttttggcaactttttgattcacatgttagtttgtaatcttttttgtatatagatcctcatgacagttttggaatatgtaatctgtgacttttttattgaaaatattcaattttgggcttcactatgattcttgactcttagagtcataaggaccgtagcctagaagatcttgcttgagaccttgctgaccttaagggttaatcatgggagttggccatctttagggttttaccctttaaagcttgcatgttgatgcctgggtttggtgaccctggccagttcttgactgagtcatgggaccgtagccggccgttccaaggcttgagaaccttttccagtatgggccttggttccaagaggtagccaattttctatcctcttgtgactttggcaagagtttagctctgtaagcatatacaaccttaacctcgtactattggaaattattttacca

SEQ ID NO: 37326 - DNA, 3566 bp, Cannabis sativa
  modified_base (1761)..(1762): a, c, t, g, unknown or other
aagaaacacaagatgcaattttaaaaagcttacttacgaggagaggaatctatcggttgaacctcactctttcagcaatcaagaaaaaagacttatttaatctaatgattcgcgaggaggttcacatatttcagtatatgctaatcgctcaacgtcgtattactcgaagagtaatgaatctagctacttagtgaaaacatgataaacaattaggttttaaaataacatttattattttcaataacgattgtaaatcgttcccaccaccgatttctaaatatatgaaacgtgagaaatgtccacgttatataagtgtatttttatataagaatgagatatctgctatcttaatcctataaaataaagggacgaccatttcttttatgattgagaaaaaatcaccaagttgtatcatataataaaagtaacttgtggagtactatatatatatatagattttaactataaaattacataaaaaaattttgtcttgatttatatatatagttgattgtttttatttattacagcattcataaattttcaagagtctcgatcatttatattaacaaaattttaagttaacactaactaacacaagagaagtgaaactaacagggttaaaaaaaagcatgagcaacaattagataataaagagtctcaaatctaaccttccatcctccacacttcgtcagcccatatgcctttccacgtttcatataagggaataattcatatgaatttaaaaaaaaaaaaattgctaactccattaatttttttacatgatgatgcataatgtgtagttagagactaattcatacaaatttttatgaatttatgataaaaaaaaaaataaagatttaaataatttattgtgtttatgtttattttgatatttataaaatattggtatatatttctttatatcagcatgtgggtcacctccggtcccaaccctagctattaatattgtagtaattttattaaataaatagacacgataaattaaaacagttgtttttgtttagcaaatatatatacttaattaagtcatggtccttataagctaattttttattctttgtaagtacttaattatattttgtgatgagaaagcgcttgattggatcctccggctgagagtttaatttaatctcaactatgtaattaattgaagatgttgtgttgaaaaagaaaaaggtcaaaagtgaattgtgcatatacataaataatattcatatatatagaaagtactgaggttttgaaaaaagtaggagagatataattgtcgtttaatcctcttatggaaagccattcatttcaaagacctttctttttttctccacttcactaattttaaatttaatatgtactactaatttaattaaataatgtcacttcactcgtatattctttacagaaaaatgcggaataatattttaaggtaccaagcattataaggagtggcatacaattatgtgcattttaatatttagtattttaatttaataaatgatatgataaacttttagtcaattataaaatgtcatatcaataagataataagtagtttaaggtacttaataggggtattaattaaactgctcaaactacccgtagctcaccgtaccgtaaaaaaatgcggtttgaaattttttaattgaatttttcctaaattgcggtacggtacggtttgcgattttgaattattaataggcgttcaaaccgcaccgcactgcacattataaaaatactaatttnnatatttatttaggtctaatatgtgaatgtccaacccaaagcccactaattattatattattgaaacttaaatgttttttttttcatatttattttcaagtcttatagtatttttgacaagtgttactcaaactttgtttgtatttgtaatagtttaattattagtgataatccaaaccgcagaaccataccacaccgcatcatttttggtggtgcggtttctgtggttttttaatttcgcagtgcggatgcaatttggaaaattagaaaaaccacatatatacgaattaatttaaaaaaaaatagtcaaaaactaaaccaccaacagtacatactgatttgtatacataaaaatgcataaaatactattatatataaatgctaaaggtatcaagtaccataaagaatagtggtgcaattgaatatgagatatgttgtacaccttaaaattatgacaagcaatgccaaaaaaatatatatataaattgcattcccgaaaaacaaaaagaaagaaagctaagctacaattagtatgaatggttttgtaatgaactagtgaacttatttatacaaatattatgctttatttttatttttaaaaaagaatgtatatcttttaatagttgtatgatattatagttatttctaacgaagtttcatacaaaaataataataataataaaataaaataaaataaaactaggattttattttcattttgcttactaaacatcatatgctaattactttagtatatgatgtttctaatattaatattaatattatggttttgcttaattgtgaagcatatacgcatgtatacttataaaaaaattgtgtttcaattatataataattattaatttagagaagagaacaattaataatgagaaattactttaattattcattaaaaatacacggatggtacttgtaattaatggtaatacttataaaacaattttatgggcacctaataataataataataataaagtaataaaaataaataacaatgaatatatatatataagacacctgcagtagtgtgtgaatctgtgatggtattatctatggttcatcatgtataaattaatatccattcacgagtcacgacacacacgtaggcttcttatattaattgcgaccaagaagagagtggccaatgccagggctgtgtccgggagatgtaggacgaaaatcatctgtgttaccagaaacgacatgtcgttgttggtcactttgtttattgttattgtcgtttgcgttaatagtagtagtcttattattagttccgggtcctgggctcttgcctgggttggctggtcgaaaggcatccactgatgaggagaagtgattaccgttatcattcttgtcgtttgagtttgtggggatcattacttgcccaactttctctgtcgtttttgttcctcctttcatgatgatgggtcttccggcctgtacggacacaattccaatatgacagccaaaaataataagggcaacaatcttacataatatcacactttccatcgctcttgaataatattattgttagtaaatgaataaatttaaacttataaatcaataataaataataataataagatgatgagactcagaagaagaatttgatgatgttgatactggttggtattcagctccatcggtatttataatctaaccacaacatgtattaaactaaaaattattatcatgacaggacttatttcatgctttttcaatttggacggttaataaacctctgtagggcccgatttaatattgctctctctctctctctc

SEQ ID NO: 37327 - DNA, 2167 bp, Cannabis sativa
tatctatcatccttgcattaatattttctcctcattctctcttaatgaatttatttcattagtttaacaattcgcttcttttggtaattaatttattggtattagtttttcttatattactcaatgaatctgtgttaattaagtactttaattcatagctaagctattaattattataaataccatttatttaaatactataattttcctttctttagtattgagaggtaattttatcttcttttctataaataataattacatgatataacaaattgtatatatatatatatatatataaatagataaataagcgagcaggtttgactatgcaagttgttttttttattaattaggtctaactaattagatttacatatattggaggtaagttaatttaacaccacacatgggaataagtaattataaaattatttatcaatcaaatcatatatgatttgccttaactttaaccgttatgagaacttttagccaacatatatataagttataaaggcagataattaatctcaaaataaataatcacaaagagttgagacaaatctgatcaaacaccacacatcatataataattaacccaatattattattatgagcaccccaagtttttgttgtaagaactacaattaataacactaatatcataataagaacaagaagaataaaatgtggaaaacaaccctctgataattttatgttacaagattatctttctcaaagagtaagataaaccttagagcaaaacatcattaatattaatatatagtcaataatagtcttatattattcttaatatgcagtatcatcatgatcatcatcttctggtttcaataacacacacaaacatatatagttatatctttcgttgcactaagccatatgcgactacaagagccataaccagagcattatccacacttgcctctatgattaaactcaaaacatcatctcccaaaactacccctgaagatgacaactttctctttgcctgataaaaaaaaaaaaacccagatataaaaaagaaaaagaatctcatttttagaccaaaaacaattcataccctttacataaattatatactttaacagatttggatgtagtaccgcctcagagatcagtcttgagagcgagactaaatccaaaatcattgtatatatatttatataaatggaaaaatgaaataataataaagttttattaaataaaggctgacctctgcgactaatccacctttgccatttgttattctgagagcggatgtgccagaagagccttctaacctatagtgactggcagcctcaatattgttatcataagcaacgtcacaggaaaactcttgcccaagattaagtacccagctacaatttttggttacttgaaataatggtttgtctataatcaaatccaaaccattaatgttgcttttgtacccttcccacttcctaaacatccatattttctacacacacaaaaacaaaacaaaatattattattattattattatgaataaatctagctataattaataataagaaaacatgaaatatatatatatagagagagagaaaggagagtacttacttttcttaggattgtaaagagaacttttcccttgagatccatgagataaactttatcgctatccttatcatcatagttatcaatacgataaaccacttcaccattatcattatacacagtgcaaccattcccttgcataacaagagatttcatccacatagtcagagtttctctctttgatgaaatatcaattatctctagctcttcattatcattattatgattaggatacactttggccattgatgagcaaagggagaaagaaagaacagagagaaagaaagagagagagagagaaaattatttgtgatatttttttagaatggtttcttgtgatatatctgagatattcttataaacactacctccaaatttatgaaggagagagagtagggccagagagacagtggagcccactgactgtttttaactttataatattataataatgccatgcatgtgtggtgcccacaaattttgttaaagtgaaaactattgttattttttttttctctttaataatataatttatgaaatgttagaaggtattagcaatgtctatta

SEQ ID NO: 37328 - DNA, 6493 bp, Cannabis sativa
  modified_base (2588)..(2588): a, c, t, g, unknown or other
ttcccgatttttttttcagggtagacgactgccccacctcgcctttatgtgggtccgcgctcctgtctccaagtggataatatttttgttaattaaaatatatacatcattctaaaatattatttattattattattttttctcatccttgacacatttatttaaaaaaattaggttaatggtgggcaactccaaaagttatccaatatagtcttatataccactttttaattaaattttataataatatttattctttcaaaaaattgattggtgataaagtaatttttttaaaaaaagttaattaaatattattacatgaattttactcatttttggatattatgttgataaattaatttgaaatattgaccaaagtacacatgtggcaaaaatcacttaatgggcaatttttattgaagatgcttttatatatgctattattttttcacatattagcaacataaaactattaattctaatagactttaactaaacataaacaatatatatatatatttatagagaaatattaaaagatagttgtcatataattattgatacaattaaatatcaaatttattataataacttttttttaatattactaaccaatcaatcgcaaaattttacctttagtggtgttgcattgatatttatattattatatataattaaccacttgaaagtcttcatattatcaaaagattaatttcttatagttattgggcatcgttcgcgttgtgtgttatttgtacggacaactaaactacattaatttgtatgtaccatatatgcttttaattattattattaaaattttaaaagaatatatgccaagttgtactacagaaattaagtggctagctaaagtgatttatttttttgctgtgaagctaaagtgatttattggagaaatcatttcgaatttcgagtacaactgtacaagttgcacatatatatatatatatatatatgttattaatgatatttcttattcaagaaatgtatatcatgttaaagaaaaggatagagatatgctatcacctcataaacaaaaatttactttacacatcggagggagagaaaattaaagatctttaggtcctacaatcaactacaaaacatattacaaccttatatatttggtttttcttttagcaaaagcatataaagtatgtgaaacgaaaagctagatataaataaaaagcaaaacaaagcataagtaccccattaatattaataaagctccctcttaatttttaaatacaagttacaacacaaaccttatttcgcccctattcttacacacacacacactatatatatatataattaattaataaatttggctaattaatgtataaatagtacaaaattcatccccatataaatagtacagtacttatgataatcatcattatagtatatgaatagatattctacgtatatggtacccttcattccacgtggccattattatctatcatgatgatctctttttagctagctaagatcagatcacataatggagcatccagtcccgtcatcatcatcatcatcatcaccgtcgctatacgtttgatcggacggtaaagaatacatctctgaatgatgagagaacaaataatcaccatgcattaatgagggagcaaaataagaagcgttatgggttgggtaacttgtattgtaacttaatccgtacataaccggagtttgttggttattgtaactaaaagttggcgggtaaggaaacacgtgctgaattggttgcccatgatgatttgctgacgtcatcacgttcatcggacctatatcccccggaggataaaactcgccgggattatcgccgccggcattattacacgaattattcccgttttgcccacttttcttcttcttcttctttttcttctttttggcaccgtcgttacttccgccaccgccttcgccgttatctccatcggcttcgtcgttatcgccgtcatcttcattattggcttcttttccatctacgttgtcgttagcactaccgccgtcatttttaacggcctgatcatctccgtcgtcgttggcaggttcttgatcggtagtagtagtattatctgcagctttttgcttctttgattttccggactttttcttctcggaaggcttattttcaggccaaagctcggcgagttttcctgatctcaatagcttttttagaagggtttcggcatcgacgtttccggtgactgtaactttgtgctgttgagaatcaatggtcgttgtataaacccctgaaaatcataaaagaaagaaatgacaaacaaaataattcaatatagtttcatacatatataacacataaaaagatatgtatatgattttaccttcgatgctttggagaactttcttgacttttctcttacagccttcacagtgaattgagactttcaagacccatgtctacaaattcaaacaaattttttaacaaattaggaacacaatataagattaatattatataacaaagatatagtatgatgatgatcacctggtattttaaagcttcttcttgtggcttattattattattattattnttattattattattattattcgccatgaagtagagagtgaagagagaatttgaaagagtgaagaatgtggaataataatataaggaaggaataatgaggggctaatgggttttgtcctgtggaaaggggaaagcaaatgatgaaattgtcacatatctatatttatagaatgagatctatagtattgagtggtagtagagtaatagtagtaagtatgggaataaaagtaggagagaaaaaacatgaaagcatctatagtttgggtgagtacatgccatgtcacttgacacgatcaatttgcaggttcgtgtgacccgtgaccaagtcaggtgatcacccttcagggtacctaattaactaaagttcaacctaccaattatataaatctttggacactttcttgttgggtttttcggattaaactaatttgacacttgcaagattatcactgcacaaatattttccttttaattgtgactaattataaattattattcttatgttgtaactaaaaagtccgtagctaaatgtattaatcacaaaaattataatttgttgtgactaaattaatgtatttttagtcacaataaagtcacaacacttgttgttattgtgactaaaaataaattagttagaacttgtatttaaataccatattttagtcacaaataaccttttgttgtgactaaaaatcatatttagccacaaaaaaaatatattttcactaaaaaattatcactaaatatagttgttttttgtaatgtatatctcaacgaattgctaaatattggtacttactgtgtccaacacaacaaattaatgtcacattgctatgggcggattcatataaaaatgagagagacaaatctctcttttaaaaaaaacaaaaaaaatacatatgcattttagttagttagaacatacatatttataataaaaaaatattgatatttatagacatcatattagttttagtatataatagttaagttaaattgtatatataataaaggtcaagcttcaaaactcactaagagcacttttattttactttttaagtttatttttagctatgccttacaagaaaattacactcacattataaagtttatactcaaaggaaaactataagaggtaaaagatatagcatttaaatttaccttaattaagtttctttgtaaattttagatttgttttgtggtcttgtaaacttgggttgttaaacgggtgtgttttagcatttttaattggttgtggtataattcttccaaatgaacaagtctcaagtcgagtcttcaaaaaagttattcattgtttaaaaaaaaaatttggaatgctagcttgttcattctgaagtagccttgtgaaaagctagtcatcattcgaccagaaaagagtttcagaaggctaatttgtccatctggaaagaagtctcgatgtggtttaagaaagttagtcgtcctcgaaaggagtactataaggctagttgctcattccaggaaggtgttttggatagtttggctttgtgcctatttgggacgtcctttcagaatgcgcttcgtcaatttggaagcgtgatacatgtccggagagagctcgataccaagtgctgacttagagatctcattgtaaggagcaagtcaattcggttaagtcttaaccaaattaattacttagttgtttgaagccctcaatctataaatagccatctcttcatttgggaacataatacgaaaaacaacagaaaattacagaagttcttttgagagaaagttttgattgagaggtagagaaagaggtacaaagaaaagagaggattgagttgggtttttcgtaaaggagacacttctgtagataaagaagcttcttaattaggaaagagtgttagagagaaaacaccttaagagaattcaaataaagaatagcgctcaactgtacctatattcttgctcaatcaataaaagaagtttcggtgtgttttagaactggagtagatttatagattacatcgatttatttatttatttatttttgaataaattacatcgatttattagacttgaaccagtataacttttagtattgattttacggttttattgattatttattttctgattttatcttttatgttataccctatttttccttaattcttgaatggtattttgttaatattgtctgctaattattttttaattcaatttaagttaattttgatgttgaaatttcccatgggtatgttttacatattttttaaatctattaaataacataagaaaccgttacatctcagtaagttgttggcatttgataataagggggctaatagcttgtgtcattaattacatgtttttaattttattggaggagggattgagataatgacccaattaatagataaatttattgtaggtaatagatatagatccatcgattcattatgttgatctcatgaacacaataagtaaaacaattagaccccaaataaactatgagccttattcgatcatccaataaagggtcgacccttctacttatgtgacaaggatcccaataataaaaagactttggggtcccctccttacttgtagaatctttataataaccatcgattatttgatcatatatcgacatatgtaaatgttagtatactttgatatttttcccgtgagggccccaattaaccaattaatccaatcgaaaatgatgataccatccattttttcgatatataaaagatggtctagaagattcttagtaatccaaattcaattagtgtaattataatataattagggaattaattgttgttatgggcacgtccaccacaccatacacttttgactacgtactatatgctaaattatgtgtaataatggttgggaataatgaaaattaaatatgaatgaaaaaacaaaatagaaatggtttaattcaatttaatatgagtaaaaaaaaaattctacttttggatggaatcattatttctctaaaatggaaaaattataattttattagaatgatattcattatttcaatactttacaaagcaattaaaccaaaaaaaaaaaattatattctaatattattaccttagtctttgtattattggtaataatataaacaaattaagcaattaatgaaagaaatgaatgtgtactactacaatcgtttgtttctaaacaattgggtaaaagccaaaagtaaagaaagtaaaaaatcccacttaacccagtgaaaaagatggtggtacaatggctttttttagtagctagagagatttgatgcctgagcctgacattttcgcattatgaataattatatgatgttttgtaccttattattcactgcacatatattatacgaaagcaaaaatctaaacacacaaaacacagagagaatcgaacagatgtgcttttcggacaacaaagaaagacatcaacatgatatacatatatatgtcatgtcaaaattataagatcaatagaacaagtcttcaatggaaacaactgtatgcgggcaccttaacatgtcccacaagaggtggtattttattattagtgtattttaatattgagttctacataattaattgaataagtaatatggagaatcgttaactaattacaatccaatacatcagtgtagttgattcatgtcataatgatgatcaatggtacattggcctaaatctcgagtaaccatatgaactatcttcatgttattagtttctttgattcactcgttaaagttttttacagaagataattcttataacttctgttttagaaatctaacaatattgtagatgactgggaacatgatctacaattatggaatcctaacttttcgatgttggattaaaatcctcaatatgggctcatatgtatataagtgtattg

SEQ ID NO: 37329 - DNA, 5412 bp, Cannabis sativa
aaaaaaaaaaaaaaaaacccaaagaaactgaactcagctgtaatatatgttacctcaatgccaaacgtgaataatcacaaccattttcaacaaaatctactgggtgagtttgggaagtcccagatgaatttgaatcgtcaaagtttgagctgatagcatccaccttgatgtcatgtgagcactcatgagcaggcatatatccattcgttttagctagagactgtgatatgaaagcttctaaaggacaaaggagagcagcagcaataacatttgccaaatctttggttttgacaatccgcaagatgcaacatagtaaatacagggaagtgactataccacttctcatatcctggattgacaagcttgcaaatgttacataatattaagttgcctatgcataaccaaataaacatccttaagaaaagatgcaaaaaaaaaaaataaggagagcttggaattcatacattcacagcttttatcgttagtgaaggaactagaattggaaaaatcaaaagctgcaaaagattgtctgtcattaacctcccaacatcaggaattccagcagacataacatcactaaaatagtagagagaatcttcaatttcatctacagcggcaaaaattgatgaggttatctcttcagtgggacttctgtctcgaaagaaaaaaaaatatataaattaacattttagaggaatataatcatattgctcccacattaaaaatcagaaactccaaatcttacttcagagcataagagaccaattgggtcaaatcaatgcactgcttctgtaaaaatgtaaccagatttaaaaaataatctgcatgaggagcacttgtgacgtatctatttacacaatcatctccaactgaaaatgtcaaaatcatatatcaccaatcaatatacatttaacaaaagatagtttcactttgagaagaatgataagaagataatagacagacagagaaaggaaaaagaagatagacacagagagaagaaagaaccgaaactcaccaatatatatattaagtgtcaaattacgtaccgcagtccgaatcatgctctcctcatggaaggcaaatcgtattgcctcaacatataaaggaaaagaaacaacttcatcctatataaatagaggataacaaagagacacaaagagatcaaaattatacaaagcacctcctggctaaaagcaaacacactagcaaaacaccagatggcacaagccctattatgatactcctaaagctaacaaataaatctattgttggccttaaattgtccaagtactcaaaaatttattgtttgtttaattttcatctcaaacatgtactttcctgttcttattcaaatatagtacctacttgattttcatattatattgattttcaatattaaaggaaggttcacttcaaatgataaccaacaataaaggcaagagaatgtcactcaatcatcaaagaacaacaggcaagcacctagagaattgcctccataacatgaaacaaagactcaatgatttcatacaattgaatgggcaatcactcaaaggtaacaattgactctagaaacctgataggccacaaatacccttttacatatgctaggagaaagcatgaaatgctgttgaccgtcacatcaacacaatatgactcgccacaatatgcggttaaggtgggaacaatgattggctgactttaaaaaatattttggcaaccttccagcatgggattatgaacagtagggaaaatagaaattttttatttgcgtaggagagacatgctctcaaattcttggattattaatacaactctctgtttcatcctatttttctctatgtttgcaaaagcttatcataacattatgagcctctttgagaaactggcagcaagaagcagaccataatttgtctcctgactttctcaaaaactatgatgcaggtgagaaacactcgctgctagttctcatgtctcaacgtacaattcttaacatcaaaaattcaaaaaaccttgtaacccttagttgctagaatgcctccaaaccaaacctaccaaggtatggagatgatgaatgcacaatgagaaagaaattttttcctacggagcttgctacaatggtaaatagcatgcatacatgttgaccatccacaaaagaccagactattagatcaagatcaatagcgtgagaaagcaagtcagttatgtgtcctacaaacacgggcagtggacaagtctgaagccatggctgtgccattttaataagattgaaaatttaaatgtcaaggggaaaaaaaataaaagctttaggactaatctgccagactattacactcaaaacgcagtggggtaaccattcactacacaaccatgcacctgtgacagttccaatttacatcctcctttttctaaaacagcttctcgtatgccagcaaatccttccaaagcaattccataaccaaatccttaaaagtatctttgcaatattttttttatataacagagatttgaaccccggccccaccccaacacactcaaccacttgagcatttcagagtatctttgtaatgttcatgtttaagtagcagtatctttataattgtgtatgaagaaaagaagcagacatctcagaaaacttacattttcagtctttacaagcagcgaaattgtattcttgtctagctttcgacttattgctcttcacagaccacagacatgaaatttacaccagatcagtaaaatacattcagaagtatattcgcagaaggtagcaatagagcaaatcaaagtagttagtaccaaaccttaggaatgatatgtagtaagataataggtcgtggtttcgaaagtcaaatgaatacgttattaagtagttcatatactcattgctgaacaaataatctgcagaagcattaagatggagaagatcttcaagtttgcattatgctaattaaataaagaaatcagatacataacagtttaagaacttacataaagcatgttcgttttctaggttctgaatcaaaatgctaacagtctgcaacaactggagcgaaacagccaaggttctagtaatcttcaatatacgtacaaactcccccataacttgtttctccatgaaaagcctggatacatcaaggacaacatgaaaatgctcatagtgaaacatgttcaacaagaaacaagcaattcaaagtctcgttatctcactcgaaaaatgttgcatcatcatgctggtcaccatatgttatcaactcggcaattgatctaatcgcttcaatgacaaaatccttcatagaagcacacaagacaagaacaattgatgcattaagagaaacaagaagaaaaagtggattatctaaagggaaagaatattttgttttaccttgttaacctcattaacaatttgaaccttcaccagctgatcagttaatgacctatatccggaactgccattagaactacatcataaatataaaagatatatataattacccataatacatatccaccaaaatttgtccgtttcaatgcactacaagagcaaattgaacaaaaatgggactggaacttccaaaacttggaaaaactacgataggaactaaaccaaaaaaaaagagggggagggggcgaacacttcttgaggaactttttgttgttcaaatgcttaatattgcacgtctctaaagatgacattatacaaccttccaaataaaaataatttgcaaaaaaaaaaaaaaatgctctcattctgaaaataaagttaagtatttgtataccttgcacatttgaaaaatacaaagtccacattgattacgagtcctactctgggacaagtttgaaaggtagaaaccatttatgcctttaccttcctactattgatcttctaatgtaaaagaaatgtgtccaagatcatttgtttctcatcacaatgaatctttaatttctggcaaagtctaatacgaaaataaacaaaattggcaatacaacagtcagactaggtccctaattgcccacaattataaagcaacgatgttgggaaatattatgacatggttattgtgtgggcaacctctcttggaaggaacaaaataaataaaatgacaagttaccctgtctaatttcttgttgtttgtgttgcttcagagaacagcttatcctccgaaccatttttccctataatatatctcaccaaaggatataggagataacatgcactaaactccgaaccacctctccacttatatcacatctacgctctagattaaaccagtttaaagactagcccacaaattctcataataatatgcaggaaaacctatttaatttttatgaaatcctcacttgcaatcctcaactagtttagtctagggcatgtgcaagctaccacacgcttcaaaccagaattctccagtctcatggaaaagtattaaccttagaacagtatcttaggagtattggacctagctaaaaatataaaaataactgttttgaacggttgtaaaaagaattttccaaacatattgatgtacatagatcacatgtgaagttcatacaattttatgtgatatggaaaccataatcaaactggcattgctcactaaaacagaatttcggaaacccttcaaatagaatccaaatgcaaatcaagtaagtcgggatcaagctaattagaagtatacccttaatccaaaaataaaatgaataattgaaaattctttttctttcaactccaaaaaatgtttgaagatcaaattcaaagacattagtagagctgagtaatgaaattgacttgataaaaatgttcggacgaatttgaaatgtgcaaactaataacatattcaccttaagttgtctaaggagaagcgattcctggatctcccagaaaaaaaccacatggcttcttcgaaactcactgcaaattcattccgattccaattataggagtacgaattccgagggcaatctttcaatcgcacgaacaggcgattaggggctttgtgttggagagagcgaagcttgtgttttgatcgggaactgttgttctttttctttttcttttctgttttttcttttttaatttgtttattttttttatttattatttttttatattttttgctagaaaatatttctatttaaaattccaaatcaaaaatataaataagttgaagggaatggctgagtttatatgtgggaaatttgaaattctatatgcataataaaccctaatattattttcctaaacttaataccccttacatttgaaccaaaccaatctcaagcttgtctctccctctctcgcccaaacgcacggctcacatccacggctcacctccaccatctccgacgaccaccgaggaccacccaccacctccgacgaaggacccagcccccctctctcttcctctctct

SEQ ID NO: 37330 - DNA, 1463 bp, Cannabis sativa
  modified_base (33)..(75): a, c, t, g, unknown or other
atgtgtttacttataatcgttttagaagttcannnnnnnnnnnnnnnnnnnnnnnnnnnnnnnnnnnnnnnnnnncctggtaaaataatttcaacagaagatacatgggaaatccacctgcttccttatgatctcatctctagaatctcatgctcagaatattgatccgagacgtgatccaagccaagtcttgagggctcatcaagcttgttcaatgggggaacctcctcgagatcaaactcaatgtcgagactctcagccccatgatcaatcttgaggccaacatcagtgtgaggctgagtaacctcctctaaatgcccaacttgattctttgtagacactctggctacatggggatccatagagacattttgtgacaagtctgcttcgcgctggccataaccgtaaaatggacaaggaacctgtgcagccgccacctcccctaatcaatacccagtgttacctgcataaaaggggaagggtaagtgagccacctaacaaagttacaagcacgttctagtcaatactacccaatggtaccttctaggtaaatcctcatgtacaaggattattatcgaccaagtaccgtcttaaatacacctactaagacatacaagtgagttttaagttattctattaactacaatggactcactaccgggccttatacagagttcccaagaagaaccacgcataaggcgacacttgtatatgcctccaaggccgtcataagaccctagccgaggtcagtagagggaaacaaactagctgcccccttggagccttggccttggccgaccagggttccaggccatagtggccgggcagaccccatgacctaacctagtggccagctagggaccctagttctaggtataggtcggccagcctatagggtacacccccttggctggccagacgctctggtagcccaccttggtcggccaggtcttgcacaagacttccttggtcggccaagacctacacggattgtaacttgtgttttttcaagaactcaaacataatcttcgtgttctttgtgactcaaagagcaaagaatcacaacgaaggttagattcagatctttttcgtctagaaattacacattatgtatcctaaggctatcatgcagatcaacataccgaaaggacaacaatctaacataggaatcgaagaatgttcaaagcaagaaatagtgttcatgcatgcatggtaaaattaaccaaatcgagtgaaatagcgggaatagaaagcttacccactactagaaaccactgaaggagaatgtgggaagctcaaatcatcgaaactgcgcaaaaattgcaagaagatgatgcttggtgggttcggccctttagagagaagcatgagcttcttctaatttagtgagagaaagaaaaatgtgaaaagtaagaagtgaatcctcatggtaccttctaggtaccttctaggtaaatcctcat

SEQ ID NO: 37331 - DNA, 3636 bp, Cannabis sativa
aataaaaataaaaagtcacccataaatttctcataaaccaagaattttagttatatagacacactttatatagaatagatatatccccacacattagtctagctaattcaacaaaaatgttaaaagaaagtacgactaattctacttgtatttctttcttctcatttgtatgccacgtcactttgcttagatcacgtgtcaaaatctgattggtttggtttcgtgtctctccctacacgtttcacccactcatatctttttttgggtatatatactgaaaaaaagtcgtattgtcaaacccaggtagccctttctctctctagcttctctctcttcttcttccccaatttggagcccagatccaagatcgtcaattcaacattgtaagtctctctcttcgatccgattcctcttcaatttaatttttccattatcaaattattgtcttttgcatgcatgcatgttggatttgattttttcgcgaaaatttgatatatgatttgaaacctaatgtctgcgattgatcactggattgttcgaatttgtgttgggaattactgtaaatgttgttaattttgggtttgatttcaatgtattattgagtttaatgttcaatcttgttttcccctttgtttttttcgacgagaattatttgattaatcggtaaaataaaacctaggtttttgattttggtacaaaaagttgatagatttggttagtgatttgctagaatcgtgtttttggaagttagatcttggattgcatgggattgatttttgtattatcaaaattttggcaggtgggttgttttgaaacaagatgggaggtggttttcgagtgcttcatttggtgaggccttttctggcttttctgcccgaagtgcagagcgctgatagaaagattcccttcagagagaaggtgttgtacacagttgttgctctatttgttttcttggtatgcagtcagttacccctttatgggattcactccacaactgggtctgatccattctattggatgagagtaatcctggcttccaaccgtggaacggttatggagcttggaatcacacctattgtgacttcaggacttgttatgcaacttctggcaggttcaaagatcattgaagtggacaacaatgtccgcgaagatcgagctcttttgtatgttgctaaagccattatctttttgcttacatttgctaattttgttatgatgttaggttttaagtaaattgttttgatttgattttattttggcagaaatggagcacaaaagttactgggaatcctgatagctattggggaggcagttgcttatgtttgctctgggatgtatggtagcgttgaccaacttggagttgggaatgctatccttattatccttcagctcttctttgctggaatcattgtgatatgcttggatgaacttttgcagaagggatatggtttaggctctggaatttctctattcattgcaaccaatatctggtgagtttcataattataagattatctttttccttggattgattgatggtgcttattgtgttatgattttttttttttttcagtgaaaacatcatctggaaggccttcagccccaccaccatcaacagtggtcgtggagcggagtttgaaggtgctgttatcgctttgttccatcttctgataacccgaacggacaaagttcgtgcccttcgcgaagcattctaccggcaaaaccttcccaatgtgacgaatctcctcgctactgtcttgatcttcctaattgttatctacttccaaggattccgtgttgtccttcctgtgagatcaaagaatgctcgtggacaacaaggatcttacccgattaagctgttctacacctctaacatgccaatcattctccagtctgcgctcgtttccaacctgtatttcatctctcaggtgtgattttgttatataccaatggcaatctttttcggttgttagacaagtctttttcggtataccaatcttacatgtttatttcattattttattgtctatatacacagttactctacaggaggtacagtggaaatttccttgtgaaccttttgggaaaatggaaggaatcagagtattcgggtcagtttgtccctgtgggcggtatagcatattatatcaccgcaccttcaaggtaactaaacatttttctcccttctttgtagcaaatcttgtaatgtaacattggcttcaaatacacactgaaactgaatctttttaattcaattgttcagcttggcggatatggcagccaacccgttccatgctttgttttacctcgtatttatgctgtcagcatgtgcacttttctccaaaacttggattgaagtgtcgggatcctctgcgagagatgttgccaagcaactcaaggtgattattacttaaaaggcaatcgagatagagcttagaaagtgcggtttttgtttgtttttacttaccatcttcggttttattatctacaggagcaacaaatggtgatgcccggacaccgtgaatcaaacctgcagaaggagctaaaccgctacatacctactgcagcagctttcggtggaatgtgcattggtgcattgactgtcttggctgatttcatgggggcaatcggttctggaaccggtatcctgctcgctgttaccattatctaccaatacttcgaaacttttgagaaggagagagccagtgaactcgggttcttcggattctaaacacgagacagacagacggactgaatcacttggaagtaaccgaaaatggcgcgccaaagctggcttttacaattttggtggaaatgtaactagggaagttaacaccaaccaaattagtagaaagttttttaattagcggatcgtttggtgtaacactaatgactagcccttgtggcttcacaaagtgtattttgtgaaaaaagttttacttctttagaacctattttaccaagagattattttttgttacaaagttatttttaattattatttggtattatgttaattcttttttttttttttttttgttaagttggtattatgttaattcaatttgctaatctagtaacctgacaaaaaatacccacgaaattattattatgttgaacacaatttattgttgttaatcaaatgagtatctcctttagtgatatatttacatttaaaattaatttgataaggtaaaaattagagtaatgctagacaaaatgacatcttatgaaaatacatatagagggaattttagtgggaataaatttttttaagtctaaaaattattttagaattgtattttgtgaaagttacattttttgttttgttaatgaaaaatttgatttagagttgttataacaaaattaagtaaaatcttttccatctgagcttaggattaattaataattttgcaacatatgacataaaatagtattaacttataaggtgttttattgttattagtatttttttttgtaaggcattacattgtgttgatcgaggttttcggcaactaataaaatattatatgattatagagctgtaaaaaaattagagaaagattttttatgtggttggggcgttaatgagccttagtccacgagtctatcttatttatggatgtatttaataca

SEQ ID NO: 37332 - DNA, 4436 bp, Cannabis sativa
  modified_base (208)..(211): a, c, t, g, unknown or other
  modified_base (3440)..(3440): a, c, t, g, unknown or other
  modified_base (3487)..(3503): a, c, t, g, unknown or other
acttaattttttttcatatttattttcaagccttatggtattttgataagttttgctcaaagtttgttgtatttatgatagtttaattatttagtgatagtccgcaccacactattttttgcgaggcggtttttgcaggtttttagtttcacagtgcggtgcggtttggaaaattggaaagaccgtatgtgcgggttggtttgaaaannnngtcaaaaaccgcaccacctgcaccacgaacacccctactttggagtatgtacattcaaatctctaaaaatcatcacaggtgcaaaggtacatttctcactttgaaaagctcaatattttttttggtctataattgatgatttttctaggaaattctagatatatttcttgaagacaatggatgagacttttgagaagttcaaggaatggtttatgattttgagaaacaaacatctcaaagggtaaataaaattaagacagataatgtcttgaattttgtaactttgaatttgacaagttttgtatagaaataagaattgaaaggcacgagactgtgagaaaaacacctcagtagaatggccatgttgagaggatgaacagggccataatgaaaaaggtaagatgtatgttggttgattctaatttgcctaaaatgtttttggcagaagcaacaactattgcttgttatcttataaacatgtcattctcatctactattgatttcaaagtatctataaatatttggtctgactacaagcctagctatagtcatctaaaacctattggctagattggttatatttatactaattagggaaaattaaatcctagagctctaaaaggtgttttttttttgctaccctagtggtgttaaaggataaaaaaatgtggttattgatgagaaaaaatgtattattagtggagatattgtctttaataaacatgctttttataaaacttagttgaaatctagtgttcaaagttctacactggttgaatttgagaatatatcataggcacatgatcaagttgaacaagaacttgatttggatgatacacttagtaatgaggatactcaagatgaagatggagagactgatcttcattattatgtgcttgctagggacagggttaaaagagagatataccacctgctagatatactaaagtataatttacagcttttgttctcaatgttgttgatctgatagagctacatgaacatgagaactacaaagatgcaattaggagctcaaatttgaagaaatgcaataaatctttagctgacaacaagacttgggttttcgttgaaaaactaaataataagaggattataggcatcaaatgggtgttaaaatggaaaccaagtgttgagggtgttgagataccaatatataaggcaagacttgtagaaaattgatcctcttaggtagagggagttgattaccatgaggtgttctcacttgtggtagagcatacttcaattagactaatacttgcaattacttcaatctatgatctggaacttaaccaattagatgtaaaaactacttttttacatggaaacttggatgaagagatatccatacaacaactagaaggttttgttcagaggggtgcaaaagaaaaagtgtgttttctcaagaaatctctctatggcccaaagcaatctcctaggtaatgatactttagatttgatgaatttatgctcaaccagaagttcacaaggtctaaattcaaaatttgtgtctactataaggtaatggaagataagagttacatatatctactgatttatgtagatgacaagctaatatcatgcaagcacaagacttagatagacatgctaagaaagatgttagattcaaaattcaacatgaaatatttaggacaaactgctaagatcctagttatggaaataactagatatagggataatcgtgccctatatttgacacaagctgcatatgtcaaaaaagtggttgagatttttgacaagaaagatgcacggattttaaatactcatattggtgctcatttcaaactcaaggcattgacagatgagaaagtttctcttgaagaaaagaagatgtttggaacaccttattccaatattgtgggaagcataatgtatgctaagatctctaaaagacttgaccttgcatatggaacaggattggtgattaggtatatgagtaaatagggtttgaacattggcaagcagtaaagtggttactcagatacatgaaaggtaccttaaatttgaagatatgctacaaaaacatgaacaaatggaatgcactattactggatactgtgactcagatttttttggtgatctttacaaatgaagttcattaacaggctacatatgcactgttgaagggaatatagtgagttggaaatcaaatttacaacatgaagtagctttatctactagagtaaattgccctcactgaagttgtcaaggaagctctatgattaaagggaatcatgactaagttgggattttatcaaaaggatgtaagtaggcactgcgactctcaatgtgctatacacttagctaaaaatactatgttccatgagaggactaaacacattaacatcaaacttcatttcctaatggatatagttaacaaggttctcatcaaggtggttaggattgctaccaaaattaaccatacagacatgttaatgttggattttgtgccttaactaaaattttatttcaatgtaatcttaaatatttatttatcaatgaaggaacataactattttattacttgtttaatgtattgcttggttcacatatttattttctgatcatttatttgctttataaattcatttaaatccttagcacattattattcatgattaccgtgttgtctacacagtgaaaagtaatcaagattatgtgattaaatacagtcttacgatttatcaacacactggatttccactgatatgataatcaataatgtagtttacttacacttggatagtggtatgtcttttccaaggaatcggtaaagtaatcttgtattggatgcattgttatatatcagactggactgatattcacatagaaaagatatcttaaacttattgtattacctttctaagtaaatatcacttagttgatcttagatcaatgatctcaatcctgagatggttaggttctggttcaattgtactatttgtattttttgacttgttcgttaaaattgacctattagatcttaccaatacttacatcttgggaacatggtagtataattgagttggagcgctaatcatagatactgaatctatagcttctataaatgaatagaagtaaaataatcatttccttcgagcatggctaaattagattaaatggttgagtactcatttcaataattatattagtttactgaattatttacaaggagctaagtattttaagnataaaatacattgaagggtagagcagtaaatttgtccctactcgatnnnnnnnnnnnnnnnnngatcattgattatttagattgaaacaatggatgattaatagaatatatttatttggaacatatagatcattctgtataattaagagtgcaatttcgaatttatagtggagtcaggaagaattaataagatataaaatttacttggcatattctagaactacttattggaatagcttaattatataggcccgtggtccccgaactaattgagataatattggcttgcagactcagttaattggttttaattaatcaattagaattcaatattagactctgtcttatttatgaattttcactaagcaaggacttaattgtgaagaaaagaaattttagagtttatttgttaattaagagactttgtaacgtctaattaataaataagttaaatgataattttatttgataatcaattataattattaaataaatagatttgacatttataggattgaaattaaaatatggcattagtgaatgaaagataaattgttaaataaaatagaaaaattagaactagtgggatccactagtatggccagtcactaaggtttatttaaccattattttatctttttttattcaatataatttaaatcctaaccttaggtgaaattctatataaggaataagatgactcttattctcataatcttttatttaaccattattttatcttttttattccatataatttaaatccaaaccttagatgaaattctatataaggaataagatgactctcattctcataatctaagaataacctagttttctactttgttagacaactgaaaaacttagagcctctcttatatagaatttgaaattcctctctccttctcttcattaattttgaacccaatagttatagagtacatgcccactcatattaagttagtactcaatcatagtgtggaagattgtgaagaa

SEQ ID NO: 37333 - DNA, 2905 bp, Cannabis sativa
tcacaaaataaaaagcattcaatcagattggagggtggatatcaagcttttaccaacttattacaagaacatggcattacacacaaggtctcttgtccacacattcatgaacaaaatggtgttgatgaacgcaagcacagacacattgtggaatctagtctaacttagctcaagcttcattaccactgaaatactaggatgaagcctatatggttgttgtgtttcttatcaatagaatgcctaatccaagactccattacagcacccctttagaggttttattcagcaccaaactagagtacacttcccttagagtttttggttgtttatgttatcccaatctcagaccttacaatagaaacaaactctaatataggtctattcgttgtgtttttcttgggtatagattgtctcataaatgctataactgtctttctaaggatgggaagttttacatctctagagatgttctatttgataaaactatttttccttttcctgctgtagccaacaaaacaaaacaacaacctgctcaaaccttcaaattacctactgctattccacaggttgttgtgtctcaacaacctactcctcaagcacatcctctcactcactcacaagaatcccccagtcacatcccagcatcccttcccatctctgatgacacttcaactcatcacatgcaaccaacaaccattgtcaactctgacattgagcagccagctatcccaaacactacaactatctttcctactttcccactcaaacagaatctccacatatactacaaccaaatgtcacaaatgcccctcctatttctaatgtgtcttctgtaggtatcaataaacaccccatgcaaacaagagccaagtctggaataagaaaaccaaaagtcatgatggcctcacttcaaccaacaatagtaaaataagcactcaaagatccaaggtggtttcaagctatggaaactaaaaaacatgcattggttaagaacaaaacttggtatctggtcaaattacctcttggaagggtcctatttgttgtaaatgggtgtattgaatcaagaaaaatactgatggttctgttgatcgatttaaagaaagactagttgctaaggggtatcatcaacaagttggatttgactacactgaaaccttttgtccagttgtcaaacatgtgaccataagagttattctatatattgctatctctgagaacttgtcaatcaaataattggatatcaacaatgcatttctcaatgaagatttgcaagaggagatctacatggttcaaccacctggatttgttgatccagaacatccagattatgtgtgcaagctccaaaaggcactctatggactcaaacaggctcctagggcctggtttgacaaactatcatctgttctaatcactttggggttcaactatgcaaaaacagatcattctctctttttgtcaagcattgtcctcaacacacactttatgttttagtgtatgttgatgatattcttataacagggagtgattcatctcaagtttctgctttggtcagtgctttgagcaataaattttcccttaaagatcttggtgatcttcactacttctcgggtattcaagtgcttcaaacaatagatggtttgctactgtctcaacaaaaatacctacaggatctgctatgtaaagctgagatgcagggagttaaaactcaaaactcccctgtgaatgcaggtcttagactctcccaatatggatctgaacctattgaagatccatctcattacaggtctatagtgggagcacttcagtatgcaaccatcaccagaccagaaattgcatatagtgtcaacgaagtgtgtcaatttatccataatcctctacaatctcactgggtttctatcaagagaattctcaggtatttggctggcactttggactttggactccaaattttccactcatcttcaagctttttgtgatgctgattgggctgctgatccagatgatagaagatctactactggcttctgtgtattccatggtgataatctgataacttggcaatctaggaaacaaacaacaatctctcgatcctccacagaagcagagtttcaaagcttagcagcaatggtttataagcttacatggatccaatctttgctatctaaacttcattacaagtccattcctacacccacaatctggtgtgataatgttagttcggtcatgctagctgctaatcccatcttgcatgctcgaacaaaacacgtagaataactatatacctcatgtttagggttttaaaattaattaattaagtttcttatttaggatttcttataatatatatagatttgttgaggcattaaattatgatctaaagtgctagtaaataacaattatgtatgacttttagtgaaatatgctaaacttttttaacatgcttctaaaccatccagaggtactttggtcatttccaacacctcgactaaacctgacatactcaatgtctatctatattgtcccgctactactaaaatactaaaacgtgattctaatggtcgaacgccgcgttccaatattgatgggcacaaaacacgcaaaaacataaaatttcatatatggcataaataatatatcctgaattcaaataaatctccatataatcataaattataaataataatttggcttcataattaagtcctaattatctgctaattctaaattaaaactaagcggtctttacaactacaatgtttttaagatgtaaatatccactagaaccattgtttagctttcacaaacaacttgaagaacacaaataatacaactaagctgaacctaacatattaggattaagatctatagacctaagatcagtcagtgatattgacatagaaagata

SEQ ID NO: 37334 - DNA, 4982 bp, Cannabis sativa
agacttgctattggatggaatcttctcctccatctttgtactctgttgttgtaaatgacttaccagtttaatttataataacaagtattttcctaaaaaaaaaagactcgtatcacaccataccataacccttctctctctctcagaggaatttcgtttagggctggggttggtgatgtgtctgaaacttcactcacagtacaggtatgaattcgcaacgtctggtctatttatctttcgctgtatacacaaatttcttttttgttgaatagtaatggtctggtttatcgttggatcccaatgccatgatatgaatataatattgcttaagtttgtattctaaatttcaaacacagtatttcctctttttactctctctgtttgattgattgggtttttacacaatgatttttttttttagatatctgtataagctaaagatgtttattgcttctcccaaacttctaggagaaaagttaaaatagttttttaagatatataataatgtttcaggaatatgcttcggtttgtaatctaaatttcaatgacagtgtttatatttaaattatattatgtactctccgacccacccccacccagctctgttttctgtacagttgttttctcgttctcatccctttagttactattatattgtttgtttaaaaaaaggttttctttttgtgtattctttgatctgtgtttgtgtatttatgtttaataattgttgttatgtatacagtgcaggtatgaatagtaatagtaataatagcaagaaaagtatgaatagaacaagtattattaagtctcaggttaagaatagatgtagagttggagcaacacaagaactactcacgcctccttcattacgagtttgttcacaatcacaattagctgctaagactaagattaagaagaaagacaagaagaacaagaggattagtatctcaactagtactattactaagcctcctcatcatgataatgataatgatgatggtgatgatttgatgatcaccaacaatgagacttccactactgcaactactaacaagtcttctagtgaaacaacaacacatgaggaggagaagaagaaaaagaagaagaagaagaagagatcactaagtccagtgattattatgcacgctagatatcctaatcctactcctactcctacaccaaatatagaagtcaaattcattgactgcgggtatgtaatgtactactaattataattcatccatcaatcttctgtacatctatatctatatctatgttttttgatctattctactactactcatcattatatgtatgtatgtatgtttctttctttaattattaattagttgtacatgtctgattatgtatgttagaaattacacgccccctcatcttgaggatgcactggagaaacactaccgccaagagaagttttatgaggtagatatatagtaatctattctaatctaatatgcataatgtcttctttcattcattcattcactcatcaccaccaaaactatagacttatgatggtttgagttaattataaaatagaacagtacatatatttatataatgaatgattgatatgtatgtgatgatgttaaaaggttaacaccttcttctctacaagtatctataatttttcatcattttgataatattataaaaccatctaaaatcatataaagttaatattcataacaagtttcaaaaaagctttagtctataataacttgacaatttgctagaaaattctaccacaataatccaccaccccaccacctttgagtagtataaataggagaattggtcctttagtggtatgtggtgagttagtgataacttgagtgtacaagtgaagtttgtcgtaataattttaattaagtcccaacaaaaattctaagagtgtcccataaaattagtcaaaatagtgtgcaagtaaccttttttttgacatgagtgtgcaagtaatcttaagtgtagtgtctagtaaataaaaagagagtatttggtttgtattgtcaagttaaagtgtttaagttttggtgtaattatttttaaaacaataaaataattatgttcttcacgtgttgtagtgttcaacaaatgaattagtttgatgtgggatttattaattagtggatggacaactcaaaatagttttttaaatataaaatatgggaggagagtagtaaaatgtataaggtaatagatattttctattgattgaagtttgtaggctatacattcaatctgctttaagtgagctatatatatatatacagtagctctatctcggttggaaacattcaatctatttcttaaaaattctagctttacaacaatttatgagatgaagaagtaactaataattgtgtgctatttttttttttttgtttaatggtagggattttacatagagccttgtccagaagaactactaaatatgaagcgtcatcttctcaaaccagcctcggtagatgattcccaaatccaagagcttgcaaaatgggcaatccaacaatataacgctgagaacgacaaggtttcattcattctttgtttgaattataaatacaataatacatattaacatcaaatttatttatttatttatgtatgtatgtgtagatatataaacattaatattaaaaaatgaatgaatggaatggaatgcagggtgagaagctagaatttcagaggattgtgagagtgaatgaaatctttcaatgtcgtagtcataagtactatgtaacgatgggtgtgttaggagcgtggcatcgttattatgaagctaaaatttcacgtggcagtaaaatcatttctcctggtcgttgtgttcccactaaaacacttcacttctgtaggtatgctcgccactatccaatggtctattaatcacttaattattattattattatgtgcacttattagctatttttatgtatttgtgtgcttgaacatagaattaatcactatatttttattataacttttatgttatacatttgattttaggaatacatttttatattattacaacttctaattatgctatatgcattattatgatgatgatgatgattatttattaaattagttaagagtgttgtttgtaattgttggaaaccaaatctcaactcacttacttacccttcctttcatttcctttggcgagtgagagagagagtatgaatccgttgtcaaataatactaaatacaacttaccaattcaattaacaagtaaacttcattcaagtaacaaaatgattgttaattttatgtaaattagaccgagagaatatttcacaaataaataagaattgcaaaacagatgacaattggccggaataacaatcggcggctgctacaatgggtcaaaagaaaaccctagcagacttaatgttgccaatcatttaagattcaagaactcaaaacaggactaattggcaggaatacagtatacattatacataccattggaaaagttggtctactctttgctgcaggattactcaaaagcacatgctcaccaaaacgcaagtatcgctgctggtcctactgcaagctctacttcagctttatctaattcttccccatggcctccttaaggctggtacaaacttagcactgatgcagccacttgcaaggatacattgagatttggttttggtgctaaggttcaaaacagtaaggggggtgttgtggctggttattattcctctattccaagtgctcttctctccatttatgcagaagcacaagctctttccaatgctcttaatcggtgtgttgcagtgaagttttatttagctttaatcatgtcagattgctaagtcttagtcaacaaaattaagcataagtgaaaaacagatcttctctttcagatttgattcacaatattgtattctttttatcaaattttcctaatactggtatctgttttattcctagagaccaaaatgttttagctcatagttaacaaaaagaacattaggaacagataaagaatgtgtttggaattcaagtagttccaaccgttgtatttctgatcttgtaactttaaacatttttatctactgaacttggagatcagtttctcataaaaataaataaataaataaaatgatatgtattaatgcattatatgcattttattttgagcgtagagggtggccgatggcaaggtatttttttggtttttgaatttgtgtttgtactttgtagtcatgaaataatttattagatcgtgtacttttttatatatacatttttagtgagctcacgtgattgattcacatgactaccacattttttttttttcttttctttttttgaatgggtagcacatggttatttagttgctaaatcgacaacttttacactttcaactatggttgttttataaggtatttttaatttctcaaaccgcacctagattacaaaactaaaaaactgtaaaaactgcactacaaaaaatagtgcggtgcgatacggtttctgcgatttggactatcatcaaataattaaactattacaaatataataaaatttgagcaacacttatcaaaaatacaataaggcttcaaaataaatatgaaaaatatttcaagtttcaacaatacaataattagtaggctttgggctagactttcacatatttgacctttataaatataaaaattggtattttttataatatgcagtgcggtgcgatttgaaccgcatattaacaattcaaaaaaactgcaaactgtactgcaccgtacaatttaaaaaaaaattcaaaccacaaccgcactgtaaaaaatttcaaacagcactttttttgtggtgcggtacagatgacttaagcgatttgatgaacaacttactttcaaccagagatatatggcaaaatctttaaagcattttgttctacattattctttaaaatgtcctatcaaaatactactacagtagaacctctatt

SEQ ID NO: 37335 - DNA, 3144 bp, Cannabis sativa
aattaatgtacaatactaaccataacataataaaatgtataatattacatgagtgagaaagtcaaaaatcattggataatctcacattgagaatatgtgaaaatttaacattataataaagagaaataatgtacaatagtcttcactcatttgttattgaaattttatgtgaaaaccccatacatcttaacttacacctcatcttatcatcaaccacacttttatattcttaacagaaatgccttaacaattttattgttctttttttttccttgaaaagggaacaaatttattattatactaattatattttcttagactatttttaattgaagatataaaaattatgttatatttcacataaaaaattgtaaaatttgatgtaaaatttaatacttttattaaaaatataaaaatattaactttattattaattttagagtaatttataatgtaaacacttaagtttaattatcggttgcaaaataattcttaaatttaatttttaacagtaatatacctaagttatatttctaaaacttttgtaagtacatgaccgttaagtgccaagtcattatccacatgttattttcttattaatatatttaagttaatttttaaataaaaataaaaataaaaatttaatgacatggatcaatcaagaactgttatgtggttattgacttaacactaatgaacaggtacctacagaagttttagaaatataacttaagtattattatcgtaaaaaattaaatttaagtatttatttgcaaccgaaatttaaacctgcaaattactctaaaattacataaatttgttatgcttgccattttagaaaattgcactcgagaaattgcattttgtaaccaaaactaagcatagataagctttagcaattaaaattgatagaaaatgggtattgatgagggtcgggtcggaaagcccaaaccaggcccatagttctgagcagtgagcccagcccataatttagtcttcttccatcttcagcacaaatttctcgtcagcgggaaaaaccccagttcagactgagctacagaacaaggtcaccggaaaacaagaacaatgaacaggttagtgctttcaatttttcaattacgtttaattttatggatctttatttgaggtggttaatcaattaaagattttgattggagaaagtttggaaattaggaattttgttagaggttttgagataaaatatgtttcaattccatttgcatgtgagatgtgccttttagatgtttgttagaatgttcatacgagattgtgactagtatcatatgcaaggtccttgatttatgcattttagtgttgttcgtaatttactaaagtattgtgttgaatttctaaggtctgaatgttatctcacacagaaccaatcaaattttgcaccaactgagcctttattttccatgtttagctgagtgataatggaggtttgctaatgttgatgacagctaggatataattgtgtttaagttattgtatcctgtatattaggaaatgtttggatttaagcttcattttctaagtaaatttctagcatattaaatttatgttttgacacaaattgctgctattatctttcaatactgttatatatatgtgtacacaattttttttttttatataatttaatcatgatttaaaaatgtgaactttttcttttcttcacagtccaatcccatttagtcatatcccaaacacaaaattgtttatccagtgtttattctagcagtttaccaaacatactattggatacagcataatcctatccttaccagtccaattttgttcatatgtaccaaacgggcccgtaggatgtagtgtttatggtattttgagtctattcaattcaagattttactctgattacattggaccaacacttcttttttctttttttgctgttacgttttttcctctacctcaattcatattttctctgtgcaaatttgaaacccagttttggagataaatttcgtgacattaacatgctcataaatgttttccaaggtttaatacttccaactgtaaccaaacatttttttcctagagtgattgggggcaagcaatgcaaactgcaaagttcttatctccaatcatttagcctttgggtgttaattttttttttatttaggataaaaaaaagtttttcttttttggtctaatgagctaatttttatgttaacaggttgatcacgagaaaagtcgtcgaaaatgttcacaggttgagaactccgcaaatgagtttctgtacagatgcaggtgctaaattatccagttccaatgttggccaggttagctatgggactgtcttgatctgatctattataaaactctccaatttttatgttttgttctgttttcaccactttgtagtgtcttgaaattgcaatgaacataatgtgaagttgggctttattgatttgcttgaaaataccaggagcatcagaagacgccgggtgtttcaaataaaattcaagaacatgatgttgccattgttggagggggaatggttgggttggcccttgcttgttccttgggtgagtagtctttcatgtagattttagttagtttcattgggataagtgctgtgtactttctttatgtttgggataaatctagcttcagttacaatttttttatatgatatatggctactttctcattgatagcttaggcatattagttttctcaatcatttgtttgttccaccaatggtttaagtgttccaagtaggttgtcaagacatttaggccacccaacctgatttttttgtggattaactttgatctcatgatggtgcccccttgcaattcaaagagatgacttttggatgaaatgcaatagcttcgatactgaatatgcattcatgtgttttaatattatctagattccatttggtttgatcagcattggaagaattttgtgatattgttctttcattcaatttgtaaatgaatctgaatatgtttagcctaataaattaataaagtattctgtgggattaggagataataggtagattagttttgctaatattatttcttttcatagcaaatttcataatctcttctaaaaacattaaaaaaggactagcacgattacaatatctac

SEQ ID NO: 37336 - DNA, 4833 bp, Cannabis sativa
ttctccaattaccatttataaaaaggattttttatcatttttatatttaaaaatacttttataaaaatttacataacaataaatccaaaagagtaaaaaataaaagaaataataaaaatatagtggtaattcccatataaaattaaaattttaaattaattaatttttaaaagtattaaaataattaataaaactaacaattttttttttttattagtttttaaaacacaagcgaaattgtcgttgattttaaaggaaaaaccgaatattccgtttctatattttgttttccacaaacgttaattttcagattctttaatcaaaaggcccagaaaaaaccctcttcttcccgcgaccccggagattcacttcactttcctctgacccagtcaaagttccaatctttataggttatatcaatcaaacatcgacaaatctcatctttgggtatttgtgatttcgcctcaatttgatggctttatcccttttaacaaaagggtttgtgtcaaattgatcgttctattgaattttgatccaaagttcttatttttaggtttctcatctgttgttgaaacttaaaaagttgaaaccttgaatgtatcttattacaattgaagaacaatcttggcttgtgaacttgcccaaattgtttctgggtgttctcaggcctcttcaattgtcttttgagctaaaaccattctcttcttattgtgttaagagagataggtgggatctagtgttgttttctttacagggtggttgatcaacaaaacttgtcttttagaatgggttctacacaaaggtctacattggggttggttgatcatggtggttcaacttcaacctcacatgaaaaggcttcttcttacattgataatatgccagtttatgttaaggaattgattgctggaggagctgcaggggcgtttgcgaagacggcggttgcgccattggaacggattaagattttattgcaggtgaaatattggttaaattgtactttgaatgaatgttattgtttgtgtttggtgattaagctttatgttattaccacttgatcatgagcagagaataatttgtagatggatgctttggaattgagttttacctttagtaatggaaattaggaaaaggtttagggaaagagcatatctaattgttacaaatgattgattttaaccaattggtattaggttcgaatcatacttgaggagatttgattcattccgaattagaatttgaaatgaaaggattcactttaatcgttgagagagtagatactattgctcatagcattcagaatgattgatttttgtggtttgctctcataaggtcttaggttcgagtccctcctcggtacctacatagcacttgttatattttacagttcccaaaatattgtagagttaggccgggattctagtttttttgttttaagatagatttgttaatgttgccatatgtttaagatggattttacattcaaaattttgcttctattgcatcatatttcctcatatcacattcttgtggtttgctctcactaggtcttaagttcgagtccctcctcgggtacctacatcgcatttgttatagtttcctcatgcccaaatattgtagggttaggtggggatcctaattttttattttttttcaaaaaagaacaaattatttttcttagttaattacaatgatttgttaatgttgtcatatgtttaagatggattttacatacaaaattttgcttgtatttttctcttgtagacaaggacaaatgggttccaatctcttggggtgcatcaatctttgaagaagttattaaagcatgaaggtgttaagggattctataagtaagtttgttattaatttgtataatttccttatcttttgttatatattttaaatgtcattcaagaattttccatgtgttatgtttgttcttcaggggaaatggtgctagtgttattcgtatagttccttatgcagccttacattacatgacctatgagcaatataggtcttggattctgaatcattatcccattttaggatcagggactcatatcgatctcttagccggtgcagcatcgggaggaacagctgttttgtgcacatatcccttggacctcgctcgtacaagactcgcttaccaggttagacttagacttatttagttagatttcagtatagtatttggctgtaaatattgaagtggcaatgaaagtttatttgaggctgatatgattgtttttcgggttgtgaattctcaaatcttagaacaatttatagctcaatttttttcaagtagttatttcttaatttggtaactatttttatcctcaagggatgatctagtggttgtaaggagtattgataggcatttatttcagagcgttttgtaaaaatagccttcatgaaattttttattagtaacataattttctgaaaatttttattaacaaaataaccatgtttggttgcacgagcgatcaaaagttacactatacaatttcaagttcttagtttggtaaatttccctttcgttccaaggttcgaattcccagagtctcaaaaatctcaggggccaatgggagatcgtcttggtaactgcaagggccaagtcttttatctatggttttccggtctgttgtactctttccagtttggtagtttggttgtccattctcattatatactcttttttgtttatcatttcaattaaattcgttatggctatgtaggttgtggacactagaggaagcttagagtatggttcaaagggttttcaatctcaaactgcttacaaaggcataaaagatgtgctttttagcgtttacaaagaagggggagcccgtggcctgtacagaggtgttggtacgtgtgtttttacatattctcttcttatttgataccaaatattatataatgctcttctgattctagtttttatgttgaataggtccaacactcattggaatcctcccttatgccggtttgaagttttacatatacgaagagcttaaggggcatgttccacaagattacgagaactccatcactatgcgcctttcttgtggcgctttagctggattattcggacagactttcacttacccgttagatgttgttaggaggcaaatgcaggtattgtcacatttcgaaaactcactcctttttattagatgaatttgttgggctaatgaagagcattatattagaatcattgttaagtctataaattagagatttatactcagctcatctttatccagcaaatttgagccatggccacagcaagaggcagatgataaactgatttgaagttgtttcttctgttggcgctgaggtcatgataaactatgatgataaaattaatagaagtttataaagaaagtaggatttcgagttttaatcattagcttttggattcaatttcaggttggaaatcgatcgaaaactactcaaggtggtgatcccggattcaagaacacattggaagggcttaccactattgttcgtaagcaagggtggagacagttgtttgcaggcttaagcattaactatatcaaggtgatttttctcgatcataattataatcactaatgtctataactcagagtcgttaaaccaaataggggtagctcacatggtcaagcatctttgctgcttccttcaaatcccctcctcgtggaaatcgtaggattaggcgagaagcctagttatttaagattatttctcggtcatagtcataatcaccaatgtccataactcagagtcccaacaagagtagctcaaatggtcaaacatatgatttgctgcttccttcaaatctcctatgggaatcgtaggattaagcgagaagcctagtcatttaagattatttcttgatcataatcacaatcactaatgtccataacttagagtcgttaaacccattaggggtggctcaaatggtcaaacatgtggtttgctatttccttcaaatctcgtgtgggaattgtaggattcggcgagaaggttagtcatttaagattatttcttggtgataatcgtaatcactaatgtccataacttagagttgttaagcctaacaggggtagctcaaatggtcaagcatgtggtttgctgcttccttcaattcctttgtggtgtaggattaggcgagaagcctagtcattatagattatttcagtcataatcacaaatgtctataacttagagtcgttacacccaacagagatagctcaaatggtcaaacatgtggtttgtgcttccttcaaatcccctcgtgggaatcgtaggattaggcgagaagcctaattatcaaagattattttgttcattcattcaataccacaagagagttaagcttagttcaccttagtcatgtgattgctttattttatctttatgatgattaggttgaagctcatatttgccatgtgattgctttctttttcaattttcttgcttacttactgataaatcgtgcttgtagattgttccatcggtggctatcggttttactgcatacgacacaatgaagttttggctgcgtgttccgccccgacagaagtctcaaccaacttcctcagcatgattgttccaacaattttgagtatttgtcatagttctttattttgttataaaataataaaatggttaataattgaagataaattttagttttgtccttctttggaattctttcttgtgtaaattagtggtggaaattgtctaattgttctaactaatcctttagttaaatagtaatgatatatataattaacatagttgatatcatatgttatgtttagtttatttatttattta

SEQ ID NO: 37337 - DNA, 5762 bp, Cannabis sativa
atatagtggccagagtcagaaacaactacttgtagaacctcgtagaatgtctctaaacaaggttgaggaagggagaggtctccactgcacaaagttacaaccaaacgccacccaataccaactaacaatagccaccagcccaccaccatcgccatgaggcaaaatggtgacgatccctttagccaacacaacataaacagcagccgctgcaagagatccacaaacccccaacccttaacaagaacttaataccacaaaatattttgcatagcgattaatgttacaaaacaaatcataaagacttttcttgttattctctctattcttattaggttaatttacagaaatagatatatattaattaaaaaattaaaaattcatcccccaaaaaaaaaatcacattttgaaactcaaacccatagatccacacaacaaacgcccaaaataagacagttcctacacccatcaattgtaaagcatagcagcatttgaaagattgagatgtgcaaaaatgaaatggagagtttgtacaaaaaaaaggccaagttttagaaagagaggttaaacctatacaaagggatgcctcctaacattcattagaaagacagagttaagtctttttcaatttctcctccccacttcacataggtaggtaaaggtgaaaagcttcctaagatgggcaataatgttcactttgaatatgctctgttccctcgtaaacacatagccgtaacaagtggacccattacattgcctctttgataccaaaataactctagcaaaaatcctaaggtatagatgcaatcatgagaagcagctcaaataacctatacaacaacaactcatgagtccatgagactttatatcagctgccttcagggggaggatttgacttttcaatcagaaactcgagtctctgcacacgaagtggaaagcagatacagttttaataagacaagaaccaaccaaatgcatgacaagcaaaacgaggaaggcagccaatgacatgaatatcaaacgaaagagtataccttcactgatttatttacttcttcgagtttatgaagcagtaaatctccgggacctatgcctctgcggtccatcaaagagtagcgtggggaagctgtcatctgtgaaaaagtacgcaaacatggtttgaccaatgtgaaatgaccaaccatcatttataagaaaattatggacaagaaatctaaaatgtcaggggaacagatttaatcaaaagagtattgcaagataaatgtatcctccatagaagacttaatgcgaattaagtgaaccgtgaatcagaaaacctctacctcctatagaaaatataagaatgaacaattttactatggtcattaaaattaaattatcataaaccttgcaaacctcaatctatcaatctcccgtaaatttactcagcatatcagaaaactctaatgataaggaaagtgctcttatattaatcctaatgtttggttatagaaatttttgaattgtttcttcagaatatgatcctctacttatagtcgtttcttataagccagagtagagaaaatagctggaaactttgaagagattccccctttccatagctcagctgaggaaaaaggcttgacaaattttctagtaattcaactgcataccaacagagagtaagaattgagctttcctacttcctcatatcatttacacttctttctaaaatgaattcgcttctctgatgataaagaaagtgttctttatggtttcttcaggattctaatggttgcttcagaatgtaatccttttcttatagtccttgccagagtagagaaaacagctggaatgtgcgaagagatgcccctttccatagctcagctggggaaaagacttgacaaccaacagggcgtaaaaaaaaataaactttcctaattcctcctatgctttacacttttccctaatatgaattcattctctgatgataaggaaagtgctcttatattaatcctaatgatttacagaaattttcgaatggtttcttcagaatagaatcctcttctcatagtcacttcctataagccaaagtagagaaaacagctggaaactttgatggccttatccatagctcagctgggaaaagccttaacaaaaaatctagtaattcaacatcctttacacttctgcctaatatgagtttgaattctcttcttggatgataaggaaagcgctcttatattattactaatgtttggttaggaaattttcgaatgatttcttcagattagactcctcttcttataatcgtttcttataaaccagagtagagagaagaaaacagctggaaactttgaagagatgtctgtttccatagttcagttgggtaaaaggcttaatgaaaaatttagtaattcaactgcatatcaacagagcgtaaaaatgaactttcctaattcctcatatcttctttacacttcttcctaatatgaatttgcttctcatttgtaggcacgcagccatgttgagagaatagtagagagatgtagagatctggagatccataattaccttcaagcttttgactggtgatctgaaaacagctggtccctcagacaatgatcccccccgactgaagttttctccttcagcagctaaagcagaaggcttccaacttttatcaatatccagcatagtctttgaagcttctgttatgatgacctgtaaatcatatgaagagaaagaactcatatgacacttcaatttcaaattgttcaaatgatagtgcaacacaaagtaggatcccctgattcatgtgcaagctaaagccattcagactctactacattatagtataaaacaaaactatcacaccttcctcaaatcatcaggatcggaaacaccttgaatctgtaattcatctacacgtgcagcttttccatgcgctatactttcaactctgaaggtgtgtattccatacattgactgcaagcatcctaaagacgacaaaatgaacaaagaaataacttcatcaattaatttgtactctatgaaatttacagtagattgaagtaaacacacagcctcaaaggcagtaattattcattaaataatttactgtaatgggcatatactgcaggcatagttccacattcgggtaacaaaaaattagatacaacaaaattgaagatgtaagtatcaataaaatggtggaaatggggcaactcgtcaggacaatattataaggaaattggctttagaaaaaacaaacactaactggatcattaccttgttcgatgataatattaatgactagggaaagtggcaagtgtttctcaattgtcgtgatcccccaaaagggaatgaacgaaggtctcgaaaccttcaccaaaaaaaaaaaaaaacactttgagctgtagtttattctttaaaatacaaaaaatataggtttaccttgtaaactatttcattaggtgtcacatataatttgcgcgaggaaatatccttccggagaatacgtcttctgataggaagatatagcaacatgaagataccaactccccaagctaaaaccagcaacagtgatatacaaagccatatgacagtatcatactgaatactactttctgcaagttcttcaaaggaggctgagtataacaactgctcggtactgtctgcactgtcatcctcatctaactcagattttttgtcagccagtagctgattccttgataatctaagctcgggtagaccaccggtatgacccaacaacattcctttaagcttaaaactggtacagttatcagttatcactatatttattaccaaataaaaaaaaaaattacaatagcattgtaaagctttaagtaaatacaaagagcctcctcaaaggcaactgcatacataaagcagcaaaatacaaagacttgatgctgacgcttaaacaactgctttgactatttctgggtccttttggtccttactgattgaaaacattgtttcattacagttaagaaatagtcagcccttctagatagcttcccaaagcataaaataaaacacctaacatatcctatcctcataatcattttgtacagctttttgatgcatagtttattaattcaattgaaacccacataatctggttaacacctgaagcattttcaagagtaattttattctaaacggtggcaataaacacattttcaccgtcaatgactcaaaaccctaatgttccaatccgtggcaaagaaacaaaaattgataaaagaaaaaaactaaaaactaaaaccccaataagtcacttcattctttagttaaaaaataaatatcagcttgctcaagccagggcttgaacaactatatgcctatcttcagcaactaccatttccttccaaaaaaaaatcactcatcttcttttcttcttttcctaggaacaaaaccaaaaagtactagaattcaataaaaaccaaaattccaagagaagaaatcattaaagtagtcacctgtgtttggcgagactcgattataaaagtcctcggttcgtaaatgtgaagttttggatcgagatgtttttgggtattttggtgaagtttccagaaagttgtttgtttgttgtttttttttggataataaggtttccagacagttaatggggatgatagtgtgagaaaaaaaaaagaaaaaaaaatagtgatgcgaactaccggtcgtattataaattttttagtttgcttttgctccaacccaattttctccctattttttaacgactttttctttctattttgcttcttcaagcggtaaacggatttgccgttgaaagtcccgtaccgtgcactccatcattagccaatcaaatgatgccaagtactcatgtgaaaagttttcacatttaattttctcaaaattagttacttattatttttttataaatgaatgaatatgaatgattgaactactcaaagttttcttaaaaaataaataataaataatttactcaccatttgcccaaaaaatactttaaaagtctcccttaattaacagtgggtaagtttactcatagttacccattattaatctaatcttttaataatagtttatatacatttcaattatttaggatgtgaattttattacatttacacacacaaaaaaagaaataccaaaacagattaaaattatctatgtatactataaatttttccattaataataaatatggcaccatgatacacttttttttttgagagaaacactatgatacacttaatgatttttgtttatgggcattgtcttttataaataataatattaataataaaaataaataatagtaatagttatagcactaaaacaaggtaaaatgaacccacataataataatatgcaacaggagttaaactatacatttaaataagaaaaatccttttgaagacttataaattattattattatttgattaactgagacttataaattaaaataagggaaagtaaacccagaagtcatttttttaatccttttccttttctccctctccaattccattttggggaaacccgcagtgctttctccggcaaagctattgtttttcctattaaattccacaaaaccttaacttcttcatcctccgccgcaccacttctttggtgtttatctgctcttcatagctattaaggtatcttagtttagttactgtttatttttcatttctatatgtgttccgattagaaattttaaaaatgtaagtactgagcagattcgtgaaaatgaaatcatg

SEQ ID NO: 37338 - DNA, 1752 bp, Cannabis sativa
aacttcgggctaataggaaaagaattagatgtaggcataccttttgaactctggctcacagacgacttgactcgcttccaagtcttggttttttgtgctttgataagaggttcaaaagtattttgaaatgcatggctaaaagataactcttgttgagatgaatgatgcaaaatgccttttcctttatttatttgttgtatccgatcattactggggccctccatttgaatcacatgtccactatccatcatctccccagccgaagaagtacccacaccagccgagacacgtggagacctctccttgacatgcaacacctcggttccagcagttaactcatcaccttcacacaccccagtaggcattaaatccacgtttccattatctcaagtctcaccatctacacataccacagtcggcataagctccaacttccctttatcctttgactcctcatctccacacactacagacgacatcctcaccaaatttccagtatcaccatggccacattcagataaatgaccacccattttcccactagatgaacgcccccgtagctctgtatctccgtcacccccatgttcagcaacaataccatccatctcttcttcatctcgttcccgtctttccaaaatagaggtaggagccaactgttcttgagtaaggcctgaaaaccgtggccgagatctctccatcgcagagataattttcgaagcttcccccatggacatgatcggcctgctgtttggagactccgcacgcttcttattgaatcggaaattatctcgaggaggtgatgctggagcacataaccaagaaccgaacctcccaccatcaaaccgtgggttatctccagcaaaatctctaagaggatagtccaaagccttgtggccaatgatgccacaatcatagcaaaaatcaggtaagtgctcatattgaaaaaggagagaaacttcattaccttgatcatcaatagccaccctcaatccccttttaagaggctcagtaatattcaatcttaccctcactttcatggtgcccttcacaagctttatatcttccagcttaccaatccgctccccccactctcttgcaaagagtttcgtcatgcacgctaatggcacattattgatagaaatccaaaaggaagaaaaatcaaaattcatcttagaaactttacccagacccatcggtttcacaaagcaaatcagttgtttatcaatagtccaaggaccaccaccaaagactctctgcctatcctcacgacagccaaagaaaaatcgaaaaatattcttggaactcaactcttcaacctggaatctatggttaattttccaaacccctttcattgctctcacacaattccttctctttattggggtctagggccaataacttttccaatcaaacacaaatcaagcctttttttaccttcttcaaccccagccttattgagaggaagaaccggcccatccccatcatcaagaatcaaaacttcagctagccgattcactaattctaaatccatatccctaacactgagaattagaacacacaccaaagaaacgacgcaagaaatcacaaaatcaacccttcccatgaacggactgtttcttcccaggatgtttcagaggaccgaaacaaacgggagactcaatatcctggggaaatttgattttttatgcttacatttggttaaaaaatttttcctaaacaaataataactaatatttataggatatgacaact

SEQ ID NO: 37339 - DNA, 3945 bp, Cannabis sativa
gagggaattctagctaaactctctatcctccgaaaggacatagcaggggtctcccgaaggccaaaatgagacgacttagagtatgactgcgaggatcgagagccttgtgctagaaacatacttgaagcagagctccctaaaaatttcaagaagtttgaaatgaccttatacatggagacactgatccaatcatttatcgaggttcaacaaagtcatgacaatattaaggggcagtaatgatgctaagtgcatgtgcttcccgctaacattgggggactcgttggggaatggttcaagaagttagaaccagaatacgtggattgatggagcaagttacagacaaactttaggagacagttcgttgcaaacaagaagatcaaccttgaagttagtgccatgattaacattaaacaattatccttagagaccctaaaattttttatcaagaggtttaaagaagaagcctccaaaataaagaaagtgggtgatggccaacaattggccctgttacaagctgctatccagatgggaactcccttttgaaatgagctccaattagaaggtgcggccaacctttaagattttcaaaagagagctcagaagtatactaatttagaagaagcccaaataatgacttttggagggtattaccttatcgaaggccctgggtatgctttttggatgcaaattcccaaaaaggtacttcctgccacccctcaagccagtgggatgctcagtgtgtagttacaaacaccgccaaaatattcttaaaatctcaccgtggcaccagcccattctaattatgggttgcaaaataatggccctgctccaaaagcatgcgcacagttagccgcctagtttgcttcacttgcaaaaactgcaactacagctccccaaacctcctagagtaaacggtcatctaagggaagcacccaaagtgagaacaagaaagcgaaaagggcattcgaatgcaaccctcagtatacccagtacattaaattggtggatattcaggaacatgtgtacttggctacaagacaaaacgttcactaccggaggccacctcctttctcttgagatagtttctaaagagatcccaataaaagatgcgagtagcataatgatattggacacacaaccaatgaatgcaaaaatttaaaggatgaaattaagagcctaatatggctgggccacttgtacgagtgcataagaaatctcctgccacatatgaaagaaggataactcagggttcaagcacctcctggaggagtggttcaggctccagatgctcaggtacctctgggagcacttccacccaaccaagggatacaatctagatagccaccctggccaaatgggagggtgaccatgatctctagagggcgccatatagggggttcaacccacaatgatatgagatgctacgcaagagcccttgatcatgatgaggaagtcttggaagtaaaccagctaccagtgcaaaagtctcgcctcatggatcaacctagaacattcacagaagaggatgcccagacagtgaacttcccacatcatgacccattagtgattgaaactccttttgccaataagatagttgctcgaatcttagtagacaatgagagtttggtgaatattctatttaaagaggccttcctcgccatcaccctcacaaaccaaaatttgtctcagagcagttcctaactcactagattcaacaaaaattccctcatccccttgggaaagatatgactctcgatgactctatgcccgaacacccctaagaaattagaatttttctatgcgaagcatcaggtgctaattgcaccataaataaaaataaatggtacaagaggcgaagcaaaaataatggggcggggggaagggaaaatggcacggttggtaacccctaggcaggatgggcatggttgaaaaaaaaagaggattgtcaacgaaccctcaaaacgacaatcaaccagtgtggatatcttatttgaaaaaaaaatatcaccaccaaaatataatattatagatatggtaaacgacttacaaatgggagaagcttgatcggttgtagatgttggtacccagcgatggtaaaactaagcttgtcaccgttagagaaaaagcaagagaaaatctggaatgcctaaaatttttgctggtttggagttttaagaagcatggaaatgaaaatttgaaaaaggaagagatgaaagacatttatagacccacctgggtgatttgagtcgtcgctcatccaacggtctcacttcaaacttgcataaacccccatgatctaatggctagggtgagattgtcagaggtatgatagtagacaaatagttacactacttaagccccaatctgagaccctacaataagtgggagcatcaaaatcaagtaaaaggaaaatcaaattggtttcaccaaaattgagaaaaatattgaatagcattaaaagactgtcgtgcgtgttgtctacaggagcgtgttgtcagcacttcgagagataagttgcaagccccatttcacaaaaatgcaaatttggacttagggagtaaatgttgcttaggatttttttttttctaaatacgtggcacttctggaaggtgacatatggcaacaggatgtgttacatcaacctacatctggagcgtgaatatttggcaggagcttcgagagattagttatctctagatgggccctccagaaggatggcaatttgtctcttcctcgttgcgagtgaaactcgacccagagaggggataaggagtatagcgtacggcttgaggctaaggtactgtgcatacatttaatacgatatgtggaagaacatcctacatattactctgaaaagatgtgctcgagggtttgaacacataattctctgatttcacaagaccccatacatcatttgatgactacattatgatttatcaagtcagcaataaaggaaaaatcttatctcacaaaatacctatgataaacatagacacaccctcaccatataagggatgatgccctatcccccagattctgggaatttgtgtaaagaataattcaaatagactacaacaatggaagctaattttccctccattatgagcctataaattactcaaatgatgtatgcgagattttttttttgactctttgtaagaaaatactcactaataaaaatgacttgtgtactaaggctcattaatgccccaaccatataaaaattctcttctttaatttccactaattacttcaaacagttttaattaatagttaccgaaaattttagtcaacatataatatattttgtttatttataagtgtaaaaataaataaataatatgtaatattttattattttatgtattataaatatattatttaaatggtatagacaaatataaagaagttgatgtttggtgtaatgtaaatgtgtgagataaaatagaaaaaaataaaattttcgtgaggtattttaatggatgaggagtgctgccgtcaattttctattacatattcattgtcaacttctgtgctagaaaatatatggcagtttattttttttttttaatctttttttatggaaatattcgttatatttacaacatcattttcttaaattttgaaaaatttcaaatggtttacattgtcgaaaatatgtttaaatttttttgaataattatagtaaactgaaatatcaagaactattttttcagtactataatttattttgaattgtaaaaaatttataataacaataatttagctctaatgcataatgttatgaaaaaaatattctaaaatatgattttgaatgtaaaattcaattaaaaagattgtagggtaaattgcggcataaatacctaatgttttcgattttatacatttaaatacctaatgtttatttttggtggcaaaaatacctaatgttacaattctctaaca

SEQ ID NO: 37340 - DNA, 3209 bp, Cannabis sativa
atagatatatatatatatatagggcaagactatagtaggacttagcacaagttccctaccggtagggaagtttttttttaccattaatttttgatcatgtggttattaagatgtaagacttatatttttatgatagaattgtacgtatacaattaaaactttatatatatatatattataataatatttaattatatatttatttaaaaaataaaataatattattaattaaaaattttattaatttttaatttgaattattattattttttagaagagttaatttaaattatttttatataggtaccttctatgatttttttttagctatgtaaagatctcaattttttttatctcctacataaatagttattatttttgctgtctccaaaatttttttgatgctagttaaaatatgacaatatatataaaaagaaattaattgtctaaatttttatacatctctaacccatatgaataagttttgaaattttatttttaacaaaaatattgtgtaaatgaagcataaatttcacaactctatcccgttaataatttttctatttgccttgtggtatatttcgccatggcagccattttccaagagagtgggtgtaaaactaaattgtgagtggtttcaaaaaaaaaaaaaaaaacaacaaaaaaaaacttcgattatggtgtaggtttccatatgatacatactcatttgcttattttttaatatacaaagcttaactaataagaggataatgttgtgaaacttttgcttcattcaacacaatgtttttgttaaaatgaaactttagaaattataacacttcacagtgctcatcaaatttaattagaaataactttggtagaaaaaaaataaataataataataaaaaaactttaacatactctgtatatttgcatatactcaataataaaaaatactcaacaaattttcaaaaaaaaaaaattcaacagtaacatattattttaaaaaaaaaaaaataaaaggagtagagtattaattaaattgataaagtaataaatctcatacaacctagctctaacataacatcaatgcaacctatttttttaaatttttattggttcaatttacttccctatagcataaggtaaaaacacttgagcctaccatagatttaccctctatatataatatatataaaaaaattgacaattaaaattaaacaaacttaagccgagaaactgattataaagtactattctttcacaagtacataggaggaatacaatattacctttctatccgttagagtattttatccttactacacttagttctttataaatgaaacttttgttctccattgcaactaaagtgagatctcattcatttaaaatccttgaactaagctaaaagaaaatcaccattttatttccatttaaggagaccataaatttttatatttatgataaacacgtccactcaattaaactatcagtagggtaagctagtaacgaatagaccaaagaacttaataatctaattatttataatacttatcactcataattaaggttgaattgatctacggtcaaggtaagtgatctgactaaattagctagctaacggtacatcttgctatctaactttagctcataatcggtctagtttgatataatcaatacacctaatcttatctactttatcaaagtcctagaaagaacttaacacttaacatagaacttatcatagattaacttagtcagcataaatctagtacattgataaatcttaggacactaatagatttgatcatgtaatcataattattttttactgtgatttaagtcacaataattatgattagctacatgtccgagatttattagaatttatcattaaagaaataatcatgaatacgacacatgggcaatgtgattttaccatgtcagaataatttttattttttattgataataataaaggtttacaaatttaattaggacataaaatcttaacaaactcccatttgcactaattaaaacataatgcttatagttctcataaactcataatttaatatgtttttcaaacaacagtcttgttcaaagtctttgattgctaccttctcgaccttcacgtctccccttgattaaaaaatcgtgtggaacttcctttttatatattttcttctcttgtggcttcttggttctttagaattagcctagtgttgtcgcaaaacaatactagaggtttgtccatgttgggtatgactctaagatcggtgtaaaacttcttgagccagactaattcttttgaagctgcgatgtattcagctttcatagtggagtctgatattgaaaacttatttacgcttctccaagttacttctccatctctaagagtacatatcattctagaagctgacaatctgtcatcgatatcagcctaaaaatttgaattggtgtagcctaaaggattgagttctccacccttatagattagcatatagtctctcatttgtctaagatatttcagaatatgtttgacagctatccaatgttccttgccttggtttaactgaaatcttctcactattccaacaatatgatatatggatggccctatacacaacgtagtatacatatgactatcaattgttgatgcataatgggcttttctcgtttattctatctcttctggagcctttagacattgactcttgcatagatttattccatgtcgggagggtaattatattctcttggaattttccattgagaatctctcaagtactttatcgatgtaattagcttgagatagggctattggtttgttcttttgatcctttataattttgatacctagaacataacttgcttcgcccaaatccttcatctgaaattgtttgcttagccattcttttatgtctgataatttcttaacattatttctaatgagtaagatatcatctacatataagactaggaacactaccacctgattttcctttaactgataaacgcatggttcatcctcatttttcttgagtccataggttttaatcatttcattataccttagattccaaaatgggaagcttacttgagaccatagatagatctatttagagcatgtttggtattgttttctgcttttgttttcaaaaaattgtttttagaaatgagaataaaaaataatttttgaagtttttaaaacacaagtcatg

SEQ ID NO: 37341 - DNA, 5854 bp, Cannabis sativa
tatgtctcagggaagaagatgaatacgtgtcaatcaatcatctaatacaaattttgcttttttttaataaaaaaaccgttttcgctaacaaaaacataataaaaaatgttttttttttcttaatttttttttttcaggggagttttgtttatatattccttataattagccttcttctcctccttactttacttttctaccctttatatacataagctttatgaagggcattattgtaaattcacaatctccctttctctcataggaactctcaccattctccttctccttctcctcgaatatgtctctcattgatcatactattacctcttccttccttctcttctttcgtttatattagctttttggttaatttcgcttaccaccacaacactttcctttcttaaaaggaataaaggtacaatctttcctataatctcattctaaactctattaaagtttcactcttttcttgcttttttcccaaattgagatgtgagttttggtttttattccatttccacaaatgggttcgaaggaattttgttaagagaatgcttctctctgagctgtgattttttttttgtttggggggctgagcttcttatgtggtttttttttggtgttatgttaaaattgcatccactatgtaatcatgcaactatgcaattttacatgtatttaatgtaaaaattagttttttttatcttttgttgtatgaactttcttatgttgtttgatgacatatattctatttatgttttcttttgatagaattttattattattatttaactaaaactataattattgtgtttgaaggggagatataggtcagtgaattgattcaatgtgatatctattttgttttgttttataattgcaaattgaattttggttataaaatctgcattagatttgctatttaatgcagaatttttagtttttattgattttattttaggtttatattatgttttttctgctcagaacaaaaatccttgtttttggcataaattgataaattgttaagaagaattatactattggaatttgaagctgttgtttatttgattattttatcttatatttgaatgttgtttttggataggatatttgggaataatggatgtgaaaccaaagagaaaaattgttactgagaatggtgatacaggagaagatttggttcttgcaactttgatttcgaatggtgatgatgttggtcctcttgttaggcatgccttcgaaatggggaggcccgaatcacttcttcaccagctcaagaatgtggtgaagaagaaggaaaccgagattgaagaactctgcaaaacacattatgaggaattcattcttgctgtcgatgagcttcggggggttttggttgatgctgaagagcttaaatgtgatctgtcaagtgataattttcggttgcaagaagttgggagtgttcttttgattaaacttgaggagcttcttgagtcttatgctattaagaagaatgtgactgaagctgttaaaatgtcgaaaaattgtgtaatggtgttagagctttgtgtaaagtgtaacagtcatgtttctgagggccgattttatccagcattgaagacgatcgatttgattgagaagaattacttggagaagattcctgtcaaggctttgagaatggttattgagcagagaattcctgttattaaatcgcatgttgagaagagagtttgtagtaagttcaatgagtggcttgtgcacataaggagttctgctaaggatatcggtcaaacagcgataggtcatgctgcatcggttcgtcagagggacgaggaaatgctggaacgtcaaaggaaagctgaggagcaaaatgtcatggggttagaagagttttcgtttaatttagaggtggaagaagtagatgaggaatcggttttgaaaatcgatcttacacctctttatcgagcataccacattcacaattgcttaggaattcctgagcagtttcgggattattactataagaatcgaatgctgcagcttaactcggatttacaaatctcttcggtgcagccttttgttgagtcttatcaaacatttttagctcaaattgcagggttcttcatagtggaggatcgggttctcaggactgctgggggtttgcttttagctgaacaagttgaaataatgtgggaaacagctttagctaagatgatatcggttttggatgaacaattctcacatatggattcaacaacacaccttcttttggtgaaagattatgtcacacttcttggttcaactcttagacagtacgggtatgaagttggtccactccttgaggctttggacaattgcagagacaagtaccataaacttcttttagaagagtgtcgggaacagattgtaaacgttcttgctcacgattcgtacgagcaaatggttttgaagaaagactctgattacgaaaccaatgtgttgctattcaatctccaaaactcggatattatgcctgcatttccttatgtagcgcctttttcttcgatggtgcctgattcatgtcgaattgttcgatcctttatcaaaggttcggttgattacttgtctcatggtgtctatgctaatttctatgatgtagtgaaaaagtacacagacaagcttctaatcgatgtgttgaacgagatcttactcaacacgattcaaagcaacaacatcggtgtatctcaagcaatgcagatcgctgcaaacatatctgttctcgaaagagcttgcgatttctttgttcgaaatgcagctcagctatgtgggatcccagttcgatcggttgagaggactcaagcttgtttaactgcaaaggtagttctaaaaacttcaagagatgctgcttatcttgctctgttgaatttggttaacaataagttggatgagtatatggcactaaccgaaaacataaaatggacttcagaggagatagcagagaatgggaacgactatatcaacgaagtcatcgtttaccttgacacgattatgtccacggctcagcaaattttgccgttggattcgttgtacaagattggatgtggagctctagagcacatttccaactcgatagtgtctgccttccttagtgatagcgtcaagaggtttagtccggctgctgttattggcatcaacaccgatctaaagatgttagagaatttcgcggaagaaagatttcatggtatgggattaagcgaagtgtacaaggaaggtagttttagaggctgtttgatcgaagcacgccaactaatcaaccttttatcgagcagtcaacccgagaacttcatgaatcctgtgattcgcgagcgaaactacaatgccttggattacaagaaagttagtacggtttgtgagaagtttaaggatgcacctgatgggatctttggaagccttgcaacgaggaacacgaagcaaagcgcgaagaagaaatcgatggacatgctgaagaaaagattgaaggatttcaactgatatctatcaaaaggtcccttctttactcttattagtttagtatagttttgttttggtttttctattgagtttgagaatgtatgggaatcattaacatttcctaatgatatatgtccatacaataaatatgcaatttgatttcttttttctcttgatctcttattgtacattgaaaattgttctctttcattcatatataaatttttggttttgagaagagaaatggaagaggattgagtccgattatattgagtaggggtgttcatcaaaccgttcacaccacacaaactgcctgtaccgtattacattgcataaaaaatacgatttgaatggtgcggttgtggtttatatatttggctaaaccgcgcgatatagtttacggttttgaatttaataattacggttcaaattacaccgcactatattttacaaagttactattttaacaaaatgatttttctttcatataagaataaatatatataatatatatgtatattatattattttcttagagataatttaatataataatttgatcattattatatatgctatattattaatatttaataagattttttttgtttgaattgttaaaattttattagattaatttttgaatttttattataatgtttgataataatgatagtgtgaattacttaaattacactatattgtattttcgtggtgtaatttttacggttttaaaatctcgcagtgcggttgcagtttgagaaattacaaaaattacatatgcagtttggtttgagaaaaaagttacaacccgcaccacttttaccgcgaacatgtgtgaaatatcaaaatgggggctatttgtttattttataatttaatttgaaggttatatattaaaaatctgaaaattgatgtgtcattgtgaaacaaagcatacatttttctatgttatggaaaagattacaataatgataacaactagaaccttttgactggtttctttccatggatttgtttcaacacattattagttgtttaaagttaagatgacccagaaaaatcaaagtcaaggtcatttgagaagtccaagtcttcatctgcaacttcactctttttatcttctttcccttggaaatgggacatagatgagatgcttaatgaataagactcaaatgttttattataacatgcaatgtaaacctgttaataagcacatcatttcaaacataaagctcaaagcttttttgggtttagtaataagaaaatgaaatgtaaagtgacctcttttgtgtatgaagaaatgattgtgaatgtgataggatagggtctttgcaaaaaaacaattagaatggtgtgactctctacatcaagagtcaagagcaatgttgttgcttctctagcctaaaaataatgatcattattattaggcatcagtagtgtttagtattattatgaggtagtgtcttgtgaatgattaacgatattttataaaaagttattagattaaattatttgagactcaatatttaattactaatagtaatatgatacatcgagtggtgctagaccctcaattttataagttatcgactaatttaataatttcacacaaattattaaactaagaaatttttacatgaaaaatataaattaacactttatttacaaaaatatctccataaggtgtgggtaacaattttgtctttaatgagcttttatttaccaaaatatcacttatacatgtccattcatgtcagcccaaaccatcttccagccattacgctttcaaaactcacgttcaaaacccacgaaaactaccttccagccataaccttcaccatcttcttctttcaactgcctccttcattagttttttttatacatatctttcatttcgtatatataatggctattacttgtggttctgcttctccatttctattgccaaaaaaaagcttcaaaaataggtcataaatcagttgctaacaaggctaaagagaaacgcccagtcgtcgacgatgatgactctgatttcgctccccccatggctaaaggtggtcgtcatccagtgaagaagaagtcgaaggcgtccttacttgaaattttttttaactttgacggccagaatagaaagaagaagtcaactttaagataactgtgatgaaactgtaatgcaacaattatatatgttgcgagtcaactaacataaaagcacaaaataactaattaattccaacacatattttaaatacacaaatgaatattacaacaatcatgttttatctgttcagattgcgtatttgacaattttgagccttatttttataatattatgatattgtagtagaaaaactattattcaactaacgtgcaactt

SEQ ID NO: 37342 - DNA, 8762 bp, Cannabis sativa
tttaatagaacaacttcagttatataatacaaaaatatttcttttaattaaataacaaaatgaaacataaaagtttaaaattctctaataatacatatgattatatatatagtaaatttatttatatatatcggcattaaaatgaagaaaattaaataaatttgataattaatgaaaaaagtagtacaactatagtatagaagctataagtacaaattaattaattaaagcatttatcagattggtacatttaactaattcctaccatatatatattcttagggttgatataatggtgattattattaagttggtgtccagtcaaatttatctacatgtaaatattaatgacagacatagacactgctttacaatatattatttatttctatatttatacatatatacatcataaataattatatttctatttttaacttgatggggtcattttattcaattaataaatctttgttaattacagtaatatttattattatggcatcatgatcaatatggtcatcatgaagctaggtttattatttttattttatttttagtgctaagtagtagtctaggatttactatataaatattgtgagaaatttttattttctataaattattctttgattttttttttggttatcatttgtcataatgaacttttttaacaatttaaaatatagaaatatgtttgacacttatctatttttgaatattttaaaagagactaaaaattaaagagattgactgcaatttgataattactttttttttttggtgaatgagttaacttcattgaattattagaaaaaattatacacaaagactgcaatttataattagatgatttcattaatggcaataatttgtaaaagaaatatatcataattgtttttaggagaaaattaagtataccattatttaagtataattagataaattttaattgattattattaataaaattacataatttattaaaaaaaatatttagtagcatatattattgtatattaaagttaaatttttgaataatatataaataatatacataattaattgtattcacattattttttaaataaatcatgtaattttattaatatcaacgagttaaaataataaattgcaattcagtcgagacatttctcttgttggaaacacgaccaggattaaaaaaaacgaactaaataatcaccctcctcattcctagatcatttgacaaaaaaaaaattaaaatcaaattaaaaagagtgcaacatcacagttaatcataagaaatagttataatcagtttcatcaaccactcagaagatacaatggtaaaaattagactaattaagatgtttgccccctaaactttgacatatactaaatcacgccctgtgaacttttttagccgttaaaaattctccctaaactattgaaattattggatttaaagacttttgtcaaatttcattcaattttaccaattcgatgattgtttatgtactaaatgctcctcagattttgatatctaccaaatcatgctcctcgaacttttatatgtactaaatcatactcgccgaactttcatctatatatattagacttttcttactaaaattatataaaagtgcttaaatccaacaatttcaacagtgagaatttttaacgaccttaaatgctcaaggttataatttaatacttgtcaaagttcagagataaaaattataatattatgttaaaaattattacaacatattcatttacactcgtagcttgaatagattcattcaaactcctaaaaattattaaattcatcattttgttaattaatttgttacactgtatctttcactcaaatggtcttcattgtcttcatgcaactcgaatatataaatatatgtatatatattatcattttaaaatcactaattattattacttgtaacggcattaatgattaatgaacataagtttagaaatataattataattacgcgtacgtaaaataataaaaacactatatatacatcatcatcaataattaaattagttatatattgtcctaaaaatttggtaaatctgacgattaacactgtttggatgtatatatatttatatgtcatctcattacttaattaaataaattaaaaaaaaaatcaattttaattaattggaaatattaagagaggtattttattatttataaatatcatcatatgtatagattataatgataattcctacctacaattttatcatttcactttaaatctttctggtttttggaaagtatgagaaggtagaaatcttcttttaatgaaatatgaacaaaaaacaaaacctctcatctctcactttggtcatcttattattatggctctattgtcttttagctaattgggtaatatgaccataaaaataaggtagtgtctaatttagaaatttaaaatttttaaataaaattaaagggataaatacatattttgggcaagtttcaaaaacctacaacaatgctagcaagagggaatatttcttagaaaatgacatttagctaatgtatatatttttccttttatattttaaacttgtaattaagttaattgaaatgagagaagatggaaaattggtgagaaattactttatgtctttatcttcactaaaatatctaaaatatactagaagaaggctaatactaaaagttaagattaaatagtaaatcaattcctatttatatatataacaaagtttatctaacttggccttttgctaactttcttagggggaggacaaatttgaagtcaatgtcaaccatagtgttaagcctttttacacattttttagaagtaattacttgggccaacatgattctttacattattattattattttaacaaagtcttcaacatatatttcagaagaattaatatacatttttacaccttataggttaattattcttttttgttgaaaaaaaaaatgaatataatttaacaggaaatggaataatacttaataagtttgacgaaaataaagtcgcacaaatctcacaaaaagatgattcaataacagcaccctattaaaaaaagaaaaaccctacaaactcgcccatagccgaagttacaaaagacaagatgattaataccattattacaacaagaaaagaaaaaatcaaaacaaagcaatcacataattaaaccccctaaacaaacacaatcttccaaacaaaattattaagacaaaaggccatcatacgggaaccacccgaaaaggagacacaacgtcacgagggtgcatagcctagagcaaactcgcgccctcccctcaccgattgcaacctccattgggtgcccaaggttggcaaacgcaagcatggaaccccgataaacactatccacagttaaggaagagatatatctgcattgtgcgagttgcaaccaccaccaccaccaccaccaccaccgtgtaccaaagagcagaagccaccgctacttcacctaggaaaaatgagcacaagaccccaaaggctgccggttacacaactaactttaattgcaattttttttgaaaaaaaattatagatgtaagttattttgatataacaacaacataaaaataacaaaagaaaaaaaaaaaccaatcataatatcattgttaaaaaaaaactaaaactgtaaaaaagatcattgaggattgtaaataatttttatcttcttttagtgatatgtttttacgttttgttaaacaatctgctaagcaagttggtcatcttataataaaagcgtctcgtttatatgttgattgtatttttttaggagtctaatctcccttttgatgtcactaacattgttgagaccgaattgatctagttgaataaactttacaattaacaaaaaccttaaaaaactataattccatacttttatagactttttgtcatttttttaggttgtttttactaataatattccaataattaaaattcattttcctgatcttttgtttgagcccaactcaagaagtggaacaatgatggtcttaaagaaataaagcaaggccgtcccaataattattggtcttgacttgacctctcaaatcttaagtcactaccaattttccatttcatcactatataatttgataaatgaaaaccaaagaacactttgaaaaacaaaaacatcaaaattaacaaatcatgattcaacaacatcaaaaataataaaacatcacccagaaaatcccaagtatccacctaaaagttattttgaatatacacaaataagcaacacaaatgtgtgacttaacataatcgaatcactgtagcaccctctctcttttctctttctctatgattttttttcttttctttttgttttctcagcaatgttgatccaggaataagcgagatacttctgtacatcagcggtcaaaactaccgaccaaaccaacctcctctttgcggctggccatctccctcgttcatcagcttatccaacacaatattcaagtcaaccgcctggccattctcagtgagctttctaacggttgcccttacatggtctctcgggaaccccatggtagaaactttatcgatcacatcatcaacaggaaccctgtttccagttccagaagaacctgaactgttgccagcaccagaagcagcagcaggtgggagaacccgagcagtaggcagttgtggataaccacttccaccacttggagctgaggttgaagtgagttgctgaggtttaaccgcagaaggatttccatattgagagggagaaccaccgtagtgaaactgttcattaagggtgccggttggtgggccatatccagatggaaaacctgaactaggtcgactagattgtgactcgtacatatgagagggtggcgcatagaactgttgagattgaggaggtccacttggtgactgagggagtggctggcggaggttaggtgggtagttttgagaagaaacatatggtagctcttcggaatgatgggccagtgtaggagggagttgagagggattgacaggtggaagagtcgggagctgctgtggaggttgtgttggtggctgagagaactgtggttgaatggcaggttgaaattgttgatggggtggtacagcaggggatggaagttgctgctgattaggcggtatttggtggtactgctggttttgtggttcttgagtttgaccaggaggtggaaaataaggctcgtgctggggaacaggaggagggatctgattctgaggaaattgatgtggatgttgaacttggggtggcaggttctgctgcggatttggctgaggaggagcatttggaggagagaaggaaggttgtgacggaggagcatttggaggagagaaggacggttgtgatgatggaaggttaacaggagtatgaagctgttggtgagattgttgaggagctgatgctgcatgctgcatggaatctacatgcgctgtattctgggcttctgaattctgatctactttggatacttgtagcttcgctagctgtagctgggcctcgagtatttcttgtttatcctttaaaacaaataccccagattggacctgcaatggttgttaacaaaggtaaaagagcacagtatgaatatattgatcacggaaacagcataaaaataaacaaaatctctacacagcaaaagaacccgaaaatttgcttccctatgtaaatgaacaaaaaaaaaagacagtaccacagcatctgtttaaatagtcatggtgatgttcttcataaaatacacagatttaactcaacaaatatttatcaccaaggatgaaaagtaaaataatggaaaaaggaaacatgaagaggattccactacatttgctcttacatgatcaatttcaaatctcagaccatccattcacaagtaaaaatcatcagaaagaaaagcttttaagaataaacaagacactcaataataagccaaccaccacttgaaagaaaaaaaaaaaaaaagccaaattcacatttctgtaaaaattaacaaatgatagagcaagtgagaaagaaaaaacgacaatcgtatcaagctgctatagtttacttttctaaagattgataagcagtttaactgagcatgcatatgataaagtggagggggggatagaaaaaggaaatgacaacttgtgatattgaaactacattatgaaattgatgacgcttaacttattatgcatcactcatcagatgttatgacaatgctactagcataagtaaccacatcaacaagagtatattaaggctgtatgctttagcctcaatcaaatggaacatctattgaaatgcatacctctctcagaatattctccaactgcctcatcttcccatcagtatttccatgattgttcccaactgatgtcttcaaatcatccacagattcctccagatgtcttgttctgctctctagttgtgtcaatcgagcactaacaccttccagaacatgtagcaaattatcggcatgttttttcatggtcttatcaatctcagccacaattgttgagttacatgcactttgatccttctctagaatgaacttagttggttcaagagagtctagagaaccataattctgtaccgaagaatcacaaacaaaattcacattaaattgaacccaaaaacgttgatataacacattgtccaaaacttgcaaatatatcacgaggaaaaagtacaaatataaaaagaatactaaactgtgaaaaatcaaggtcttcagatgatcaatacgcacaacttttaaaattagttcaattttatacttgtagaagcctaacccttatcaaggatactatacttataaaactaataaacacaagtgagattttccagttgctaaagcacattacaatatatattagacccattatcccgttacagtttcaaaacatgataaaacaatccaaaattttacctatcatcccatagatcaaaaaagccaatttcagctgatagctatatttataaagggtgcatagtaattaccctgataggagagccagtttggggcttgaagtcacctgagctccaagcccgagtggttccaccaatactgggtgtagcatcgaaattctgagagtgagaagaagctcctcctcctagtgtgcttccggcaatagggcgaattggctgaaaatcatagcttgggaaaatatcatcgttcttgttaagcccattctcatttccaccatgaccaccaccactgagattttcttctttttcctgaggatggttcatcaggttaataaaatcttttctttgtggagatgatgcctggtgagatagatccattatctgcttgtcaaaatacagtatacacatatcagacaagctgtaaactttaaataatccaacatcatttctaacgttaataatatgtattttaattaaaataaacattagctgttcttctgaaggttcaagtactctggttccaaaatcagtttatagaagaatatgcaaggtaaaggtagaatgtagattgtgggctcagagagtttagtatatttacttgacaagaaaaagttgacaaaactagtgcttatgtacactgtacttgacaacttatacaaagacattttaaatgattttcaattatttctttaatgatcttcttcctcttcaaagttcttcaaggacaaataaaagagtggcacagaagtgaagacaaaaaaaagtaagaagaaatccacatgccaaaacatataagttggaaaaggaacgagaagaaatctaaatgccaatacatataagaaaaaatgaatgaaaagaaatccaaatgccaatatatataaataacaagaaaaaaaaagtgggggtcaaatctttggttgattaatttaaaaacattgcatgatacatgctttaaaatacggcatagttatggtggtcacagctaaagtcatagttcccctataataacatcattgagcaaacatgggggagaaaaccacagcttttgtagtgtgccaagttccaagaacttggtatgtagaaaagatgaagaaattggatagaactatatcaaaggataaatttggactgtaaatgaaatcaaaacacacaagctatataaacaactacattaagtaccacaatgttcaccaaaatgatcacaaaaaggagttcatctcctccccaaattataatgctagaagaacactccaagcattatcacctcaaacaaattccagaataatttcaaaatacttgtcatcgtaaaatcaactgaatcccaaattaagatgaagtaattcagaaggaacccaaacccaatggaagtctcaacgacgcgtttcatatcaaaaatacaatttcatgctctttaaatcaacactgaacgcaagagaaaacatttttgtctctcaattgcaaaattaactgatccaataattgtatgaactgaaaaccctaacagtggagcactgatcgaagataaaacgatcatctatctaggtttcagccattaaagtatgcatcaaaaaacatccaaatacttaaaaaagcaaaattgatcagaataattaccagatttgaggcagccaatgctatcaacaacttggaaaatcggcaccgccaccgaaatccgaggggcacgatcgtaataaagaaacaattgagggtactttagcaatgagagatttgtgtctgtttgggagaagagaaaagaagaatatatatagaattttcttttgtcaaaagaagaagaaaaagaatttatagactttgat

SEQ ID NO: 37343 - DNA, 2934 bp, Cannabis sativa
  modified_base (1171)..(1174): a, c, t, g, unknown or other
  modified_base (2904)..(2908): a, c, t, g, unknown or other
ccgcaaaccgcgccgcaccgcgcgatttagaaaaaattcaaaccgcaaccgcaccacgaagaatttcaaaccgtatttttttggtggtgtggtacagtgcgggcggtttgaacggtttggacggtttgatgaacaccctagtagttactaggagcaataaagttgttttattattattatgaagattagacaccataaaagcatgatttgattgtttgggttttcaagtaattaaggcttattggtctcctttagtttggctaaacaactacaacaaacttcaactaattcactctcacacgcattattaattcttcttttattaaaaatagaaaataaacatgaacttttatacatatgtatagtaggataggaggagagatttattgttatcttgttacacctatgaatacgagacttttcattaattattattaaggatatttagccaatatactaattttttttaagggataattacgtaaattattattttttttacatttttacgtttaattttttttttttacatttttacagtaatctataaaaacaacacgataataacagaaaaattacataaatgtaacataaaaataaaatctaaataacatcaaaacaacaataaaaaataatatacaaataacaaaaatcaacaacaaactaataagagtacaacataaaaagattgtattttctgtaaataaaatcaaaaaaatcataaaaatatttactatgtattacttttgaaacagatgtaagctttattggttgaatctttatatatatattttttaatttacttgatatctcatttgagtgttgacatattatattgttatttgtgcaattaaattttaagtctcgcatataaattaatttaataaaatactactgttatccaataaaaatgctcatttaatttaataaataatgatatgtgtatatataaactacacacaaatacaacacacactcatgtgacaaaatcacttatatgtgagtcaaatgtgatttttgtgtgcacaaattattactctattattattattattatggcatgttagtttttcaatattttaaaaaatctataccttttggaaatatatttcaaatgtaattattttacaaatatataaaaatacgcatgtacagaattttaaatattttnnnnattttatttataaaaaatacggtcctttgatgtatttttatattatactcttgttattttgttgttgattttttattatcagtatgttttttttttttttttgttgttttaacattgtttggatgttattttcctattatttttatgtaatttttgtgttatttttataaaatactgtaaaagtataaaaaaacactttaaagataaaaatataattttttacaaaaaattatacttgatgtaattatccatattatgaaagggaaatttgattttttatgcttacatttggttaaaaaaaattccctaaacacataataactaatatttgtaagatatgacaacttttatgatatccttaaattaccccctatttacatcactcccatttacacaatcggaccccctcatcggaccccacatcggacccatccccatcggacccccatcagaccatatatcggacacatcagactccccatcggacctatgtctcctacctcgtaaactcacagtttcattcgaccctatcggaccttgcccataatcacaaatttgagattctaaaacctaaatctatctctaaatctaacaaaatctatctttaacactaaaattcacaaacaaaatcaataaaaaaataaaaaacggtggtggtgcgccgtgggtcgatgggggagcgccgtgggccggtggatctccttcatgcgtgtgtggctggcgtataggacgatttggggtttcggctggggttgggacggctgggttgggacgaacagagagaatagaaggaaggagagataatgagtgtgggattttgagagtggtagttttgggatttaggtcaagtgggcctattctaacaattacctatagtttaaatttttctagccaattaacgcttaaatcatgcataaaaaaatcaaatttctcttatgaaactctagatcatactcgttaaagacaagtttttattagtattattattattaacaaaattctccttccaatttatgttttttttttaatggaaaataactttatttagaagaacaatcactttaataatagacataaactcagtaagaatattcctcctactgaaacaacaatctagaaagaaacatgatgctctaaataaacaataagaagacattgcttaactcataaataagctttcgacaatcatcaacaactaaaccaaacaaagaaggcataaaaattcattccgaataacctgaactgcgagtacacagtctgtctcaagcacaacattcaaccatgcccgtcccttgatccacaatttatgttaatttatttttttcttacaaaaatcagtcttaatttttcctaaaaaaaactcatgtgaaatttttgtgttccacaattgagaattgtcctcaaatttagtaaaacaagacaaaatgtgtatattgattcttgaacttcctcttccatctaaaatttggtctttgaattgcccaattggaaagcaaagacttcgacgttgttagcccaaaaggccgtctcttgtattggcccaataagcactttaataatttttacaaaaataactaatgtatatatttttattaatttttgctgttttccccccaaagataaagtttttaaatatattttctaaaaaacttaaaacatataccaaaagtacacaattgtataaaatatggtaaaatagaaaaccgatatatatctttatatattaaaannnnntatctaacggcatttcttggtttaac

SEQ ID NO: 37344 - DNA, 4831 bp, Cannabis sativa
tttactcttctgcaatgtctcacagattcaacatggtatcagagcgggactttcctccattgacggcaaacatggcgacgatcggagctcaagttacgcagaacaacggaggtgctactcaaccagcaaaccgaatcggggataatccttctccaatctcattcaatcacactctctcgatacgtcttaatgaccacaacttcttgttgtggaaacaacaagtgctagctgcaattaaaggtaatcggcttcaaaaattcatctttgatccacctccagcccaatttctcagtgatcaagatcgtgccctagaaaatatcagtcaatcgtacagtgactgggaggtccaagaccagcttctagtctcatggctactttcctctatgaccgagagtctccttacaaggatggtgggttgcaacacagcacaacagatctggaacactcttgaaaagcactttgctcttcaagtttcttccaagattcttgagtttagaaccaagcttcaacaaatcaagaaagggagaatgtcattgaatgagtatcttcttaaagtgaaacagatggtggatcttcttgcatcagttggtgaaaggctcagtgctcgagatcatattgcagcgatattcaagggcttacctagtgaatatgacacctttgtcatctcttcaaacactaggattgaagagtactctgttgcagagattgaagctcttctcctctcatctgagtcaagaattgaaaagaaggacactgaaattgatctaagtgctcatatggctgttcaagaatcggatatgacagctttaatggaagctaatgtggcctacaggaactttagacagcaacaacaccctcgattcaatgggaatgcattcaataggagcagtctcagaccaaattaccaccaaaactcacctttggctccaccaccaggtttctctaatcacatacctcctaatagcaacttctatggtcgtggtaatatgccctttaatagaactggtagatcacctcctattccttctaataataagcaacagtgtcaactatgcttgaagatgggacacactgttcatacctgtttttacaggtttgacaagtcatttacaggtctagcaggacctaatcttactgcagaattgggatcatcttcaagtgctaatgctcaagcaaatttagccactgctgctcaaggatctgatgaaaattggtaccccgattccggagcaactaaccactgcacacccgatatgagcaatctcacaaattgcaccagttatgatggtctagaaaggatgtatgttggagacggatcaggtttgtctattactcatgttggtcaatctcgttttttgacagagcacactaataaacctcttgtcctaaataacttgctacatgttcctgaaattaccaaaaatttgttgagtgtttctaaatttgctttggataataatgtttatttccaatttcatcatgacatgtgctatgttaaggacgagttgagtcatcatacacttttgacggggaagcacaagaatggcctatatacttttgaccaatctcaaatcaacttcttacccgaagcttcacaagtgcctactgccaatgccaacctaaatcatacacttcaatgtaatactgtttgtagtcattgtaataaagacaaacttagtgattttgatgtttggcacaataggcttgggcatccctctgaaagaacagttgccaaagtcttgtccttgtgtaatctgcctttaatcaataaaaatgtctctttttgttctgcttgttgtcttggcaagatacataagtttccttttccaaaattctctcaaactgtctatagtgaacctcttcaacttgttgtagctgatttatggggaccctctcatgccttgtcctatagtggctatagctactacattagctttgtggatgcatattctcgtttcacttggatatacatgctcaaagctaaatcggatgccttaaaaatgttcttacagttcaaggccgaggctgagttgcaactttccaaaaagctcaaagttctccaaaccgattggggtggagaatttagatctttcacagcccctttacaacaaattggagtcattcatagacacccttgtccaacaacccaccaacaaaatggtctcattgagagaaaacatagacatattgttgagcatggtcttgccttgcttgctcaagcctccatgcccttaaaattttgggatgaggcttttcggactactgtctatctttacaacagacttccctcacctgtgcttcatgacaaatctcctttagaagttctgttcaatacaaagccagattacacaaccttgaggacttttggatgcacttgttatcccaatattaggccctataataagcataaacttcagttcaggtcctcaccttgcactttcctaggctatagcttgaatcataaaggttacaagtgtcttgactctacaggtagagtgtacatatctcgagatgttttgtttgatgaacactcatttcctcactccaaaatgattccctcctcatcaaacactactcaacctgttgtgtcatctagtgctgctattcccactgtcattaaacaaaataaatttcctcttgagattgatcaaaatgttgtgatagacactgatttacatgctgctacttgtaatactggtgctactaactgctatggcagaatttcctctactgttattgcaggtacagatcgggttaacactgaaatggcagctgagtcatctgattttcacactaacaacctcactgagaccggtccaactcaggtgcctacaccagacagcactgctgctgttgaatcaacttctccaatcctcacacctactgcttcagatcacaccagcatctctgctggtgctccagcagcagccacctttgcaccaccagcaatacctgttagcactaataacactcatccaatgaggactcggtctaaagctggtatacacaaaccaaaagcttttcttttatctcgattacctgtcaatattagagaagctttacttgatcctcaatggaatagtgctatgacagatgaaatacttgccttgataagaaacaagacttatactcttgttcttctcccccctggaaggactgcaataggttgtaaatgggtttacaaaatcaaagagaatgctgatggtagtgtgaacaagcttaaagcaagattggtggctaaagggtttcatcaacaaccaggttttgacttcactgaaactttcagtccagtggtcaaacccatcacaatccgaattgttctcactcttgctctctctcatggttggatcattaggcaacttgatgttaacaacgcctttctgaatggtgatttgcaagaggaggtttacatgttgcaacctcctggttttgaggttccaggctcagctcatttggtgtgccaattgcataaggctctctatggccttaaacaagctcctcgagcttggtttgacaagctacagcatagtcttctccatcttggttttgtttcgagcaagtcagatcattctctcttcattcaacatacatccacatctactcttctagtgttggtctatgttgatgacatcattgtcactggaagtgattctactgctgtttccaacttaataagctgtctcaacaaagagttttctcttaaagatcttggtcctctctcctatttcttaggaatcgaggtcactcactcttccacaggcatgcatctctcacaagcaaaatatgccaaagaccttcttacccgtgctgcaatggatggtgccaaatcagcctcaactccaatgactagtggattgaagttatcggcttatgagggggaaccagttgacaatgttcaacactatagatctattgttggagctttacaatacttgactataacaagacccgagttgtcctatagtgttaacaaagtttgccaatacatgcagaaccctttgacaactcactggaatgctgtgaagaggattctcaggtatataaagggcactcaacattttggtttatatctgcagaaacctacctctcttgatattgtcggtttctgtgatgctgattgggcttcggatcctgatgatagaaggtcaacatctggtcatactgtgttttttggagacaatcttgttgcttggtcttgcaagaagcaacacacagtgtctcggtcaagtacagaagccgaatatagaagcttggctaatctcactgctgagatctcatggattcactctctattttcagaattgaatattcatatgtcgaggcctcctgtggtttggtgtgacaaccttagcacggttctcttaaccttaaaccccgtcctacatgctaggacaaaacatatagagttggatctctattttgtaagagaaaaagtgcagcagggatttattgaagtgaagcatgtgccagcaatagatcagcttgctgatggattgaccaaggctatttcaagcacaaggtttgctgattttcgaaccaaactcaaaattgaagatgtatcaattctgagtttgagggacggtgttgagacagttaattgttagttaaaatggttgttagtctgttacaactgtttagcattcttgttgtgtattctgttgtattttcggtttgagccttgtgtcaatgtatccatatatatagtactgttttagtactatcagacctaatgaagtcattctttctcacttcaatctttttctattctttctcttttccttttctctgttattttctctgttcttcttttactcttctgcaatgtctcaca

SEQ ID NO: 37345 - DNA, 4738 bp, Cannabis sativa
  modified_base (57)..(63): a, c, t, g, unknown or other
ttgcttagcactcttatgaggtgcaatattactattaatacaatttaatatcaaatnnnnnnnattttaatttaataaaaattatagcaatctacaaagtaacttaaattgtaactattagagcaattcaaaccgtaaattttttaaaaaaattaaaaaacaatacataagattacttttttattttaatttaataaaaattataaataatcgctaaccaatcataatacgagataaaaaatgtcttttaacaaactagttctttttttcttaaaaaaatacacacacaaaagcaatcacatgccaaccaaagagtacaggttgcctctttcttgagacactcttcttcttcatctgagtcaccctagagagagagaaagaggagagagaaacctgagagagagagagatagacagagacagaacaagacatcgctgtctatgcttctgctgcatgccttctttcattacctctttctctctctcaaaaacccactcaaatcatcatcatcatcatcatcttcttcttctatacccatttcctcaaacgggtctttttcgctgttaaaggtacaatctttttttgtgggttttgagtaaaatgtactctgctattcattctctaccgttggatggtgttattggtagtggtggtggccatagccatagccatagccatggcgatttccaaggatctttagatggaacaaacttgcctggtgatgcttgtttggttctaacaaccgatccaaagccccggctccggtggacggcggagctccatgagagattcgttgatgctgtgacccagctcggtggacctgatagtacgtattgtttatttttatttttttttgtcttgaaaaataaaaatgtgttttttatttttgtttttgattatgtaattaatgatttaattggggttttaatgtgattcttaatgatgtttttggtttagtttgtgaaatgtttagtgtcataatgaggtttcattaatttccccaatcattattattattattattaataatataaaaatatatattttttcatttttgtgattaatttattttagctgaatttttggggttttaatgatttgacttgacagtgttcttattttttttttttttttaaaaaaaataattgaataaataatacattttaatgctattaaaatgtgttgactttaatttcctccattggttgcttatcactgttttgttttaatagcttctttgatgatgaaattgggtatttgttagagggttttgttagttaacctaatcaccattgctataaggcacgtgaaaaagtaacgtcgtcttgcgattggttagcaatattctataaaaattattatatgaaagagaatattaaaaatactggtgcctcacacttttttatgtgtcaatagcaaattgctattagtgtaattaaatatcatgttctatataatttaatgtaataaagtatcgatgaccaattgtaagataacacgtctagaaagtgttagacactactagtgactaataattatactctgtattaaattatatgagactcaatatttaattgtaccaataacgatataacatcttagaaagtgttaggaatcactgacgccttttaatatttctctaacatgattcatgttgttcataaaagcacatcaattaggagtttgtgcacttaggtgaatggatgagttaatttggatgaatggttttttttttttctatgatatattaaattattttaaatgaatgttcattgttaataatcttagttgtatgtctctaggtgttattacatggtgttctctccattctctatttttttcttttcaaaaggaacattttgattttgaagatgttggttttggataggaacaagaaggaatatgcacatatataaagacaatgattagtgtttttatgttttatgtttatgtttcacttttctaacttcactagttatgtaatgtaggacccattttaaaagctttgtttatatgctttctttcttaattgactaagtaaaaacatgaacagaaaataagtgaagaaggcatatattccatgtttattcctttcccatcattatcttcttcattatagattagtatccgccgtgccttagttcaccggcttcggattctacgactatgactatatactcttgtttgactgagcttctgctttagcttttagtttcttaggaagagcttcataagaaagctactaaagatattctgttaaaagagttttttagagctaaaagttgaaactcactgattattcaatgtaagtattttgggagcttcagaaaccgaaaagcaattttcaaaagcctagccaaccagggccactatcaacaacggttgcatgttgtcttggaaagaaataccatttagctttatagattccgaagctttttgttcattcttgatagaagacaagagacttcccttttaactcaaattccatagaacattagggtattttgtaatttgtgccttgaaattatctatagatagattcatattatgaacttttaacttttccatttccctccaacaatatgaattgtattcacactactttcctaaatgtacagaagatattctacaaagaatattgctattaggcacgagtggtgtctgaacctgatacttagttatatcaaaattggtttgatacttcgtagtggtgctgggcatcacttgtgtcattagcatttctcttctacaaatggttttaatggtagaaaatgctagaaagataaacttttcttataattttttttttttgatgaaaacaatgaatttcttaaatttatgttattgcaacatgtttgttttgtttgatcttattaattctttccattcttcttcctttgactgctgctgttgctttttattgggattttctctttcaaagaagcacgtcgaattcttcgatattttcacatttccaaagggaaaacatgcttttgaatttgatcaaaacacaaaagaagtctagacttgtctacaatgagaaactcacacattctttcaaaatttccatctttactgcaacttgttttgactcttaacaaatgactaatgagtactatagccttttcttatcgagtttcagtttttaagtctatcgttattcaaagctcctcatttcagttttgtttcgaaatctaatagctaaggactaaatgttatcaagtgctctatagtttgaatcatttgaaccatacgaaacgagaggtgtcgatcgagtacaaagaagtgagactgagactttgcatttcatgcaaacagtcttccaataaactctgttacaaatatcatttcttgttgaaccccgaactgtggtctccccgaacctcggtgtatttagtcacaaagttttcgtttgtatctaatggagaaatgtttcttatgtttctgctacatcttgtgtcttattatgaaccatctttgttgtaaattgcagaagcaacaccgaagacgattatgagaacaatgggagtgaaaggccttactctttaccacttaaaatcacatcttcaggtgagttcttcccatcatatctttgtcatggaaagaaatatgcaagaacataaaaattctttctttatatgatggaactgtaatttcagaaatatcgattgggaaagcaatcatgtaaggattccgttgacaactccaaggatggtaatagccctgaattttcgaaagaataatagttttctcgttcaaggctttgaaacgctaatcggttacagattaatgtgtagttggaattacagcttcctgcattgcagaaagtcaggacaccggttcatcttcaacatcgacttcgagagtcatagcacaagatgcaaacgagtatgttatgttgtgttcggttttactgatgatgctgatcatgttttcttgtttcgcatactaatgctgttcttttattcgtttaatcagcggttttcaggttaccgaggccttgcgagtacaaatggaagttcaaagaagacttcatgagcaattggaggttagtctctatgtttcactaatgattttcggataatatgttagttgcaattagcataaacatttggcttttttttctttcccaacttgattacttagataattttttcggaaaaatctgtttcggtatgtaggagttttttagtctaattttttcttcatgatcgcgtatgtggtagctttataggataacctgtaaattttagaaaaattcgaacaatttacagtgctgaaataaaaattcaaacattttcttactacaagtattaaaaaaaacagtcacgagtgtaacaaatatttgaaccttatttttggtactgtaaactattcagaaatttctgaaaatttacaaatagttctaaataaccttaatatacacgatcataagaaaaaatgaactaaaaaactcttttggataccgaaatagactgggaggagactacagaatacccggttttccctttccaactggaatttgctaaacctatatttcagtaacatttggctttccagaatcatgtccccctattaactttacaggtgcaacgccgtcttcaacttcgaatcgaagcacaaggaaaataccttcaatccatactcgagaaagcatgtaaagcattgagcgatcaagcttctgtctctgcgggcctagaggctgcaagggcagagctttccgaactagccattaaag

SEQ ID NO: 37346 - DNA, 5175 bp, Cannabis sativa
tgggatggaggactttggcaggaagggattgaaaaatggaaaaaattacaaaaacggttaatttttcataaaatttttacataaaatttttttatgtttatagattttttatttttttacatttttacagtattttataatatcacaagaaaaccacatgaaattaacagaaaacaacacaaaaaatgatatataaataacaaaaaatcaaccgcaaaataaagagtagaagataaaaatacatcaaaaaccgtattttctgtaattattttattatttttgtgtgtttaggaaattattccttgaaaaattgaaggaaagtatatataaaaggcaagtttttgcagctgctatgacaactgtatggaaatgaggctatttggaatttaaatgtatacacaataggagcaattgtaaagaaaatagaatatgatgtaaagcatagaaaagtctctaagtctaacatagatgttgattggtttgaaaagttgtaatatttgcaggctggttttgatataattctataagctggcctataacattcacttcaacttggaattcttcatcaatatcttgaaacattatgttgaaatcagaaatccgagcattgtagtactcatcaagaagaacattatgaggctttagtggatgatttatttctagcaattgaatcttatattataacagagctgagacatgaactcatttttgctgtaataattttttatgagatttttgtttactgggaaacacaggtgtaccattgcacaactcatatatgagttttttttttttcttggaaagactttggggtcaagctcaaatgagtttgtccatgcgtatcttattcatattttaatgaggtttgaagcttaatcttatccatatgtgtagtcaattgtggtggttgcatttttcttggtacagttagtaatatttattaatatgtagaaaaagtgctacctgtatatggaaaatgaattgcgaaagaaagaattccctttcattaattaattactattatcaaaaagcaaagatatttaaggcgaaaacagcagccatgattgaataccaacaacaccacttgggatagaaatgcttaaatgagtgatctgttttgttgttagttcatatcatatcatacaattcaattcaattctgttgtttacagagcaagatcatcatatggcagatgctgttgtttcattcgtgattgaaaggcttggagacttggtgatttccgaagctgaattcttgcatggaatcaaaggccaagtggggaaagcaaaaatcaagcttcaatgtatgagtgctttcttgaaagatacagatgcttgggttagaaatggtgctgatgagagagttcgccttttggttgtccaagtcagagaaaatgcttatgccttggaggatgttattgagacttatgtcttcaaagtggcttcctcttctaatcatggaactatgagacgtgcattgaaatggtgtgttggcattattgatgtgtataaagttggatcaaagataaagaagatctcatccagtattgatacttggacatcggaattagaaacacttggcgtacacagatcattaggcaatgcaattgaagcttcatcaagctatgtacagaagcaaaaagagttgaggaaagcttattcgtatgttgaagacaatgttattgttggattcgataaagatatccaaggtttggttgcccttttgactaagaaagaggaccctgataagcataaggtgatttctgtctatgggatgggtggtttggggaagactactcttgcaagaaaggtctatcagcatcctcaagtcaggactcactttgattgttatgcttgggcctcaatatctcagcaatgtaataggcgcgatgtcttggaaacaattttatctggtttcacttctcaaatagatgcagaaagaaatcgcatcaaaaacttaagtgatgatgaattagcaaggaaggttcacaactttcagaaacagaacaaatgtttggtggttcttgacgatatatggaccacaacaacatgggatcttctaaagcatgcattccctactcaaggagagacacatagcaggatcttactcactactcggaataaggttgtggctttgcatgtggatcaacacggtttcatccatgaacctcatttcctcaatgaagaggagagttgggagctgtttcagaacaagtactcccacattggaatgcatccatcaagtaatatactatacttcactcttattaacttaatcatcataatattaatttttacctttgttgatatcgatgttgtgtaaataacgcttaattatgtcagtccatataaaatattctaatattttatttccttcatattaatttactcctttcatccatagaaaaaatacatgtagcattagtgacaattcaatagtatgtaagagtataaataatgttccattacttaaatcataactcattttgtgcattttcaatggataaattcagactcaaatgaggatgatgatgaagaaaggaagaaagaactagcggtggagatgcttaaaaagtgctctggtttgccattagctatcattgtgcttgctgggcttctttctaagaaacacaccttatatcagtgggagctgatgaaagaaaatgtaattcgctgcataggtcaaggtaatccacaacatgatgatgactcaaaatattgtagtgtttcttcggtcttaggattaagttatagcgagttaccacgtcagttgaagccttgttttttgtatttggctcgttatgctgaagatgtcacgataagacaaagagttgtgccatatactcatagcagaaggttttgtatcgttaagaagaggttctgtggaagctttggaggatgtggcatatgattggttgagtgagttggtggagaggagtatgattcaagtaaaacaaatgagttcaacaggaaggattaaatcaatttgcattcatgatctcatgcgagatttgtgtgtgtctaaagctcaagaagaaaactttctacattttattgattggagaacgaatagagaggaagaaccaatagaaacaaatattagaagaattgccatatgtgttcatgaaagttctaattatgatttcattcatgaagctcgaaatatagatggctctcttaggtccctttctgtacatggtaaggggagagtcatagatgttatgtacagaaaaagagtattgagtcatgtatgcaatcgctttttgatgcttagagttttgatcatggatgagaatgatgctaggtatgaaactaaactgcctacagaaattgggaatttgatccatctaaggttattaagtattcctaattggcgaattgaaaagattccatcttcttttgggaatttaagatgcctacagactttgagagtatcgcctcagattgatataataataccaaattcattgtggaagttggaaaagttgaggcatctatatttctcaaatctagttggtggcatagaatttggtaaattcttgagatcaattaagtctagaaattttcagacattggtaggtgttcgtaccaaggatctttttttgagtgatattctacaacaggagagtctcaaaaaattacgaatttgtgtggatggaaattttgagacattcttacacaatccccaaactctcacattcactcgtcttttctctttacaagtatataatccatcttacatcaacataatagatattgttcctttcttactaacctgtcctcgtatttataagcttagagtgcggtcacctatagtaagattaccacaagacaaccgattctccccgaatctcatcaagttacagttgagtaatctccaacttaaggatgatccaatgccaacattagaaaagctaccaaaattaagagtccttagaattgactatgatagctttatgggagaagagatggtgtgctcaagaggaggtttccctcgacttgaatctcttcagcttactattttgaaaaatttaaaagagtggaaagtggaagagaatgcattgtgtagacttggctatttgcgaattggttgttgttgtagattgacaagtattccaaatggactaagaaacattagtacactcaatgagatggtcatagagaatatgcctaagaaattcaaagaaaggatggagcaaggaggagacgatttctacaaaatcaaccacgtgccatcacgtgtatttaccaattgtgatgaaggtacatatctaatcaatcatctatcttcttttcttaagttccattccatttttctctatgattaaatatttatttacttatttactatcaatgaatgcagattttgaggttggctatatatgaatttaagtgggagaatctgatatcaacatttggaggatgtgtttgccaattgccactgccaatcaccactatctgtttgttcatttggaataaaaatgtgtaatatttgggatgtgtttcaatatttttcccacatttacaatacatatcaatcattttcaaaatccattttgtaaaccatagaatgaacttctcttccattattcaattccatcaaaccaacacaagctttaagcacgatcgaaaaagagaatttattaccagtaatttgcaattcttgcatcaaagaaaaatacccaattgtttttaattagagttagtcccacactgctcatgtgtgtaaataaattgtgatatataagatgaatgaattactctttccagagtcaattgattttgagatggaatccatgattcttaacatgatatcaaagccacttgtgatccgttctgaacccaaagtgcgtccaaaaaaccgttttcttaacatttctttatatcttccattaaaagcaaaagcaaaaaccatccaattcaaagcaaaaacatttggcttaggaatttgatcaaacacatactttgcatatctccacaacttgcatacatacccacaagctttgaattcaaagacaacaaagccgtcttgtcatgaatctgcttgtctttcctttgaggcattttattagaaattgatacacatttctacaatactaaattaagtctagaattttctacacatttgtagaaaaacatactctaaacttttagataattgtagaataatttagaa

SEQ ID NO: 37347 - DNA, 4983 bp, Cannabis sativa
agagagagagagagagagatcggaggacttacagtgggcttccacttcgtgcaacaacgacaaagatggactccgagattgaaggagcagcaactgtctggtggagttgggctgctgatcgatgcccaagaagaggagcacgagcttagagagagaggctttaagtgcaataggcattgagtaaattaaggtttaagggcggtggagataatatataggtagggtttttttaaaatgggtcaaagccgtattttgtcttactaatcctatgtctaagtatgatggtcattacaattacccctcgttaaaaggattttatccctgaaatataacctagataaatctgaatattgagtcctcatgccagaatctaactcccaacttgcttcttccaccagagtatcttgaccaatactatggttttcttctgaagaactttatccttcctatcgaggatttgaacggaatattcctcataggataagtgtggtgataactagggctatgcataaatttttgtaaactgcccaactcgaacaacccgccaaaaccaaattgggataacccaacgaaaaataaatacaaaccaaactgaaaagaaaaacctgacctgacaaaaatataacctgcccaatctttatattgggtgggttgaaaataatatcaacctacccaatcaacccgaactaacccgactaacccgattaagagagtttttgtatatagatatgtgtttttattatatatatcatataattaatatgactatttaaaaaatataaagttcaaactattttttttatggtagttgatttgaactttaaattcaatttctatatatttatttcattattacaattagcacacaccccaaaccttgtctagatgcatcacagtagaccacaaagctttgtttatttgacgataaggctaacaccggtgctgtgattaatcacttcttcaggtcttgaaaactggcttcatacttatcagcccacacaatttgttgggtttttcagtcaattgtgttaatggcatggagattttagaaaatctctctacaaaatgacggtaatatccagctaaacaatatataaagcatctaacctcaaaaactatcttcaatctcgaataatctctaattgtttcaatctttcccagaccaaccacaatatcattttcaccaataatatgacctagaaaggacactagggataactaaaactcacacttcttaaacttagcatcaacttagtttctctaagtcattgtaagaccattcgaagatgttgctcatgttcttcttctaactgagagtatactaggatatcatcgatagacactatgatgcaattattgaggaaatccttgaatactctattcataaggtccataaaggctactgaagcattagtcaatccaaacaacatctctagaaacctataatgtctgtacctcatacaaaatacagacttctgaatgtcttcctcgtggattctcaattgatgatagcgtgagcaaagatcaatcttagaaaatgttgtcttcccttgaagctaatcaaacaagtcatcaattcctggtaaaccaatatctaacatcccttgaagttgaactttcaactccttaagttctattggagccattctatatggtgctttagaaacatgctttactcccgatatcaggtcaatagcaaaatttatttcccgctggggtggtaaactaggtaattcctcaagaaacacatctagaaactcttttaccactttcacatatgcagacccaactgttttaagtgtattggaatttatcaccattgctatataacctatacacccatattgtaataagctctagctctcaatatagatataattagaattcgagagtcctagacttctcccacaaatacaaatggctcctcagccactagctgaaaggtcaccatctttctcatgattttaatactagctgcatacttagatataaaatccatccctaaaatgatatcaaagtctggtatggataactcaataaggccagtatttaactccctatcgtccactataattggtacaaccctaatacacctcttggagataactaactccccactaggcaaaaaagttctaaatcctaattcataactataacagggcctacccaatttatcaattactcttgatgccacatatgagtgtacagctctagagtcaaataatatagtataataagagttattaatataaagctggcctatgaaaactgatggactagccatggcatctgcctgtgtgatggaaaacacctgagcatacgtggatatgaactccttctttggttcttgttagattctcctaggtgatatttcttacaacgagggcattttgggtacgtaaattcaccctgaggaccaccaatccgacctaggttcctacaaaacctcttattttgtctagaacttctcagtgtgaaaggagtcttatttttcaaaaaaaaaaaaaaacctgaatcaccactactcctacacaaactagaaggaggagtagtgactccactagaaccttgaatcccttggggctcatgcaaaatctatactgcatcttcggctcgaagagccttctttacaatcagtgcatatgtggctacatcatcagtcataattttctgatcatgacagatcttagcattaagcccaccagggtacttttccttcttagtttaatctataggtactatacctgaggctaatttttcaagccgttcaaacctagtcatatactctgtcactaacattgattcttcttgaaccatttgtgtaaactctttgtggtttgcactacggacatcctcattattatattttgagaaatagatcttggaattcatcataggtcataccatcaacatcttgtgtgagcaatattaactcccaccataccagagcatcttcctagaaatgaaatgtgacataagccactctatcgctgccagtgactcccataaaatttagtatctgcctcatagtggttatccattgctcgacattcataacatcagggtctcccaaaaagatcgaaggtcatgtctttggaaacgcttttatagtggtaccaacctcttactataggatatttcattggcaacactattagtggagcaataccaatctgaggaaaaggagcaacctaagggccttgctacctcagcctaacaatctcctcatggtgttgttgtaatttggcctacaactcagcaagcctttgctccaactcttgtggagcttgtaatatattaatattacccacaccacgagcccatccataacctctacctcgaccttggggatgagggggaacctaatggcgttgaccgccaccaatttcgaccatattaccctgacttcgtacattatgttgggtatccatatgatactagcatgcaaactcataagttagtttaattaggcagtggttaccataataaacttaagactgcatacatgggatcttagacacgcacataatcaatcaatatatcattaacatatttctatcatgcttttctaatcataataatctagtaaaatatgtaaggtttactgaaccgtgagtcgagcttatctcagatgatgattgtacatatcttgacggtcttcggtagacaacctagcagctatgataccaaaatcataacaccctactagaccactgctcataaccctacccaatacataagcctaataaggaagctaatatagctcacaatcacttggccaaacatctcattttttgtcaacaaactaagccaatacctccaagctccatgagttccacatctcacagaagctaactgcatcctccaatacttgaaaggcactccaatttaagggctaattttctatgcaaaaactcccgaaccacttcacctccgagcctttgctgacgcagattggggagcttgcttggacacaagatgttcaatctcaagctattgcatttatcttagacaatctctaatctcttggaagttccaaaaatagcaaagagtatctcgatctttaacagaagcagagtatcgagcaatggccaataccacatgtcaactcacttggcttcactccatgcttcgtgacttcaacttcaacattagacttccctcaaccctattttgtgacaatagtattacaatctacatattagaaatctagtgtaccacgaatacaaagtatgttaaaatcgattatcaccactttcgagagaaaatcaacaatggttccatcagacaaattatattccctacaaatccaacatagttgatattctcacaaaacccttttttcctactcactttcacgagcgagtctccaagatgagtgtaaatttttttacaatactccatcttgagggagcctattaaaagttattatgttagctatgtcacttatattaagttagagtgagttagttagtcaattacatactttactcacttcatttcctttatataaggtctggttcctcgccattctacaattcaattaattcataagaataaaattacgttttctctgttcaatacaactaatattaatatacactttttaattacattgttgcagttaactatcttttaaaaatttaatgtatggatggtcatttaatgctattttattttttgttttgatttgcgtcttaaaatgttgctaagaaagaatctttcgtgtataatcttgcataatcttaaatgttatcagtttcgatacgtagatcaaaataatacaatacaagcaaaagttttcagattcataaagatatagaacaccatataaattatcatacctgcatattcactatttttacattggagcacagtaataaatgttgtaacaaatatagcattagctcatgttttactaaatttgatatacaccatgcattaagtaaacgattttagtgaaccattcaaatcttgtatttt

SEQ ID NO: 37348 - DNA, 5893 bp, Cannabis sativa
  modified_base (5854)..(5854): a, c, t, g, unknown or other
ataattaatcaagattaactgctaatttccaaattaaactaagcgggctttacagtggacatgccacgtcatgtgggcaaaaattgggataaaatttgcccccaaagtccctgtgcgagcgtctatatggataggaactttccaactttatttttgacttttggagccttaaccgggtaggtattatagcaactttagttatgaaatattttttcttctttggccgctcacgttccccaatagggaactgataatattctacatggttatttttgctggctgcatagttatttactgtatgttcaatgagaggggcccaccagaaactatataaggttacttggtgaaacatattctcattccacactttatattatctctcttcaaaaaaataaaaaaagaggagctcttcacttcccctgtgaggctgacgcacccaagtcctctgaaacccaggattctcgctttgtttcgatgatccaagcttcccacgggcttccttgaaggttttctctagtgggtaagctttcaaatcccgttctctacttgttttcttggatttttgattgttgtgtttaagcttttccatgctttatacattcttgattctcacattcgattgtagtatttttggtattttgatctgcatgatagttttaggatgcataatgcttgatttcttaatgaaaaagatttgattttgacctacattatgattcttgactctttgagtcacgaaaaacacgtttgagtgtaaaaaaaatgtgcactttgatctaaagcacaccttgaccagccctaggggtcttgttcaagacctagcaagctctaggattttgtcatggggcatatccatttttagggcttaccctaggaagctggccgattcatgcttgggtcttatgaccttagtcgattcttgtatgggtcatgggaccctggcatactctttcaatcctttaggacaccggctgacctagggctttagtcctaagcgggtggccagttttctatcctcattggaccaagcaagaaccttgtcatggctttgtgaacctgtataacctttttctcatacgtggttcccttagaaactttatatgatgctttatggtgagtctattattgccgaatgctcaacttaagactcaatatttgtccaagttgttacacttgaaactgtacttcgctgatacccaaacttgtacgatgaaattatctaccaagtacccttgcgtatagttgagtagagtcttgtctaaaccttgtcgctttgttaggtttctcaccttcccttgtcttttgtgtgcagatgatcgtgattgactattggggaggtgaaaaccgtattgacgaatatttacttggtcttctattcgaggactagtatccagttaattcctctagcagctccttgagagatctcgaggttagtggtggttcttcagaaactaaggtccaacatcatcgttatttggagcgaataggcagtgagattcacaaccagttcattaaggagttaagcctcgggtggaggcaattttttacttgttccttgacgtacatcgtttaggacggtatgcctgatactttgcttattcgtagggcaatttctttatcgaaagatcttcttgccgtaaagagcgctgttactgtggctaggcacttgaggtccattatggcaaggaccaagcaaacgtgccatagggcaccaccttatgaccctaacatcgctatgctagagaatagatggagagtaggcattgctaggaggttgcataacctcagtatgatggagagccaggtgctagccagactgaggccttgtatacttactggtagtattttctcaaatgttccccattccaataccttagtaatagaacgagttccatgttttcatcatactgtcccagcgtgtatgctccagagtttgtgacttcaatcacttggtatggtccttcccagttaggtccgagcacaccagccgcactgtcttttgtgttcaggaatactcttctaaggaccatatctcccacaaataattttcttgccctcactttcttgttgaagtaccaagccaccttttgctgatgagatactagctttaggtttgctaaggtttgtttttcttcaatctcgttaagtgattctgtcaggagggtgtgattggtttcttgattgtaggtttatctcttgtgggatggatgttttaactctacgggtagcattgcttcataaccataagtcatagcaaatggtgtttgcacggttgctattttctctattgttcgatatgaccacaatacttctagtatttcctttggccaattccctttaacttcttcaagccactttttcatggtgtctttgagtgtcttattgactacctcgacctgaccatttgtttgagggtgtgccactgcggagaaacttttttgattccatgtgtctcacagaaatctgtgaacatctggctatcaaactgttttccattgtccgaaataatcttgtgcggaagtccaaaccgacatattatgttttttaccacaaagtccaacacttttttagatgtgattattactaaaggcccgacctctatccattttctgaaataatccactgcgactacaacatattgtacttcacccttgcccttggtcaattgtctgatcagatctattccccatatggaaaaaggccaaggactttgcatctgtattagctcattaggtggtgcacgggggatctttgaaaatctctagcatttgtcatatttcttcacgtaggcctttgaatcttccattatgaccggcccgaaatatccttgcattaatattttctttaatagactttgtcccactacgtggtcaccacaaaatccatcatgtacttcggacaggagtcgtacagcctcttcttttgtcacacatctaagtaatggcataaaaaaacctcttctatacatcacaccttcaactatgatataccgtgtagcttttctcatcatcttccgagctttgttcctatcatttggaagttctccaatgttgagataagttgttatgggtgtcatccagtttggtgctatgtctataatttcaacttctttcgtacaattgatgctgggttcttctaagaattgggtcaggactaaattggccttgtctattactgtgctactcacaagccgtgctagagcttcaccagtagcattttcctctcttggaatctgcttgaggttataacctttaaattgtgcgagcaggtcttgcatcttgcttagataggccaccattttctctttccgggtcgcgtactcacccgagccatgatttactacaaattgtgaatcactacaaacctcaatgtacttggcgtgtgcctcctgagcaagttttagtctagctatgagtgcttcatactctgcttcgttgttggaggccttgaacccaaatttgatcgcttagtgaaggtgttgcccctaggtgtgacgagggaaattcctacccagaaagctggtctgtagctgatccatccacatgtaatttccaagtaggtctgtcttcattcttttttgataggtgttcttgtactggccctgggttgtcccttgtgctattttcttctttgcctgtgcactcaactacaaagtctgtcaaggcctgtcctttgattgttttacagggttgaaatattatttcgtactgacccaactctattacccatttaagtaatcgcccagaggcatcaggcttttgtaatacttggcacaatggttggtcggtgtatacccgaatagggtgagcttggaaatagggccttaacttccttgttgctaagattaggcaataagtgagtttttctatcaaaggatattgaccttcagcttcaacgagttgttttctgatatagtagactggatgttggatgttattttcttctcttatcagcatggcacttatagcgtattcggttacagccaagtatattcctagttcttctccgtccaggggttttgagagtacgggaggtttttcaagttttctttttaattcttggaaagcattctcacattcctccttcaattcaaaatttttattacctcggaggatgttgaagaaaggaacacacttgtctattgatcttgaaacgaatctgttgagggtggtagtctgaccagttaagccctagacttcctttatttttgttggcaatttcatatccaggagggcttgtattttctctggattaccttctattccccaagcattgacaataaacccaagaaacttacccgtgctggcccgaaaggagcactttaagggattgagtttcatgttttatttttggaggattttgaagcattcatgcagatcctttatatgccccctagccttcatgtatttgacgagcatatcatccacatgtacttccatatttcgttcgatctggtttttaaacattttgttcgctagtctctggtacgtagctctagcattttttagaccaaacgacattactttataacagtacagacccatatctgttcgaaaacttgtatgttcttggtccggtggatgcattctgatttcattataccccaaataggcacctatgaatctcaagatttcatgtccggctgttgcatccacgggctgatcaattcttggaagtggaaaatagtccttgggacatgccttattgaggtcggtaaaatcaatacacactcgccattttttatttggcttgggcactagtatggggttagccacccaagccgagtagaaagcttcaaggatgaacttgttcgcgagtagtctctctacctcttcttttactgcttgcgcccgctctttgtctagtagtcttctcttttgttggacgggacaaaagactgggtcaataataagggcgttagacatcacaatggggtcaataccgaccatatcctcatgtgaccaggcaaaaatgtccaagtttgctctcaaaaattttattaaagctaattttattttgagcaacaaacccttaccgattttgagtttcctggccgagatatttgggtcgatttccacctcttctagctcttctattggcccaatatttgtgtttgcttccccaagtcagggatccatgtcttcgtccccgccttgggcaacttcctattgggtaatgctttttcccttacctgaactctagtcggtggtattttccttcttgaccttagttagagcaatgttgtagcattcccgtgcaattctctggtttcttttgagacatcccactcaatttttgttgggaacttgacgcacaaatgtaaaactgatgtaacagcttttaagtcatatagagccagttggcctaacatgacattaaaggttgaagggacatcaattatcaggaattgtgacattacagttatgctcctcggaccttgtccaacagtgaaaggtaggcaaatttgtcccagaggtgctacgctttggccagagaaactgtatacgagttgggtgcaggatatcaagtctctaagttggagccccatcttctcataagttatcttaaacagtatgtttaaagatgctccgttgtctatcatcgtctgtgccactgtcttatttgcgatttgtacttctacgaccaggggttcgttgtgtgggaagaggacatggttggcatctacttcagtgaatattattgttggctcccttacccgtggtatttttggttttctctcttccacggctaagactatttcattttgctcataccgcaaggctcgggcatacttttctcgagcttttcctaaatctccagcaagatgtggatgttgagttttatgccctaaatnaaactcatttcaatataatcggatttacttattaatata

SEQ ID NO: 37349 - DNA, 3562 bp, Cannabis sativa
aacaatctcaatagttcagggagcattttcaatggcattaaaagttcagggggcatgatttggtacatgtcaaagttcaggggacaaaaatcctaattagccaataaataatttaacataaacctaatagaatgactataaaaaaagtgatggaagatacaaaatcctaatggttcactctttttttcctctttcttttgctatttttgaaattgactattcaccatagaattttgaaattcaagctctctttcttatagattttaggcaccatatttgtaacgccctaacaattacgcacgctacgacaactagtaatataacctaatcccgctaaacctggactactagaaaaataagagcgggaaattttaaactttgattacaatggaataaaaacataacttgtaataatttaaaccttacaaacaatccaataaaagaaaacatgttcgaactaaaccatatgtgctttactgatgatgtgttgatgttttgtcatagggatttcaaatccatctactacatgttacaagggcttaagttgttttctcaaacatctggattatggcaaaatgagagcaaatctcccatatattgcagtggcatggaagacgttgaattgtaacgaattatagatgtcactggtttttcaagaagctccttaccctttaggtacttaggagttcttatatgtgctcagaaactgtcctatgtagaaagtgatgggctcattgacaaaatggtgcaaagaattcacatttggagttctaagaatctgtcctttgttggttgggctactctaataaattaagttcttatggccatccattcctattggggacaaattatgatccttcctaagaaaggtttatacaaagttaactcaatttgtaggacttttttgtggaagggagctgttgattttaattgaacaggatatgtatcttgggaggatgtgtgttaacctcgaaaaactggtggcttaggcttcaggaatgtggtaacttggaacaaagctgcacttgaaaaatatgtttgggttgttgctagtaagcaagataatttgtgggtcaaatagatccataatgtttacttgagataggcttattggtgggagtataatgcacccacaaatagcagctggtattggaggcaaattgtaaagataaagaatcaaattaaaggtatggctaacctccaatcttttataactacaaagtataacatacagcatggattgaacttgtttttttgtctcaagagaacgaattcactggaatgatatggtttggagtcagctaagtaagccgaaacatagatttatcatatggttggccattcttggaagattgcaggtgaaatcgagactttttagatataaaatatgtaaagatgacatatgcttattatgtggagatgacatagaaattgtcacccacttattctttgaatgtcatctcagccaataatgtttgacagtaataaagatgtggttggggtggacaatagatagtattctactgacgaatttgataaaaagaatacgtcgagataaattgagcaagttttagaaaaatgtgatagcttcgacaatggcaggaactatatacaatatttggtggaatagaaatgattctttttggaaccaaagagtacaaactatagatacaattgtaaaagaaaataaaactaatgttaaatatagagtcatagcaacaatgcctaagaagataaggcaagaggatatatattggtttgaaaagttgtaaacagtttttccttgttaaatagttgtatttgcaggccttaaaaatgtgttgttagattgtaaatggaagttgaagtaatgcattacaagctaagctgatttatcaaaaaaaatcaccacaattattaaaagataataatactataaaatcagtaaaactcaaataatgtctcacaagattatagtccatattatgattatcttagtagatcaagaaataatcttctacattattgaattgttgtatcacattttaaatttttaaattttattttcagcgtattaaatttttttggatttgtcaaagtttttaggatatcttaaataactataatatatacgactatgaaaaaaatagactaaaaatgtcttttgaataccgaaataggtaggagtacatcagtacaccacttttaaagatgtgcattgaaaatttatttttttaccataaaaataatttatgttattcatatttaaatttatggtattaatatttaaatttacacacaataaattaaaaggtacttttacaatgcactctctaaataaaagagttacgcgtgcaataaatagtttaaactttatttttggcgtattaaatttatttaaatttttcaaaattttgctataatgtacactactatgaaaaacataaactaaaaaaaatcttttagatgccacaacaggtaggagtacattaatgcatcacttttaaagaggtccatcataattttataaatacaattaataatataaatatatataaatattaattaaatatatatctaaaaagtatgttgtgtgtatagtatatagcatatatgccatgtactatagcatacacaacaatttaatagggaaatttacatcatacataactttttccaatttattacatatatactatcaagtggtattttttttctttttcactatgtatattttttgattttatacagcagtatactgccttttttgtacaaagttttttttattttttttttgactgattgggacgtgggctgttacaaaagtgataagttcttaatttttttttattattttaatagatttaagaattattatttattatttttaatatttaataattattacattatcttttgatttaaatattgatggggacgtgtgctgtcacaaaagtgacatattttttctttttttttttatgatttaaatagatttaaaaattattctgtattatttttaatatttaataattattacataaatctgacccctcatgttctactattcattttcttcttctagtatttttttaagcacttattgtgaagtgtgtggtttctattttttttttcaaatttgtgcagtttttttatttttcatcttaaacttccctatacatttcccacatttttttgttagaattcttctataaatattgttttttctcattaacaatggttcttacctgatcttcctcccctgttgccaaaaagtccccaaaacaatcccagaaaaataaaacacgagcatcaatggacaagaagagtttgaaagataatcctcctagccatacttccccagttcctgctaaaagaaatctaggtgatggtacttcgaagagcactaaatcaaaataccctcaatctgtgttggagaactccaactctgattttgagttggagctagaattccaaaaacttccaaatctgataagggtttttttctattgatcttgtgttgttttatggtttttttcaagttgattatatttcccatttctcttttccttttttttttttt

SEQ ID NO: 37350 - DNA, 1674 bp, Cannabis sativa
aagtggtggtggtgatgctggtgatggtagtggtagttagtgacaggaataccgaaaaccacaagtcattgtcctttgcaataagcaacttataggttcaagaatcagaattaataacaatggataatggcaaaatggcaaagataagatgggccataagatgagaaagttgtccaaaagaagaagtaatttactcatcttttcactcataaagagttaatgaacggacaaatttgattgttttctttttggctattaacggcttaatttgggtaaatgggccctggaaagagatatggcccaactcctgcctgtcactaatcatctttctgttaaatccaatgggccatgacttgttcactagaaaactcttcttcttttcatcattttcttccttgtttgagagctaagaagatttagcagtgaaagaagtaatgggggctccatgcccttatattgaaccaattatatttaagaatgagtaactacaccatgtgcatgagggcttgcttcaattcttcactattatgttactagttgatgatttcatgaagcaagcttgtttttaagggagttcaacaactatcataattatgttttttcatcactccttatgcttttacgtgaatagtgttacactcaccaataataatatttggtcattgcaatatcaaactcttttcaagagtagttacacatcttattggaccaagaaagattatgaaaaatcataccaaatccaaaccaaaacaatatcacttttcaattattattttatgtggtgcacaaatgcaccaacaagaactcaagatgattcgagaataataaaacttaattaacaatggcagtaataataatgctacacaaacttatcaaggttcaatcacaattttttggttaaaatatttggacctaattcccaggtaaaaacaactctaattgggactctaacaaatctaaattacaaacttgaatcaagtacacaataacacacaactagtgttgtcgtaatacttttactgaaaataaaagagaaacgatattaccgaaagaaatttttaggttgagtcgcggactaagtcgctctctttaagaagttcgtgagcattagccaagtttgtccaagaagtcagaattttcattcgtctctagaataaaacaacccaatcgtcgtacactatatcggaacaccactgcactacaacaaatcgtcaaatacactctctttatatgatattgtagagggagtttttagagaaaattgtattttgtttttttcaatatgaaaaagatataatttttccatctgttcaatcgcattatatagataaatggattgaaaaaataaaacgagaagaataacattttctaaatcgtggagttattgtttgaacgtgtcacataaaactgatacgactaagtattcagttctaattaaacacatttttcaaataaataaaataataattattttattaaataaattttctataaaaaaaataaagtgtcacaccacaccaatcagctacctcagctcgaatcgatcggatggacaacgcgagcgcattggatcaagtgtctgtcttcacccatttgcacaaaattgggtaccccttgaggccctatccctagtgtcataattgcatcttgtatacccttgtaaataagggctca

SEQ ID NO: 37351 - DNA, 3531 bp, Cannabis sativa
taaaaagaaccacaaaaaacatcaacaaccttacagttggattccactatgacctttgaaaaaccttattgtttgatctagctgagtgcttcttttatcgccactgctttagccctggccaagcagcaacttcgaacaagaatgtagcacaacgctttcatggtcacaggttggccatccaactctaaagtgatcatttttactaatgacaggtgtatctacattgactttaatcgtatcaatatttggtcaacccaatgctctaaactaacacaagaagaactagactcaattgcattagtatttatttgttgagcatccttccattgattaaagtaagcaatggtaacaaaaacaacataattagttgcaaaaattttactttgccacactgaactatttcgagcacatcacaaagacaaaaaaaaaaaaaatcatagcaacttggcacactttagctttggagaaatcagttataacactctaaaactagcaaaagaaatctcgtttttaaagactcacaactgtagcatcaaactgttgccagcaagctctcgccaaaggacaatccaccaacatgtggagaatagattcattctccccatgaaacaccatacaaagttaaagtgggcaaacaaccagtacaagccctatatagtaaaattttaacttttagaggtattttggaatttcataaattcctccaaaaatcaagattattttggtcattccaatgtccatgcatagcttgaagaaacttgtaagaacttttaacactttatatacctgaggcctctttgaaccaataccagtgatctaacctaacaccatcatttaacacaatattcttgatgagttggcgatcattaacatgaaacaaaccatcaataatatcatcgtcccaaacatgaacacccgtgaccatctacagccagcttctaacaatgattgtgattctaagatacttttccaaataaaatttgttaggtttcttacttatcgattgtctcataaagtaatgataattatatttggttgcctcatatggtgaaagattgtctcattaggcaacatattgaaggttgcctcattaggtaacgagaattgatggttactttattaagtaacaatatacgtttatattactaatcaaaatgattattactgttgcatgttttgatattttcttcaataaatgggatggcttattgtttctgatttagaatatgtgattatcagattctgattatctgagtttagttgatgatatctgtgtaatattttgagatgtgttattgcttttattgtttagtcattgtgactcgcgagtgttatgtagtgcaggtaagggttaggtaacatttggtcagccatgcgtcagggatcttctccaacaaatgtacatatcattttatccggcaagtagagctgaattatcaagatttatgttttacgatgttgtggattttaatctatattttattgaaataatgtaatgacatcttttgtaatattttaaaaggggatctccgatcttaaaagtgttatgccaataatctttttatttcaaattagttaacaagattttaattaaatcataattttacataaactattagtttattattataaactaatttataaaagcactcacgtgtcgtccttatgagttagggtattacaacatggtattagagcaatcacaattttagaggtcctgaagactgactggatatgtatatttattgtgaagacaagctcgactcatggtatagtaaatattatttacctacctatatattatgtgattaaatctttatatggtatggttagaaatatgtttagaaaatcataagttaagtttgtcagtagtatactatgattttatactaattgaatatcatggtagaaaatatgtgtttaattgctaagtaaagtatagaagaaatgcttattagcgttgttatttctcaagaattctaattgatacgagttgatgattggtgaagtattgaacaatatgtttaaggtgatctaagagatttaataggatgcttgacggctcaagaatgatcgaagagatggtaattcatcaccacccaagactatggagcgatgtacgctattacataacagattatttggaaaggtgagccgataagagaactaggtgtagtaggtttgatgataaatttatttcttagacatgtctggttgtgccgcaaaatgagaaaaactgtttagagtcgttgtatgagcggttaaaaaaaaatagaactttcgttcaaagagtggaggagcacaaaacatgagatgtgattataatggctaatcaacatgtgagttaatagacgtatactcaagaggttaagctaggtattactattgatatggactgggtattagctataaaggaaagatcccttgaagttttcactcattatcaaattgagtaggggttatcaccctaatgattaacagaggaaatttagttgtccctctagatatgagtcttaactagaagtactaggataatgaagttttcgttgaaacggtaatgagataaatacaattagtggactttataaaatgaaaacaactataaacgagtttgtgtcagttcaggaacctgaattctttacattataatataagctaatacgaactattactttacattatattaatatttacaaaagacccgaactggacccaagacccgaacccgggaccggacccgagacctggatgccgaacctcgaatccaaacccaaatcccaaacctggaccccaaatcccaaatccgaacccaaactctggacttggacccagaccctgtagtcagtattgggattgaattattaaaaatatattataattttacataatccattaatacaagtcaataccaaacatactaaacatactaaacaaagcccttaagtcactaactactttaacttgccaaaaaaatataaatcacaatcatttttaacaaaaaaaaaaatcatatgttaaaacgataaagctttttttctctttgtttgagggcagaataccggtaaagctttacttagggttgagcatcagttggtttggtcggttttatttatataaaaatctaaaattcgattttcggtctggattggtgcaatttaaaaaccaaccgaccaatcgagaacctatcttaaaactgaccgtttcgaacctcgatttgcttggtttaaatcgccaaactgaacttctttttttctttgaaatatgatccaatttattctataaacacattatactacattttacaactaaaaacatacaaattaattgttcaaaaactaattatcttattcttttaactttaataataatataattataatatactattaataacttcaatacataaaacaaaaaaaacataatagattaatatatatcagggccggctctagggtaaggcagactaggcctgcgcctaaggcccactcctagtaggaacccaatagaaaaaagcttttaatgaatatatat

SEQ ID NO: 37352 - DNA, 3859 bp, Cannabis sativa
aatgaagacctaatgtaaaaatactttttttaagagatgtaaaaatgcctttttaaaaatataaattttgtttgaagagaaagtattgttttttttttttctgaaaaaaaaagaaagtattgtttgaaccattttgtatataaaaagtaaaaaataaaagagtataatttgaatcttatgtgtctgctatttaataaatttttgttaaaaaatagatctttcaattttttttttttttttttgaaatgttagatctttaaattttattgcttcaaatttaattaagtgagcttttatttaatggtattaaacttctttaatatcaaataatattatttgtaatcatcattcatttatataattactttcttcataaaaaattaaatgaaatgaattaaataatattataaataaaaaataggagtaaatagtaaatactattttaaattttatattttgtaaaaattatagagtggatcatctattttattaaatgaataaatagattttgtattttttagaattgtacaaattaaactttgaattaatttttaatcaaaataaaaattaataataattcgacctaaaggtgttatgataaaactgtagttaaattttcacatctattcatgttagaaattatcagtttgttacattaaaaaaaattatcaaaaattaaaaagattttgtaataattttaaaaatacaaattttattttattatttaacaaaataaaaaatttaattactaatttttacaaaatacaagtagtaaaatatacaattattgtgttgaaagaaagaaaaaaaaaaacacagccctaaaacctaatcaatgaattttaactaaaacaatatataagaaaatataatctccagctaaaattagattaaaatattattttcttgaaattcaatcatgataacttctcttccaaatctctaataggacactacataaattaataatttttctactcaaccaaacaagatatatgatatgataaagcaaggtctgtctccatctctctcaatttctataatctttccttaaaattaccatcctatcctttttgatagctgtctggctccccgagcgattagctcttcaaaatttgtactcccaaatcttttggacaatattccatgtcgcaagtggcaaaacgccattaattttaaatattatttaaaaaataaaaaacaaaattacacaaatcccaaggccttcaccacgtgtcgtctcctcgtaccatctccgcgttagttctggaatccagctctccgatatgtatgagagagtcgccgcttttcgaggttgggacacgtgtcgtaattttaatgatacacgttagtttagtgacacgtgtgcttttgaaacctaatctcatgactgactggctttcgtgtctcgcataaatccaaaccgatgaggacacttgtttggtggttttctcgagatccgttttagtttttagacgcgtggccgtacggactcttcatatgacatccacgtgttctatttatacacgttccggtttttgaacgattagggttagtttggtaatttcactgttttctaaggtgaaagggccaaaaagctaactacgacgaagacgaagattttcatagctttttcttctctcgttaggactttttctttttctttctctcattcgttcagtttcgtttctttcctttttcctttgtcgtttttatttttctgggaaagtttctgccgagaaagtgcgtgaaaatgtaggatttttttgttttttttttttttttttgtttttactttttactttacctttggcgtaaaaaagatgctaattagattgattttcaatgaacgatttgggacaaacgagttcctgttttcgccctgttgttcttgggttctgaataatctgattcccgagacttgtatttttgtcccttttcattttcccgggaaaatttgttccaactacacttcctcgtgaaaaactcatatccgggtttctttgaatttagttctccagtgtcttttcaatggcgcaaatagaagagggtcaaaacatagcaagtcagcaacaacagtacgtttccattccaatgagcaatttttcaacagatctattacagagactcgtttcaaagaatcatttttcggaagaatcccaagacccaaataaggattcagacgagattgagctaagccttgggctttcattaaacggtcgatttggggttgacccaaaagccataaacaagctctcactcaagcgctcctcttctatatcggatttcacaccaaagcctgccggagtagacggcacgcaccggcaagtgacgccgccggtgggttgtccggccccgcttatgaggacttgctctcttccgatggagacagaagaagagtggcgtaagaggaaggagttgcagatgttgaggaggatggaagcaaaaagaaagcgttctgaaaagcagagaatttataaggcaacgagagatcggagccgaccaacgacggaggagaatggcagtgaggaagataggaaaggcgtaaatagggtaactcaaaaccaagaacagagcttgaagaatgaggatgagttatcatcatccatggcgattccagcttgggttggtagaggcaaaactagtggtgataacatcaatggcgttgttgtcaatggagacttggatgggcctaagcttccagttcaaccatcatttcaagggtcaggtggttctcacgggagtggttcttcagggattagtgaatcaactagtctctctggtcaaggtaatccaatcttcaaatcacaatgaacaaactttaattttgatttagttcataaatgttttcaatacattaacaacaagttatataccacaggaggaaagaacaaatgcccagaagttgtgagctctgctgctgctactgctgtgcagcccctcccggagaaggagcagaaaccccctccggtagcggctgcagcggcaatccctcggccaaagccaagtagtcaatccagtaataataatggaggtaaagaaatggggaggaatgtaatggaggatatgccttgtgtgtctacaacaggggttggacccaatgggaaaagaatagaggggtttctatatagatatagcaaaggtgaggaagtgagaattgtgtgtgtttgccatgggagctttttgtcaccagctgagtttgttaaacatgctggtggtggtggtgatactgatcaacctctaaagcatatagttgttaatcctacttcctttttgtagcacaagttttcattgttcaatttaaacactaattatcattattattattaattttttttttatggatgaactgagcaagcaagcattgaatattcaaacttaaatttgtaaaacataaaatgaaatgaaaagccacattgttttctcagatgcaaaaccaaagctgtatgtgtgataaattttgttggagaaggaaagttagctaccaaatctgagattaattgcttctttgtctctttgatattaccaatagacaggattattaatctctttaattgtttttctctaccccatgaagacactttatataacatactatattataatttaaagaccctttgatctgtggcttcagaagaataaatgcagctgctgttgttgtggtcgttaaagaaacagggttaacactaattctttttcattattatttatttattttgaaaatggggttaagatattttttggcaagggttaagactagttatttatttaaggggttaagactagttatttatataacgtcaaacttaagacaggtcccacaacgacaaataatcaaggctcaaattccctgttctat

SEQ ID NO: 37353 - DNA, 4358 bp, Cannabis sativa
  modified_base (27)..(30): a, c, t, g, unknown or other
actaatcagattgtaaagagttttatnnnnggcataaaacccaacataaatgagtatacaaaattaaatacaactctgatagaagtattgagagatataaggcccgattagttatgtttggtaaccatcaaattgaaggcattaactacaatgagacgtttgctacagtagcaaaattggtgatagtttgtgctttcttggccattgctgcctcaaagaattgagagttacatcaaatggatgtttatattgcctttcttcatgtcgacttagatgaggaggtatatatgaaactccatcctgcgtttcaatctaaagattccattatggtttgccgtttgcgcaagtcattgtatggtttacggtagccccctcgatgttgtttgcaaagcttttcaaagctttgaaggggtatggtttccttcaatcatactctgagtgttctttattcacttacaccaaagggccagtgtcttagtgtatgttgatgatttggtaatttctgataatgattccactgcgataacaagttttaaattatatttcagcaattattttcatatgaaagatctaagtgtgcttaataattttctaggcattgggggtggctcgaagcacttttggattgtttttatgtcatatataggaaatatgcacttgatatcattttataagctgaattgttaggctcaaagccagtttcattcccaattgaacaaaatcatgtactgactcgtgggatagggccatgtctttcgaatctggagccttatcgtcgtttgcttgggcgccttatttatttggaagttactcgtcctgacttggcatactcaattcatgtcctatcccaatttatgcaagaaccgagacaaacccactagaatgatgcgttgctagttgttcgtaatttaaagaattctctagaccaaggcattattgcgatatgatagtgagttgtctttgacaggttggtgtaactcggattgggcatcttatcctctaacaagatgatctctcactggttggattgtgttttagggcattcactaatttcatgaaaaattaagaagtaacatacaatatctttttcttctgtcgagactgaatatcgttctatgacatctattacttgtgaattgaaatggttgaatggtttgctttcgagtttaggtgttcataatctaaaggctattcttcttttctatgatagtcaatctacattacatatagcccaaaatctaatctttcatgaacgtatcaaatatattgaggttgattgtcattttattcgtaatattattcaagatggtcttattgcgccatcttatattccccaggacaattcaattggtgaatagttttaccaaagatttgggaaacaagcagtttgatcttctggttcacaagttggacatttttacttgcgtgctccaacttaagggggtgttaaaatatgatttggcattgatatcatattatttcatattaattataggataatctatataggcatatatcatttatttggtattagtgaaatgtttttcctaagattatggcttgtaattagtcttgccgcaagcttgctttgtacataaaaaattaaatcaatgagaataagattagatcctgaatttgacacaaacaatagacatagttattatttataatttgtcattagttgaatgaaaataatacaatgtttgtcatttcccaaaactgaactgggaattgatagtagaaatttgccgtactatttcagaaagggcagctccatcttttagtatttgagtatgagaagctccaacaattttaatcactctaagcgtttggttctgagaatggctccataacgactcaagccccaacaagctgaccatattcaccgtcccatctccatctccatagacaatctctggttgctcatcgaacccattcggcccgtagaacagagtttctggtgtccgtaccccacttccgatcacgcacgagacggggaccccaggcgccgccagttgattccgatccatcagaggcagtatgcgagttttgtaaggatagaccccttgagggaatccaatgtcgtttaggaattcggggatgtcgtacgccgtataattgtcgtttggagtaatcaccaatgccctttcccgaccgaacaaattggggttgggcatcagccacagattgctctccgagctcctctgctcgtcccttactagcaatggctcaacgagtggaactccaagcgagtacccggaagcaaaggtgagcatctcctccacagtgccgccccatggagccgagattgcgatgaagtgtttgacgaattttcggcgccatgagagagggtttcgattgaggaattggagggcaaagagtcctcctaagctgtgagagagaaggattactggcttgccgccattggaggagcttgcgttctctatcaaagctttaaggtcctgtagatacttggagccaactcgggtcggatgaccctccgcagctaaaccgtaccggaagtcgtatggggctccgaacagggttttcccgtcctcgtaccctatttcctccaaagactccactagatgtgccatataccctgttatctctctgaaatttgtgtagttcactaatttagaacttcataaaacaaagcaaagcaaacttaacttcaccaaacaataatttaatcataaacaattatttatatgttaaattctcattctttctaatcaatatgtatcatttagttgtttaatatcttttagatttagtcacaccacagtagttccattatatttaatttattattagttgtccttacaatctaaatgtaatagtattttgatgtttggtttgttaaatataatattaaccaaaaatgttaaaagaagtaagaacaaatttattgtgagtttgaacatttctttgtaatttttagtttgatagataaatttcattagcaggaaactgggtgggtgagtgaggtgtgagcttaacttacttgagatgagggttgaggtagaggagggattgggtggatccgaaatggggaacccgggtctggaccccaggggcattatggtaatcatcggtgcccaggtcgtagtagagggtcatacggtgagcgaagcacttggtaaaaggagccaataggacgctggggtcgaaccatagcctgaaccaaccatccttgtttctggaaatcgggtaccaccggttgcacaacagactcggcggctcgtaagcgctggtcagcctggcttctagctggtttccgccgttgcccgggattaggatcaggggatggagattgtaagggctaatcgttgcttgacacgtgtacatcatcatcaccaccagcgttgcaattagtttggccagctgatccaatgttcgtgattccttcattaccttagttggaatttggaaccaattttggatataattgtgtttcaattcacctaaagtggaagtgtcctgttgttgctattgccatattggtgaatcgtgaatggtgattgattggtgagagtggagagtgggagaagctagagtcgacgtatgcagctttgtaaacgtgtgggtgtggtgactggtgaagaagaatccattactttattctggaacaaaaatgataaggcttccaatcctattatacaggcccaatgtgaagatcttgaataaaaagcccatctttgccaatcaatgaccattcaccattctaaagtttgaggaaaaatgacttttttttttttttttaggtttttacaccacataatgaaattttcacttttttacttttattgtgaggtggaatttttttcaaaaatattatgtaaattttatactgtgtactgtgttaaattttcacaggtgttccactgttgtttaaattattttgttctgtattgttttataaaaaaaacagtatttttgtaaaaaattcatgtgacagtaaaattataaatttttgtccaaaatccagtatttttgcaaaaattctttttttttttttggctaaaatgtaaaatatccataaatttagaaattaagttagtaaatattttttaaaaaatattaacaaaatagccaaatataataaattagctaataaaatgagatttttacactagatgccaaaattagcattttttacatttttattaatgttcggtattttaaactttttgataatttatgtttttcatttttaatttttttttttttaaaaaaattaattacaattttacctttttgcagatatcatgtttttctcctatttttgttacactttacctctctctccctctctttctcttttgcttttttggtagatctactgaaccttttcc

SEQ ID NO: 37354 - DNA, 4730 bp, Cannabis sativa
tccgatctcaatattacggtcataacattgttcctatattgctcgtttcaatctcaatccactaatgcaagcaacatgttttatttgttatattttgataatttgaagcaggagacgcaatttgtttgttacttggatagtattttttttgccttgtaaaatagatgtttcgttggacactttatcgttagcaaattgtttagcttttccccccaaatcctgacatgtgttgcattctgtcatgtaccatgtacttactagttgtaattatatttagtttggttgtatgtgattctgactgcatctttcactaagcacaaattgtttttacttgtttcaaggttctcataggaatgttggtcatcgcggaactgtcaacaatataaaagatgagatcccccaaaatgcaagtgagggaaagtcttctaaaagagttgctgctgttcatggtgcccatgaggtatgctgtaatgtttcatacataagttattgcattctatttattttcccttgtagttttctctaagcagttacttcggtttaccgtatgcagaaacaagtatgggtgcagaaatcttctgctggttcttagtatgtgattggtaagttatttttcttgcacattgtttcttttgttcttcactgaaacttgaggttttagtgtaataaaccatccttttgtgtctttttttaatttcttttctatctttcaagaaacagatactaaatacaactctttagttctgctttcatgttgaattgtaataaagtaggccaggaagtttcatcgtggtaaaagtaaaagcccgttattgcaatgttctggttaaagttttggcttgttgatgatacaagttactttaggatctgtgtttttcgtataactcaggaatttaatatggtgtttgttggattacattctaattgttttaatgcttcattgaatagatagtggcattcgatcagaattgagattcctcgagtgcctgggaattgtttgtcttttgtggcttacaccctcaaatgtcatggcaccgtctccgatactacagctccactccccattgaaggcatcgtgtaaagggcaaattttttgggaacacaattatctgttaatgccaaatttaaggtacatggacaaaacaatattgacttttaatcatctgtgaacaaataacacaggtgccttactgcattaatttcttttggtgcagaaacccgtcatgcttgtggactttttgattgcggttacaaagctctgatacgcggtgttcgtggggatgcagcaatgctcggttggaggagtgcgaagtgatgtgtccgagggacaaaggtgataagtttggggaaaggaatgtttgaatttctcagcgtatgacttttatggccatttgtatattttttttttcactagtgtgaagtacagtatatctcgtgagaggaaaatgcttggtgtggtctgatttacttggtttcaccttgatgtaatggttcacttatcgaaaactgtgtaggcctcattttatatgatggggttctatattgactcatcttgacacaagaataattgtcttgaataattcttctactaaagttacaatctagggtgccattcctatgttttttgttttaaattgagcatcatgaaacattgaataaccatcagttttcatataaaaatgtcaaaaggatgctatatatagtcctaattaaaataaagacttgtcttaattaattaaatgataaatattttcattgaagagtgtcatattgtttgttgtgtgcatagttgaaaataaaatcttctggggtgtgagtcatacatagtttggggttttattggaaaatagattaaaatacaaaaaaaaaaaggtgtaaaagtgaaatcaattggggttggtgtcttcatatccaagtaactggttatagtttttcttgggaaatttgagcatagacagtaagcttttctaagaaacttagaacaaaatatcctccagaaccatcaacgccattgcagcacctatagaagcacccttgaaatacctatggaaacacacttatcttttttttttttttctttccttttgcaacatctttatgtttgaatagttgaaattttcaatttgatggtgcaatgaaaatttaatttttagacaaccatgatgcttcatgatgttttagaaatggtacgatgaaaacttgatttttaagagaaaaaagtgatgtttaactatgcttaacgaaagtgctatagacatttaatttttgcgatgaaaacgatgtaagatgatggtttaaataagttgcatgaaatttgatagaaaaactttagcgaaacataaatttttactcaataaattttacttatttttaatttattattttcgagatttataggtgtagaaagtgtgaaatgcaaaatttgaagtgtaacaacaaatttaagtctgacaaatcgaggttatactaaaacattgagactaaaataatcaaaatttattgttgtacaattctttttaataaagtgaataaaatcgcaataaaattcacgatgaagacattacttattcgcacaggaacttcttcaaattaggataatttattctctggcctaaaagcatgcttagcaatcatgcgttgcaatgttattgttgagagccacatgagatagttgctccaaaaatttagacgataaatttataatgtcagccattaaaacactcaactcactaatatatacatttccactattaacagctaacatcaacgctggcgagtatgaacaaattgtttttctttataggttctacacatttatctcgaagaaatcatctcaaaccgacaatcgaatggaaattatgcctgctaaagtttttgtcaaatttcattgcacaacccacgtttttgcccctaaaaattaaatttttaggaccatcgttaacgcgttgtcactccatcatcatcaaaacatcattaatcatattttttttctatctaaaaatcaaattttcattacaatattattagacatggcttttaataaaaaaaatctacaattttcaaaagttccaaaactggagaagaaaaaataacccaaacaaaacataaaaatcttgtacatttcaaaaaaaaaaaaaaaaaaaaagtattcaaaatccatgaatctttcttcggtttaagttttaatcattcaacataaaaatgttgcaaaaagaaatatataattttgcttttataggtgtttcggtggtgggagaatgccaatggtgcttcaacaatgttaattagaggtggacaagatttcaactaatccaatccaattacaaaaagttaaatatccaattataggtggactggattggatgtgaatagttgaattcttattagatttgattagtttttgaatgacactttcaagatttaaataaaaattgatctagtctaattacatataatatattaaaaaatattatatttatttgtatataataaaataatatttaaatttaaaatttacttgtttattaattttcatagattttattatacttgattaaaaaatagaaatttataaaaatactattaaatgagagaaagtttacaaaaatactgtgacaaagttttttatatttttagtaccaactttacaaaaataatgtgtttaaagtttaacaattacaaaaatactctgtgttacagtaaaataaaaaaagaactaaaaaacaacttaaaaataaccctagaacaacttattaactgtgaatatggaagcaattgattattattaattgataaaaagcctttatataggcgtgtacatttacaagaaagaatactgatatatactacaataaaaaaaaaagattgactaagttattaacaaactaataacaataaaagagagagaacagaggaatatataaaacaaatctaacgaatataatggtacaaattgttatactttgactgataatagctggcaatattatccttctacattaacaacatgaaaataattataaaacaacaaaaatataactacaaagtaacacaaatataacaatatattgacctaattgcactaagcaaaataatatcaactcctcaatatatttttgtattacgattttttttacttagttttgacaatttaatttatctttttgtattattacattttttttcgtagaatttgttgtcacaactttattctttcaacttttttttctcttttcttttttgagctagcgatagttaaaaaacaactataaactaaaaaataacgtaaaaataagaaaataaattcacatatatacagcaaaaatattatttaggataaactaaaaatatacacgataaaaaatatacataaactaaacaacaactggaccaaaaaaatacataaaaataactataaaaaaattatagaacacctaaacaacataaaaacaactataaaataaaaaataaaaaggcaactataaatcaacagaaaaataacaaggcatcaatcttgttaaaatatgcaattcatttgtaaattaactctgaacaaactacaaaatatccaaaaaaaaatatactacttttattaatcatgtaaaatatagaaaaatttaagagtgcttttattaatttttttgtaagagagagaaagagtgttaaaaaatgagatataaaaatgtaacttattatatatataatgataaaaaaaaatttgagagagagag

SEQ ID NO: 37355 - DNA, 4482 bp, Cannabis sativa
taattctcttcctactattcaagtatggctgctggttttagtatgcttgagtactttgtcaagtattaattctaagatcactagcagcattcccaacaaaatccagaaaggccaaatccttaatgtatcacagaccattgtatctgctagtggatgttttgaacttggcttcttctctccacagaacaccactaatctctacgtgggaatatggttattcaagaagagagtttttgattactgtgtttggattgccaatagagattaccctctccttacttcctctgctatcctcactatcaaccatgacggaaacattgtgatttcggatggaaaagtgatgtacatggtgaccaacacctcaaggggacaagatacatatgccatgctaaccgattcaggtaatcttgtactaaaagaatacaacagctcagaagatgatcataatctagtatggcaaagttttgattctcctacacattcccttttgaccgggatgacatttatgtgggattcttcttctttagtatcatggaaaagtgaagctgatcctagtccaggaaacttttccctaatactagattcattaaagaagcaactagtcatcaaggaaaggtcaagtgatggtgattcaaatgagaatgaagggtccatgttaggtatgattttgaataaaaacttccaacgaaatctttatcttggcatcaatccccaagatgattcatctggtcaaatttctcggttagtgttggatgaatcagggcagcttaagctacaatcatgctcaccagaaaccaaactttgtatatggatatggtccagatgctggtattcatcatgtggagcatatagtctttgcaatgagagtgctgagtcttgtagctgtttgcctgggttcaagcgtgttgataattttactttaggagacaatcctataagctgtaagaggaagattgaattaaaatgcagtaatctcaatctagctgctgataatttttttcctatttcaactactgagtttccaactggagccttgaagatcgatgttgggaattattcaagctgccaatcagcttgtttgaaaaactgttctctcattggttatgcatatgacgaagagaatggatgcttactgtggaatagtggttcattcttcaatctgaggcaacattcgaaccgtgaacacaggaatataagaaaagtttatctcagacttgctgccggttctgagattagtaacttgaacgtgatttctggtgagtgaagagaatatagattgtgtcatctagtttcaagagtatattttaacatagcagatgaatttcttttctttgcagacacacatgaaagaaatgggagtgtggaaaagaaaaaaaagaagataggaaccacaagtgttcatttgctgattatattgtcagttgtcgctgtatttttgctaattctttgtagacttttgactaagcagagaacgtttggatggaaagcaggtaattatgctaacacaggaatgttacttattaaaagtttcatattgagaaaattataacactctagtcaacagaaatattattagtttgtgtaggtattaatttttcattgtacagggcgaaatttgttacactttgatgtcgaaatgagcctaagaaatggcgactctgagcttcctgaacttaaaaagcgtaaaaaaggtcgaaaaagaccatgcaaggtgatatttttcaccttttcaagtgtggttgctgctactgataatttctctgaggcaagagagattggaaagggtgggtttggactagtttacaaggtatgacttattcatattagctaaatctatttcgaactagtagatagcatccatggtcatgtttatatcatatatgccagtaaatatgtgagctgacatttttcacttataacaacaacattaagcaccattgtttcagggaactttaataaaaggagatgttgtagctgtaaaaagacaaatgaaaaaatctcaagcaggaaagaagcagttcaaaactgaagcacatctcattagcaggcttcaacacaagaatcttgttaaactactaggctgctgcattgaaagaaaagagagaatacttatttatgaatacatgcccaacaaaagcttggatttctacctctttggttggtagcttgtcaaagaaaattacatgaacaggaaaaatcccgttcatcatcttcccacactagtgaactaataatctttttaatttcgttgtttattaatagattcaacaaggtgcagccttcttacatgggaggtacgagttagaatcatcctggggatatctcaaggtcttctgtatcttcatcagtattccaggatcagaatcatacatggagaccttaaggctaataacatattattggatgaagatatgaatccaagaatatcagattttggaatggcaagaatacttaaagccaatcagcctcacagaactactgaagcacctggtggaactttgtaagttataaatttcaggtacatgttcgaatcatttttccttggaattttctgaaataatagcctgattgatcatgttcagaggatacatgtcacctgaatattctcaaggcattgtgtcagacaaggcagacgtttatagctttggagtcatggtgttggaaattttgagtggaaaaaagaacacaactacttttccaaactcggagactcgtagtattattgcatatgtgagtatgtttctaggcttctacctatttattgcaaaagttaccgtatcctattggcaaaaccacaattaactgtttttttttttcaatggataaatttcaaggcatgggaattgtggacaaatgacagaggattggaggtgatggatccattactagaagatcagactacagcccatatcgatatggtgctaagatatatccatatagctctcctttgcgtgcaagaaagtgccgtcgataggccaaatatatctcaggttgccatgtggctaagcaattctcatgaagacttacctcagcccaagcagccagctttcctcaattctatctctactgtgaatcgaaacccaattcagaatgagcctgaaataatctctacaaattttgtaactctttctgcaattgaaccacgtccataaattcaagagtatccttatgttgaaatttctttgtgctggatttgaatagatcgttgagatttgtttatgacatctttccattggcatgaggcaactcttagttgttcatgacatttaagtttataaaaatttgactttcttttttgtgttatttagagcgtagcacaccttttagaaaaacttaaagttactttttgaaaaattgtgattaaaaattatttggtaagagataaaacaacagcttatttatggagaagctaaaagtttttttttttttttgaaacaaagtgttctttattaagaagagctatcgcctaaaaggatagacaacaactcctaaggaacactgttaataggaaacatatgttcagctagggacaaagagtgtcgggcaataaaatgcgcggcacgattcgcagaacgtttgacaaaacataaagtaacatttaacaaattttgaagaataaacttgcactcttccacaatgaatccgaacccagaatggagcctctctttgcttcgaatagcatccacacaaaccagtctatcggtcttgacagcagcatgagagtaattgtgttttttcaaccaacttaaggcttctcttatgcccataatctcagcaatttctggagccactttgccttgtttaacaccagaaaaaactgaaaccatttctccttctgtatttctgattacacacccaaagccatgcttgaattcatgatcaaaaatcgttgcatcaacattcaacttgataccttcagtcggcttagtccaaaccactgaaccatcaccgggtttaagaggagacagagaaggtaagttacctttaccttgggcttgcaaaaactgaacaaggctagattgagcaaattcgaccacttctttgacacttcaaacccgtcccttccagagcagatcgttcctggccgaccatattgcccaacacaacacaacaactcggcatagcttctcattatccagccgagtagcattgaaattaagccatgacagcagagagttgaagttctagtcagctgcagtaaaatcagagaactcccagcaggcccaagcgaattgacatgatactagcagatgcatttcagattcggcaaaaacaccacacataggacagttattatcactgagcaccttcttaatgcagagatttaccttgattgctaaacagtttgatgccgctctctccacaccagatcatctttagtcttaggaggcaccttaagtgaccacatctttttccaaaacagatgaccttctgaagaagctggaggaagcttttgatcttggattagttgataggcactac

SEQ ID NO: 37356 - DNA, 4570 bp, Cannabis sativa
aatttgtccaaaaattagtagtatttttcttttattttatataagtgattgaatacttaaatcttgctcaattaagtgattaaatttaatagagatcaaaaaattaattttacgttttgtttatacatttgataattttttttaattatttataattttgttatttcataattagtttctatatacattaattagtgtatgtatatacatattaataaaataattaaaaaaattgaaaagtattagatttaattttattaataattaagaaataaattttaaaatatataattttaaaaaattattaaaaccgagaaacgcggatcatttccctagttatatatataattgtgttaatcaagtcaatttcgtagtgttataacatattaaattgtgtagacgtatgttttcaatttgcatcatacaatacatttattaaatgtgttatcgtcatatgtcgtatgatctgaaaagaaatcattattttgtttgtatttggggttttgacacgattaataaaacgatctgaaaagatcattatcgtatagtcttaacacaaacacaatacgataacacaatttgtcagctacttcaaaatcatattttgactggcatattatggcagtaggtaagtactataaagagtcctgcacttgcatgtccgataaaatacaaggatatcagtatactaaatggatgtttgccactagtcactaaaattttattgtactactgattggagattaatttcattgatacaagaatatgagaatcctaggaataaggtggccacctcagggtaggaaaaatcagcagaccacttgagattacgacaagaacatcttgaggccagacctgagttccatccataatttttcactagtgccgactgccgagttggtcgagtgaatcaaagcccaatccaaacctgttaatgttagatccaaaacgttcacaagcatatttaatccacaaatcgccaaagtatggtccgaggttgattttaattggatgaatctacaatgaaaaccatggagatgttccccaagtcttgagaaattgagagaaatctctcgggtacctgcaagaaagcactccaactctcaaagtcgtaatattctcagattcacaagaaaaaaaaaacaataaatcaaagatcccttttaaggccccattgggtgagatctttatgatcctcaagcgagccttctcagccttttaacctaagctcgctcgatcctcaagtgtggacgtgctgtcattaaacacttacaagtatcctgccaagtgttagaaatgagaaaatgacttttcaatagcgatttagaaactctatcatttaaaataaatagcattaaatctaacgctacgtcgtcattgtaagatatcataacattttgtctaccatcatcgtttatgtgcaaataacaagtgcatacgtacgatgacgtttctattctttttatttattaaattttttctcatcatgcattggaatggtctttctttccattttaaaatagaataatccttttaccaaaatagtgaaaagaccattctattgaaatgatattctaatactttaatatacaaccaaacaaaaaaatagaatcaaaattgtttcttttctatttcattacctccaaccaaacgtcacctaactgttgcaatgtgaacaatttttacagaattttatttctccaaaaagcaggtactataagatttacaaaacattttgttagtgtggataacatatgttaaaatagtgttagttattcaagaatcacacagagggaaagatagggaaaaagaaatattactcacaaagacgttcttcaattaatctctgcttgtcaattccaacatttagcatagcagggaacacctgtcggctgtcagaaaaaaaaataattaagattagaaagaaatacaaaaaataaaaggatagctgcatcattacgatttcccacaaatacagattaatattactacattccaattaaatagtgagctcattcaccaaacaaccaagtgcacttacagaaaagaacatacctcaaattagaactgaatattttgagcgggttcgacccagacctgggcaacccgcccgaacccgacccgatcaactcgcaaattctttttagaaaaaaaaatattgggacggattgggttcaacctggtacccttcgggcgggttcgcgggttaagtttttagggccaccggatttcgggttgaacccgaacccgtcaacccgcatatttcatatattatatatatttttttattttttattacatattatatattaattaaaaaattaaaaaaataaaaaataaaaactaaaaacaaaaaaccctaaacttccctttaccttttactgtggataagaatgtattttgaaatattttaattttcactttgatcatgattcatgaacatgaaaatgaaatttgatttgatgaacaagtttgttggtttgattgattaatgcttcttttcttcaaatttgatgaacaagttgttatattatatatgtttaatttaataaataaataaaatattaatttttttaaagagttgatcgagttgatcgggtcaacccgttgacccgatcaatccagccaaccaaaatccgccaaccagtgacccgccaacccgacccctattcgggttcgagttcggtttcatttttttaaacctgaaacccgtgaacctgcgaactcgaaacccagtaaatccgcctgatgttcagccctaccttaaatatacaatattgacatcagataacagctccaccacctaataataccaagatacactattcaacaacatgataaataccctaggggtgattttaggggaggaaaggaaaaaatggtcaggagaactattctttttttggcagaagtaggagtaaatactatgaacaaatttaataaagcaaaaagtagggaaaaattttaatattttcccttttttggtgaggaaaactgagtaaacgaagagaaaaagtaccagtctctttctcctccaccatgtgaccatgacttctccaccaccatgactgccatcttctctgatgaagctaccactgccttctctgactccacaaccaatacctccagctcgttccagctctctccattgtttcgatctctaagctccaccatgagaccaccaccacgacctctatctccgtgaccaccacgtctgccatcacaaccaccattgaaacgaagtcctttggaaaaatttgtaacagttgagtcatctgagtcattctatagaacaagtatgttagaatgcgttctttgtttattttttgatattttgttaggggataattaagagttgtattaatgtaattttggtgaataataattcttattatttattgaagaataatttgcggcataaatacctaagttttactctgagtagcatataagtccctaagtcgtatttttggcggtaaaaataccttccgtcattagtgtggaacttccgtaggtacctctctgttttctttcttgtaatgtgccagatggcattatcattaaaaataaatgttacaccattccaatcattaacaataaatcattgtatatctcaaatagatgtatatgtggcaatatttaattggcccatattatttaatttctaaaaaaacattttaaataaaaattccattaaaaattatttaaaattaaaagaaaaatacaaaataataataaaatttaaaacttaaaataaacacactttttctctattctatctcgtcttcttcctcattcctttttttttttttttttgattgatgaaacgagaaggctgcttgaaaaatagaataggcagctggaggtagataatctccatcccacaacagagaagcttgtcttcttcttcattctctcaattgggcaaccataaacatacgacattaaaatacttattcaaaatttcagtacacaaaatttcagatcccaaactaaacagacaatattaaaatacttattcaaatacttataacttagtatttttgggcagctataaacagaccaaaactaatacagtacacaaaatttcagatcccaaactaaaaatgatagctataacttagatccatatattaaaaattaaaaatcaatacacaaagagaagaataagaaacaccggtggattgacacgaaaatctagccttcgacgagataaagaagcggtggtgctagactaagacgaagatctaggcttcaacaaaaaattagggcttcgatcttcttagcctgtcgatgccgatttcgtcaaagtcgacaccgtcgatgtcggtcttctcgtctccagccatcggcgaacacccacaccaaactctgatgcccaccctcaacagcaacaactgctgaaagaagaaaatggtgaggaagggagaagaagacgatgaaacggtcagtacctatgttgactcaccgacatagagaaatggccattcatggttctcatacccactagtacagatcgtctcttccattttagggttgagactttgagatattttgagagagagagaga

SEQ ID NO: 37357 - DNA, 2171 bp, Cannabis sativa
aggttctactgtatttataattttactatatacattactagaattatatatttttaagtaactatttattttaatattaaaaaaattaaattagctgcccatagaacgactatattacctagtatcaaaatactagcgagaaaattaatgaaaggtgttggaaaagagaaaaattaaattaataatgacattgactcagttttaaaagaaaagccaaaattttcgtttttctagagaaaattgtgaaaagtatcgttttccagttttgagaaaaaatgttatctttttacaatcataatgttatttcattttttttattttattttttgctgaatcatggtgttatatagttgttgtaataagtgataaattttattggagagttttaataacactccagaaaaaaaaaatgatgatgatgactaaatcgtaatattaaaaaaaatataattttaaaaaattacttttaatatttttaaacattaatttatcttagttttattatttattttatttttatatttttttttctaaaattttttaatataatttttatcataatatttaacatataattcattttatctaggtatatttttaaaaaatatagaaatgaataattttttatagaaaaaactattataaattattagaataaattttataagtgtttagggtacaattagatatttccaatttaaaaatgagtgttgtatagtgtttaaggtgatatgttataaatgattaaaatttgatttaaaaaaaatgattaacaattttctgtaattacgattaaaataaataattaaagaactgaaattaaattaaaccaacaacatataacaattaataacaattttctcataatataggtgcatgtaaattgggtgctatttggcccctagactagtagagtgttaaagatgtgccccaacactaattttatattcacccaaactaattaatgggcaacaatacaagatttgagaaacataatccttaaaacaagacaaataataaagctcacataactttttatgggtctttttcttttgcaagtttaacattttcaattttgttttattcttaatgtttttttttttttaaaaaaaaaaaaaaaacaaaagttcaaatctacttatagcacttctaacacattttttactctattttttagaatattttattaatttttttatttcacacatttaaactatataatacatcaatttcttcattttttaatattatttaaataatatattcataatagataataataaaatattatatattacaataatatttatttatttttatacttaaagtaaataaaatatttcataaaaataataaaaaaaatataactaaatactaaaacctataaattttttaagctacatttagttaagtatatttattaaataaaatttagaattattttaactaatctattgaataatatttgatatttatttaaaaaaatagtttttttttgggaaaacttttaattttatttttgtaataattttaacttttacattgtgctagtgttcttatatcattcctaataaaagaggtaaaatagcttcttagttaaaattttaaagaattgggtataatttcacctctaccgagtaaagtaaatggtgagctaaaatacctcttagctattcttttagctacatataagtcaatgaataatagtgagatgaaaatattatatattcatttctttttctctcccattcttttaattgttttttaattctttcattgtttcattgctttttttttttttttgctttttttttaattaataaaatatatttaaaaatataatgtctaaatgatagaggataaaatatagataaattgatgtgcagtgtaatataaatatgtgagataaaatagaaaaaataaaattttaataaagtattttaaaagatagagtagaaagtttgatgatgcttatattttaaaataattagtatttttgcttgttaaaatttttagacaatcaagttgtattctttatatagtatacaattcgttaataatacccatcgaattaaaaaattttatgacatgtttactaataagcaatgagaattaatggtaagggagtcattcccttacatttgtttatttaatttattaaatttaagaaa

SEQ ID NO: 37358 - DNA, 8895 bp, Cannabis sativa
  modified_base (8849)..(8869): a, c, t, g, unknown or other
tagtttaaggccattcaaaaaaaaaaaaaaattaataatttagggtaggggcgctaacgagcaaaaatagccccaacctatagatagactaaggcacctttactaatattttaatagttagcaaggcacttctttctcaaagtcaagtttctcgcttgttgcttatttaaaaagaaaggtgataatgcaactttctttcagccggctctgtcttatctatttttctctttttttttttcaaatggatatgttatgagagaaatcccatcactctctttccttttttacgccccacgtcgccacactggagagacataggtttgtaaaaaaagagacatgaggacatgggcaaggtgcttctttttcgactcagttgaccgactctctcactagagatggtttaactacaacctgatcgttctagtggtagtttcaatgctatttttattattggtaggacgagattctaatttgtgattaattcacctctttaattttctgatctgatctcttaggatcgctatacagcttgaaagcaagtgaatcacttttttggtttaaaatgctgctaaccccaatgcagctcgcttttattctagtgaatcaatgggttatcgtaccgacttaaaatctcgaccctgtgggtttttgtttcttcttccctttcttagagattttctctaacaaagtgaaaatgttgggaccatttctctaaaaataaataaataaataaataaataaaaaggtttatatatattgtaaggattggttgtaatcaacttaatacaattcccgttatcttgattaatttaaattggagcacttaaattggagactagttagtgacaagaaatgcggtgtgtcgttttaagtattgaaataagtttctccaaagaaaaaaacaagtactgcaaataaaataatacactacactacaaatgatctacgtgtgattttcatctcattcaaataaataaggaataccttaagatcgtgatatcaaatatgtatttatttaaatgataacaagaacacgttttgatatcaagccgaaactttcccctttatttgtgtgtgtgttttcttaatattattttaaattttatggtttgtaaaagatataaattggattatttatgttgtaaaatgataatttagattatgtatttttttaaatggtataaaacaaactctaaatttaatttttattaattttttttaaccaatttaaaaatagtttctaatgttttctaaaaagataatttcgaacatgaaaagattatcatgcatatcatagcacttttaattagattattattaatttttaatttaataaatagaaaattttaaattattttaaattgattctaatctaaaatagtatttatttatttagctaaatcccttattgtattgataaactaattatttctttttacaatttttttattctattattagagggattatttcacaaatacacaaattttaaatatttttataatttttttaattttatttacaaaaaatacggtctttttatgttatactgttattcatttgttgttatttatatgttattttttattgttattttaattttatttttatgtattttttttttaattgtttttataaaaaattgtaaaacttttaatttttttttttttttttgtaaaaaactgtaacttatttaattatccataagatttcacggaaatatataataaatatttttttgtttgaaagaacaataaatattgaatttgacggtacatgcactgtggcacataacacgtgtcaaaaccatacatgcaaattaagactttataaagatatattccactactgtgttaaaattctatccgccaaatcatgctacagatcacggaaaaaaaaaatccgccaaatcattcttcggtgctaataaagatgtttataaataaataattaaaaaatttggcagaggatttacggaaaatatcgaaagagtccctggatggtggctgtggctctgggcgtggtgggtgaccagacatggattccaaagggcaaattaattccagttaataaagtattttgttttgccaaaatgaaaaagaaataaatactatttaatagacgagattaatttaatgacaaggaccacgtcagccacatgacgggtgggaatatgttggaccctagacccctggacgcgtagatcgactaatcaactaacacgtgtacggatctaaataaactggaataaacaattttaatagcgcgaatatcgatgggccacatcaacaaccaccacgcccctcgtatatacggcgtaccgtataaaaccgcttacgctgaagacacgtgtacgatgacgtggaagttggcttggcgctcttcttcttcttcttcagccccacctctctctctttcgcttcattctattttttatgtgtgaaaataaagccacaacgttgtagagagagaaagacagagaaatgctgaggctatgaagctcggtgatttcgccattgacgatagttgaagctcttagagataatatttttcaggaaatttgatttggaggtggaggtttttggaatttagagtcaagaggtatgttaaattttttttatcggagttcttcctttttcctgtattttttcttcttgtagatttagtataatgttgccgcgattttctgccttttctttttatttcctttttgagtgttttttagtttgatgaaagtgaggtggaaagtatgtggaagagtttaaattccagaattttggtaactttcaaggacaaatgcagggagcaagaaattatgcctttgatgttttgtcattagaaatcaaaggaacagaaatctctagtactatcagtgcaagaaataggtagatatttttaacgaagaagaagaaaaagatgattaaagttgatgcttaattagatcttcaacataactggatcgttttacttggaaagctcagtttcattagctgattcagtgtctatgttttcctcaatttctgtatctcttctcgaataaattcaattatatttgtgaaacttaatccattttcaaacgttgattgctttagatttagttggagataaataattatataaattaaggggttgaattaaattaatatattgtctctttgccaaaaaaaaaaattaatatattgtcaaaaaatttctcgtcgagggtgtttttgtctttcagcatccagactacccgtttcagtctttcagattaaactttcttaccctactggcaccttattgtcaactgagatggcggaaagactatactgaccttgaatttgtcgtgtattgtgattcagtaattttcagattcttttttctctttttttttttagaaaaaaaaatatttggggggaaggggcacaaattgtttgtttgttttgtttttttttttttaacattgaaaaatacttgtgcattcttcaaggaaaatgatgtgctaatagttaaataaaatttagaaaataataatgatgatttttttgttggttcataagtaggatgttaaaaaaaaaaagatgaaggcttgtggtctgattcttgtggaacctttctggtgtccacgtgctgcttaacgagttacgttttcattccttagtgaatcgtgatagctgacgcgatagaatatcgtttagttttgaaatccttactggttgttgctttgggcctttttggtctaaataatttttttgatttttggtccaaaataattttgggtctgttaattttaaattaaagtatattagaaaggactttctactaagttttaaaagcatcaaaccacagtagacaattaaataattttcttattacttgtgatttcgaatctgtggggcgtgtctatcaattcataggacactgatataagcttcgatatgcctttagtgttgagacaccaattgagaatttgcagaaacattatgatcagctgtttctgctgtgaatttgtgtttacagcagaaacacctgatcggttcatgtttttttgatgtaattatattttctctcaaacatttctaagcttgtcacggtattattgagcttattattatgttggtccggtcgtttggtttcgaaacataaattaacagtaatttagcatatgaattaatattgatcaataaatcagtttaaaaaaatgtaactctaatatcatttgtttttggttttgttctttcttacaatttggcttgtgtaccatttgatgtaggaagctaagttggccttcaaaatatctgtataatagtgtgattcatctatcaagaaatctcctgcgtacccttgaattgtatttgaaacaatccaggtcggtactggactatgggaaatgacgaagagggaaagtctgctaaattcgagaaaacttctccgcctgcaaccccggtaagctgagggcagaaattttcttttctgatttacaaaaagcatcagtcttgtttgcttaattattatgtaggtttcttttattctaggtgcaccattaattgagactttttcttactgttggtatatctttttgtatctccaggatcagacgactcctactaatcaggccaatgttcacgtataccctgattgggctgctatgcaggttacctatctacccttcatgtttcgcttaatcaaatgcagattttatgtggattggtccttgtaatcatttcaataacatttattgcattttcaggcatattatggtccaagagttgctctcccccaatactacaactcagctgtagcttctggccatgctcctcatccctatctatggggtccaccacaggtaatttccatagcatcaaagcattaagaagttctctccttgaatgttgtgtttctcattttttctttgtgttgtgattatcatctgacttcttcaataatttttccagcctatgatgccctcttttgggacgccttatgcggcaatctacccacatggcaatgtctatgcacatcctcgagtccctcttgtaagtgtttatgctcttctaataaacagaatttttgataaagaagaaaaaaaaaggatatcagacttctgttttctttctttaattaagggtgagacactatcccccgggtgttcatagtttgagtataaaagtctgtaactttcaccttctctatctcaaaactagcatatctaccagaagtcttttggttgctatattaaatagatatatgcttggttccctcattgttgattcactccatttttcttgttcctttggtttcttttccgcctaataaacttcaagcatttgtatcccaagttcctcttacttagcaattttcctttccatttagggagcacatggtcatggggttccatcatcgcctgctgtaagtatatcctcatcttttagttccttcatgtctgtacattgaacgaattcttagtaaatgtgcaattacttgttatatgatgcagctgggtgttactcctgtgactgtgagtgtggaaatgcctacaaaatcgtctggaaattcagagaaagagttggagaaaaagatgaaaggttttgattcactttccatgtcgataggcaatggtaatgtcgagagtagggctgaagagatgctgtcacaaaggtttgttcaaaaagtatttattccctaatcattgatagcctaaatgatttgttgtggactaatctattggtgttcaatgtactagaatacttcacatgtccgggaggtttttcgttttcaaatggcactttgtaggatgtttttcttctatcttactctgctaatttgaaattatgaattatttgcagtacggagacagaaggttcaagtgatggcagtgatgggcatacttctggggtgagggatttccccttttattaacatctctgtcatgttgactctgtcaattgttgtagaacatatatactttggtgatggattgagttttttgacactaattaatttttgtgttgtgttcagcaggcaaatcgaatcagaagaaaaagaagtcgtgaggagacaccaactacaggtattttttttcttcccctaagcagttatatctttattaataatgacataaagggtcttttatcactactttctaaccagtaagacgaattaccacttggtgcaatggcaaaacttattatcataccttccattttttttttttgatagaatcacaccttgcatttgagtggtagtttttatcaaattttggtccttctgaacccgcggcattataatgggagtttagttggttatacacaagtccacaaggatgtttttttttatactagtacttgaaccttgtacgaaattggtatctttttgtgttggattatgctctaatgccattatcacaacaataggagatgagaaaactgagaagcaggtcaactcagtttctgataagacaatgggtgcatctctctctgctgctggcgtaccagcaaagttggttggacctatagtttctcctggtatgaccacagcatttgatctcagaaaccctactaacttgagccccaagacaagtccttctggcttcaaccaagcctgtacagttctgccttcggactcctgggtgcaggtattgccttgatatgcttttctgttgtcacaatatatttattgttctactcacattttcaagaaaaatcttaattggggttactggaatatgttttcagaatgatcgggagctgaagcgtgaaagaaggaaacagtctaaccgagaatctgctaggaggtcaaggttgaggaagcaggtatgagataatgtgaaattggcttgtttgatgattatatgttgtagtcttctatgactattgtttttcttgaaagaaataaacagcgtctccactgggagtttggcaggtcgaactgccagggccaaacataaaaaagataaattgtttctttcttgaaagaaagatacaacttcttcagttttaccggactcaattttttcatttttcatgctcaggctgagactgaagatcttgcacgcaaagttgaatcgttgacttctgagaacgaagcacttaaagtagaattaaatcgattaacagagaactcggagaagctgaggcttgagaacactaaactagtggtacattcttcatacatttcttgaattacttcttcaaagaactgatgaatttttccaactatatcaatgcttagtacttgagtctcgttttgataaacagggtaagctggaagacacaaaacttgggcgtgcagaagagattgtaatgagcaaggtcgacaagaggactcaacctataagtacagaaaatttactgtcccgagttaataactctggttccattgataggactgccgagacagacaatggcatgtatgagaaaaactcaaaacctggtactaagctacatcaactcctggatgcaaatccgagagctgatgctgtggtggcgggctgatcaaggggctagtttttgggtggtctctttaattatgtagttttggcatatttcaagcccaaaattactgctaacaataagcaggaggagaatgaaacggctcaacagaaaaactaatttctctaattttacttgcgagttaggtgtcatacaagaactgatgcttttctaattattagaattttagagtgctgagatggcctctgaaagatagttgtacattgaagagagtcttaacttcataaagatttagagtagagtaggtaagaaactgtttggatgtgtcttgttgtggtgtaattttattttattttagtggtgataatgtgatatgtctgaaaggctgaactgaaggccatgcaatgcaatatatatcgtggcaggatatgttgcttggctgtttttagttaaacaataattaatgggtatttttggtaaactctactgttgtgtcatttgatgtttgatgacaaataaggagactttctttcttattaagatggctgatgctgatgatgttcgatacattttgcaaattaatgtagaaaggaacaagagttaagtgaccaaaaagaaaatcatcaattcgagaaaatatcaaaaaactatttcttgtgtatcgacataattgctgtcactcttaggaaactaaactgagtctaaaatctaaatctatattctattctattagaaatatcactattgaagtgcaaccaaaagatagttgactttttcctcgggagtttgaaaatttgtaggagtgtatttttcgaaataaagtagttgctttagcaacaaagcacatttgatgtctccctcaacctaagtatagcccaaactcaattaccatgactaaagggagttcgaccacattatagtcgactttaaggaaaatttaactgaagttttggatgttacaatctataaaatgggagtgttaggattttacaatttcataagccaaatttgtttccaaaagtctcattgaaatttaaacatgaggagaaaaaaataatttgtacaatgaaagagatccattacaagcttcatggccaattcagaaatatcgtttattgggagaaataaaataataatttagagaataaattattatgtataaaaatgaaaattgtaaaaaaaaaaatatagaagtgagggacaactaccatcctatctccatgtgtccattcacatactaatctgtttgtttctctagtttcatgtaagatttcaataaatctcacgtgttcccattttagataacaatttctcatttacatatacttcatgggagaatagaattcacagagatttacaaaaacgtttcactaaaacaaatggtgctgtaggctgtagctaggggtgttcatccgatcnnnnnnnnnnnnnnnnnnnnnaacaacatccaatccgcactaagtgc

SEQ ID NO: 37359 - DNA, 2101 bp, Cannabis sativa
atatatatatttatataaagagaggagagatgtatatgagttttgaggagtttaaatttatttggattttacaatgatagatgttaccgatttcaggaataagctagagattcaagacaagtactgtctacgtggagcagaatggggagttggagattgctcagctgagggaatgacagctgaggagaaggatagctttatttccatgctcaagcagaagactggtgttaaacaataatttatttatctttactcttttctatataaaaatgtataaatataaatagaatattctcaaatttgtagaacaaatataccatttctatccacaccaatggaactgaacgacactctcatttatgtcgttcaacacaaaatacgtgcattgcaatactaattttgccagaaaagaaaaagaaaagtctcttcaagggatgtatgtatcttgaaatgctatctatgatccatcctatccaaaccaccaagaccttttcttatatgtttttgttttgggtactcaactgtatcaaaatttgcacttcaatcaaagtaagtgcaaagataaagcaaaggaacttttcctaaatatgagactagttatcaatcaatatgtcgagttagaatctggacattattatgtcgttttttttttttttcatttttacgacaaacaacatagtaacatttcccctgaaacgacaacgctactctttttattataaactcattttataaggtttcgaggaattatattttttaataaaaaaaattaataaattattctggagaaatttgtcgaggggtattgttgatatttggtcaattaacacaaaaggacaaaagttatataataattagaaaaaggcataactattttgggagatgatccagcaagctcatcgaccatagatgtatttcggtatcccaaaagttaaaacataaaaagcttaattcgagagaaataccgaaacaacatattcgaaaagttcaattctcacacccagccccacagtttcaggtactctttctctctgaagatttctcttgtgtttggacaattttagattagggcttcaaaacaatctgtttggttttgaaccttgaacgaaattctttttcggcttattggaaatgaagcacttcttttaagcttattgattctgtgtttggggttggattcgtttatagttttcttttgcttttttttttttccctatatattctctcatgccaaacggaaatgaacctcaattgtactagttttaattttgtttcactttgctttgtgggtcttttatttcgatattggatatgcattggaaatatgtgaatcgtaattggagtatttgtgtgtgagaatattagttgcagggatacttttcatttggaagtaatggtaaactgcctttatttggctgaactatgtagctatatgctaggttgttttgatcagttacatggggtatctcgttgttttcagggttttctgtcattaatttgggtatgcaattttgaatttgtgttgaggaagtgcttaaatttggaagggatcttggtttttcttagcattcttagctacagctgtgaggctgtagtttgagatttgctaaaatgtatagggctgtgcctacggcaacagccacgactcgggggggatcaccaaccgatagtgtcgactatgttgttagtttggatcaagttccaagatggagtgacgctgagcataggacttctctggaatttgagaatgaggatccttcattttctaattcatacttccctgatccattgacgtcttcatctggggcagaggctggcagcaatggtatggtttccaggtttcctgttgatcatgaaattaactctaagatatatctttggagagggaatccatggaatctagaagttgatgctgttgtgaactctactaatgaggttagcctctaaatttgttatgacatgtttcaagatgacgaaatttcaccattttaagctatttatgtatgtttttgaacaaaagatcttttgctatattaatttcaggatttgatgtggttatgtggtttgttttatatacaataatgcaaaaaaaaaaaaaaaa

SEQ ID NO: 37360 - DNA, 3054 bp, Cannabis sativa
aaattcttgtcaaacctataaaagcaattaataacagtgtccaagtttgtgacacaattgacattggatccgattttgtggagtagggaacctacttccttttcctcttcccatggtgttggtctacatattgttggtgtttcctcaaggaggaggatattgacctctaaagtttcctcttttattgggataagaaggaaaattagagaaattgaagccattaggagggactgacctcgaggataagcaaggtatcttaggtttcgatttgtgtttgcaataaaggcctccatggtgggatcttcatcaatggtcgccatgtttgcactagatttagcttcttgatcttttttttccaatttgagattcagaggctagaaggagagcttcaatttcaccaacagtgtcacaaacttggacactttgttgaaaatgacagcaatgtgatcttaatcagatagaatttctccaacagaggctaggagatcaacatgctgcttcactttaagaagatagtcattaagattcaaggtgcctttcttgagtttctgcaactttgttctgaattccagaatcttggatgaaactttgagagtaaagtattgttcaagggctttccaatttgtcgtgctgagttgcataccaccattcgagttagaaggctttctatcattgaagagagaagccaagatataagaagctgatcttgaacatcccaatcactgtactctggattaaaccttcgtgcagtacgatctgcatcattgatgaattaaggaggagatgatttccacaaattgtagccaagtttgtttttttcagagtaaataattgtgatcgttgagcttgatcaaaattaactaagtgattgaagtacatcgtgccatcttcttgatccctgttttgagtttttggagttgcaacttgagctccttgttgcacaagttaatgatttgagcttccatttcccacagtagccatgttcgccattaatagagaaaaaggctctaataccatattggattggtttaatcttcttgacattacagcaaagagaaagaatgacaaagaatcgaaaagagagagaaagcggaagtaagagaggaagagagaaagaactcttattgattaagcaaatgatacaatgtacaatatatacacaacaaaaagtaacaaagcacttaaccgaaactataaccaaaccaagtaaagctaagctagaactaaccaaagttaacagctaactcacaaactaataagagagtcccatccaatgtcgtcataaacttctatacttatttttatacaaaattacttttaagtataaaagcagtataattgtagtggctgtctagccaaaaatgaaataaatttcgccaattacttcttacccatacaccacaagttcttgttaccaaatcccaaacacctaaaaaagcaaagttcaaaaatattaccagtgataaagcgaaaggagaagagcatcaatttgtttgctgccatgtcatgtatttagtgttaaaacttagttgaagtgttttatgtcatccattcgtttaagaaagaaagttcattcattcaacttctctctcgcttttcttttttttttttaaataaatgaatgaatcaaacagaaaaagaaggctctaatgaaacagaatttaagctcacttcacttcacttactttaaaaagaactttataagaactaaaagattacaaaagaattttagtctgataaataataaaaatgtaacactaaagactaatacaaccgaaacaaagatttttctctcgaaattttatatcaaaacatgaagaaggaaaaatatatttataatatatatatatatataaccaaaaacaaaataactatatttgatatatttttcttctctggaaggccaataaaaccatcttctgttctttgctttttcagattatgatcttggcttgcatacatgataattctggctctcaattgatataccttttttggtaatttgtcacttttactatacatctctctctgtctctttctctataataaaaacattttaacgaaggaggaaaaccaaaccaattgatagtgaaagaagtttctcatatcaagtaatgagaaagagaaacaactcaccatatttttctatagtttccccttcatttctccaccaaagcttgttctatatcttgttctgtaagcaaaagaaacgtgttaagttgatcagcatctattgtggattggatccgaacctcttcggacttttcttttgcttgattgattaggatcaagcttgttgctttggctagctgattttgcctccgagtttagttttccctcctttttcacaactttaagagaccggcgaatgtgaagaaatggattagtttcttccttttgatctcttggggcaatatctagacttctcagaccacaaacttttcttggttcaaatgaaagtaacccaatgcagataagtagaatcaccactctttgagctgcaagaaccatcgtttttaatttgaaacaaaactaataagaacaaggggaaagaagtttgttttttcagaaaaaaaaaaaggaataaaagacttgtgaacaagcaagaataagggaagtaagagtattgtgttcttgtggtttgtttaaaagcaatgagctgatatgagaatgttagttgtactcttatactcttttgtgtttcattcctgtagggatataaataagtaaaggctgctatttatggctaattggattggggagagaagcttttaaagggtaagtaaaggaaaagagggccccaaaaacacttggatgaaatttagattcactcccaaaaatcataagcctaaaatctaagcaaacttaaggctgtttgttacggagaatctgacatggaataaataaacgaatcagaacaatacccttgagaagctaagtatcttttttcacttgtttccccaacaatctctatcatttgcactgcttttgtcgactaagaaaaggccaacccagagtcttgagttcttagccattttgccacatcatcaccgg

SEQ ID NO: 37361 - DNA, 1945 bp, Cannabis sativa
aaaaaaaaaaaaaaactttttcaactatcatttcacttgtattgaatcttttaagttcaaattttagtagtaaaatcctccaaactactcaaccagtagcaaatttaaggtgtgattcgattaattgccactataaacttcttatgtgcatactcttgtacatgtaatacgtttatattagtttaccgaatattattattaaaaattattttcaaaattcatttaaaattaaataaaattataaaaaaaaaatgtttaaaaaataaaaaatattataaaattttaaatattttttatatttttttaattataacattaggtgtactgatataaatatattatgcatataagagtgcacatataagtagtttatgttgacagttaattgaagaaagtgaatgacaccttaaattcacaaacaataaaatagtttagaaggtttttaacgttaaaatttaaatttaaagaattaaatgtaaatagaataatatttaaaagagtttaactaaaaagaaaaactaaaatagtgatttgagttatgaggacatctgtaaaaccacaaaattattttcttttaaaaggtgggaaaatttgtaatcatgacttaacagatattcacataattagacgcgtaatttcaaatgtggtttttttatttaattgtcgaaaggattttaaatgtgtgtttttgtatttcgaaaaagaaggaggctttttattagtgcctgatgttataaaatctttttccttgaatttttttgttaagataaaaaaaaaatagtaatttgagttatgagtacatgtgtaaaaccacaaaatcatttttcttttaaaaggtgggaaaatttgtaatcatgagttagcagatattcacatgattagacgcgtaatttaaagtttatctacaacaacctcgtgtttcaaaatagcccatcctcaaagtcaacgtcaacaaatagtataatacatttgtcttttattcttttgtgtgaattaattttctcttttccttctcccaagcattttgcaatcaaaaatttaatcactcattacttcttatacttgtccgtatttttctacactggcacgtattaaaatattatagcaagtagactatcgataactttactcagtaaatactatggccattcaaatatgagctagccaatagccaatatggattaaaagatatctatttatttttagaattataaatctctatttttagaattataaatctattaatataatgaaacacggttaaaagtttacttatgattaaactagtaaacaggtcgcgctttgtgtgcgattatttataaaaattttaaattatatataaatattaattgaataatcaaattatatcaaataattttaaacatattttatgtatttatgtataattttaaaaaatatatttattacaaaaataataaattaaaataataaatttatatagagaactcttaaaaaaaaatatcatacaattttttatataaaaaagaaagcacacaaaaaaaaaaaatcttcaaaacaattgtcatcaccataactcacttggtcactactacatttaaaattgatgttattacattatctgacttgtagtcatcattaatatcacttgtagtaaaaaaaattaaggaaagaattaaatgtaaaataaaaaaaaattagaaaattaagaagacaataaatagagatattttatgttgccaccttatattaattaattacctaatatttaattttttactaataaattaattaatatcaaatataattattttaaattaattaattattataatatacatttcattgataaccatttaaattttttagtttattttaccataattaattgacataataatatttattaaaatatttattcaatatatctataactataaatatgtgttttgaattctaatttatt

SEQ ID NO: 37362 - DNA, 3945 bp, Cannabis sativa
  modified_base (35)..(42): a, c, t, g, unknown or other
  modified_base (2979)..(2985): a, c, t, g, unknown or other
ataaattggccaaacttaaatgtgccatatttatnnnnnnnncttttaaaatcccatactaagtgtaatttcctcttcttttttttagggtaaatgatgtttggtcacactatatatttttcacatttttaatagataaaaaaaaatattataccatcacattttttatatcttctcttttttattattttatcataaattaaaaaatttaatgatttaatatatatttaaataatttttagagatattaattagtaaaatattttaaaacaaaaaaatgttaaaaataacgtaaaagataaataaaataaaataatatcttttttagtgatgtgaaattttttaacattattaaagaatgctaccattagagatattatacaagtaaaaaaaagtttgtatatatcatgtccttttttaaaaaaattgataaatgttaacatatctccatatattaaaaatgattatttaacaataattttttgatttaacgattaatttttttattattttgttaaacttaatagaagttaatcttccgataactttcaaaaatatataaataagactagacacccaaaaccctaactcatttacatcatgcgacgagaccttagtcgagaacaacgattctcaaacttaccatgacgaacttatatatgtaataagtgatatgaaattttttgccattaggggttgacagtattgtcattctccaaaggtatacttccatatttactgttctatagtccttaactgcattatctcatacctttggcaataacaatacgatttcaactctttcttcttataatgtttttgttctcttccttttagaattcatgtagattcgtgttcgttattttaacaaacgttgatcaaccttgataagttttgtaataaatgtgttgattattacagcgttatgattcagcttccccaatttggatcgcgtgcgtggttcactctcattgacgacacatcgactctctttgcctcatcaattggcgcaaagactgtgccaatactgaaattttttccctttttatagttgaagtcagtttttttgcccctctctttccaaatatacattttatgtatcgatatttttatcatattgtcattacttctatacaagaataattttttagactaaaaatattggtagaacttcatgtcttgttcgtattcatgagtgtttatgatgatctaattttgctttggaaagaaaaaaatattcctctttgtttgtggataatacctgtactttccaaaaattgtgtagatttttcccttttatcatttttaatataacattacaattagtcattagagcaggtatgagaagacttggattcgtgctatgttgattaaggaaaaaataaaatggattatcatgatcattttaaaatgtgtcacctttagcatttgtaagttttttttcatgtattttttttagtaaacttgtatttactattgtagatttgaagttaggaattagtgacaagggtatatttcatgaattccaagatgcagaggacttggttatgtttgtttttgttgttgcatgcagttatggatccttttttggcttattccaatcacctactgctttcagactaattcaagagcacaagtcattagaaaattaacatttgacacctcaactttccaatgccctttatcttactataattgatttttatttaattgaatgttgcattgcatgatcttcttctttaggtatgtttgagtctttcattttatattgtagttgaatttcaaatatgtgttagttttctatttctgaagcaaacctttaatgatacttttattttcatattattatactactcttcgttaccaaatacgctatttaatttatgatgttgtaggaagaaactatatgaactacaaaatttctttttgataaattcaattattataacattgcccaaaggggctatatgaactacaaaattttgaatgaaagaaaaatagatgagtcttttattttgcaatgttattgagtttcaaatttatggtagttttatatttttgaaacaagtctctaagctgctcaaacacggttttatagtgattatagatcgctggagtatgcccagccgaacgacgcgagaggcagagatacatccaacgtgaacgatcgagaggatgacccagacaaccaactcatccacgttgataatgacagatatgttgagatgaacgaagaagaggaagacaatgacaattactgtttatgccctaaataaaatctattttaatataattaaatttactaattaataaaagatcataaattattttatgttacatggttcacatgattactttaatgattttatgtttaataaataaattctattaaatcccgaatatatagttattcgtgactatagtgttgtctacacagtgaaaaataatcgtgattgtatgcttcaaacaatttagtctcacgatttatcaatgcactggatttatactaacgtgataatcaacgatatagtttactaacacttgtataagtggaatatcctttctagttcattagcaaagtaaactagtatcggatgtattggctatacattagactagtctaatattgatagtgaaaaagatatcataaacttactattaaatcttttcaaaatcaatgtcatttagttgatcttaggtcaattgatctcaatcttgagatggttaagttctagcttaactgtactatacgagttctttgagttgtttgttaccagcttaccataggactagtccatacttacatcgtgagaatttgatagtgtaattgagtgagagcattaatcatagatatggaatctataacttttattaaaagtgaaacgatagtttccttagagcttggctaaacgcatttaaattgaggtctcatttcagtaattatattagtttttcaaatatcatttacaagtagctaannnnnnnaaggataaaatacattggagggtaaaatggtaaattggtcactattcaatgtaaactgtctatagaggatcattgactgtttagattttagaaatggataattcatatcgtatctatatttggtatatagatcattctatgtaatcaagagtgcaattctgaatctatagtagagtctaaacctaaccttaagtaaagcctataaaaagaaagagaagagagttttgtctgatgatgtttttctaagctagaaaaccctagaaagctcacttcttcttcaattttattttcgaaattttagaggctattttctcttggatttcttcataaaatgttgtgctccttggtattgagaatatgcctacacatatcaaagcaatactcatcatagtgaggaaaattgtgatgaccaaaattgaaggaggagaagatctaggtttagatcttgataattctctgctacacacaggaatcaagggctagagatctgtatggaaggagtcatattattttgctgctatcactgtaaggattttttaatccttaatgtatttattatcatttttatgaattttatatttaggatgctagattatagaattacaatcaacatacatggtaaacaacatacacaattgaagcagtatatcctatttggttggctgatctagttttggtcccgaagaccaatggcacatggagaatgtgcattgacttcacggaccttaacaaggcttgccctaaagactgcttctctctcccgcagatagatcagatggtggacgccacctctgggtaccagttgcttataggggtgagcaaaaaatttgagaaaccgaccaaactgagtacaccgactattcgaacaccgaaaaaactgaaaactgaaaaaattgccttcggttaaaactgccttaacatggtcggttttagtgtcaatgacaaaccgaccgattaaac

SEQ ID NO: 37363 - DNA, 3481 bp, Cannabis sativa
gggggggggggagagagagagagagagagagagcaaaacaccttacctgtaattgccatttgtgagtcactgtcatcaaaaaagttgggaggaaggcctgatgacaactgaggtttggttgatactctagaattgtcaggttgagtgccttcacacatgagacaaaattaaaagaaccattttcagttcaggatattatcgattacagcatatatattcaaaaactattggcagttgctgaaagatattactgcaaatgaatgatctcccaaactgtaatgattaatcctaaacagcatttttttagatataatataaacctatccagtccaactctactcccaataggaaatttgtatctcataaatctaattagttaacaaaatacagcaacattatcaagcataaaccaaaaaatctacaaagaaaattgtcaaattaagcaattattgttcaccaagcaacaactataggtctataaccatagtagcagtaacatggttttcatgatcacggattcaaaataaaaaataaaaatagaagtcttacttgtatttgccttctgtaagtcactatcatcaaaaaaatttggaggaagccctgatgacaactgagatttggttgatgctctagcatgctccggtccagtgccttcaaagaatgacatgggaaaatttaaggggaccattttttagtaataaatgttattgattaaagcagacattctaacattatcggcagccattgaacgcagtggatgcaaataaacttgtctcgctagacgttatgacttttactatcttagccttttcagatataacataaacctatctacttcaacgccactttcaatagaggaccccatatctcatcagcctagtgaaacaacaaattatagtagatcattgattgtaacccttatttataataaagtaatttaatgttcacataggcatcaaatttaaccaaaatgacattagcatggatttataactacataaaagagctgtgggaaaaaaggagaagaaagtcatacttgtatttggattttgtgagtcattgttatcaaaaaaatttggaggaagccctgatgataactgaggtctagttgatgctattgaattctcagatcgactgctttgcaactcttcaaaaatttcatgtttagatttaggcaactccttacgggactcaggttttccttggtttcccgcatttaatgcagctgcagaggctttgaatttactcatcgcctatcccaacatcaagtctcggtcagtacagtactatcacaaagagcatgaaactaaaaaggttcacaaagcattattatgtttcatttcaaactaatttagtattccatttccatcaaacaggactatcatttatgaactggcgaagctgctacctgtgtggtgtctacatgtgagcaaggaaaacatggaatgatctcatatgcaagtttaagaagtataatattgattgaaatcaataatagaaaatcacctcgtgatgtttacgggaaacttgatgcacatcccaaaaggattctgacttcaagacaacatcacagaccttacatattggctgattattgtcattatacctgtatgcataagaacaaaggccaaaagggtcttcagaaacaacacccttgatacttcaaactctatctattatatgtatcaattcttcgaaattttaagaaaagtaaattccacaaacaaaatcaactaaaacaagacttactaataataataataagaaaaaaaaagtccccaagcattgggaaaccatatagtgcaaagactcgaaaagggtgtgcaaaatcaatgctttaaacccaaaaagtgaaatcctttgtttacaataagaactaattgaggagattcaacgaaatgttttgcagttgtaaggattgaagagaataatcagtaatgcgttagttgtttgttaagtaattccaaaagataatattgcataaatcaaaaaagagctagaaaacattaaaaattaacgaatggaagacagaccttacaagagcggaaactatgcgcttgacttttttctgatcattcaatctatcacgaaatgatgattttcttttagctttataatccatccttcttcttctgcaaaattaagaaaaataatctcaaatccccctttttttggtttctgggctccttacacgaagagaagggaagaaagagtataaacagaagaaaagaaaagagaaggtaaggagacaaacctgagctgcaattggtgccttggtggtgactgagtgaagttgtgaagccagaaccagaatcaaagagcagaagaggagtccacaaaagagcgagcgagagagagagagaaataggaatacaacttaccaaaaaactaatttgtccaacctattatttttattttttcggctgttttaatttttgttagtagatcacttgtgaatttacaatgtagatattcgtaatcggtttaaaatattctcgaattattataattcatcgtctaattaaaagatgtgatttgcctaaaattcttatcacgagcaacatacaagacaaaactacttctaaaaatttaaacaataaaattctaacatttttatagtctatattacagttataaaagcgaaagttgaatttgataaaaataatttttatctaatatgaactataagttaaaggatctcaacataatatgtatagattaaatctaaactattaaaagaaatataatacctcttgaagcatatcaaggtatgtttatttcttttcgtataattaacaatcatctaatctaagaattttgttgaagaatctacacatcgatctttcaagccaacctcaacactcagtaatagagtagactattagatcttatttggatgaacaaatttaagtattacaacgtgtactcaacttatgagacactataactgagacggggttgtttaatctcatacacacatgaattggtgtatttgtgtgagatgaagagagagtgtgtaggcgtgagagagaatagggagtgaaaaatcaattcctattattctctaactttgttaccgtatacctcaagctatttctttcaaatataaatatataataaccgaataataaatatcagttagattttttattttaattattattgttgaccttgaaaagtgatcaactgacaacatggtcgtgcagatcggatgcttgccacgtatgtgcacaaataagaatgaaaaacaattgacaacagaatttgttatagaggttcggcccccttgtgatagcgggtaatgacctactccctttttagttgtattataccgagagaattactatccaaatcgctataggtgagatatgatatagtacccttaggattacaatgtatgaatcgatgctatcaaaaatcaagtgttggacaacttagggtgttgtacatcctaggctaggcgtgtgtgtgtgtgtgtgtg

SEQ ID NO: 37364 - DNA, 5884 bp, Cannabis sativa
agttaggatcttgtagttgttgagctgtatttttcgggttgttcttgttatcgttatttcttttccttgtaactgaaaaacaattgagagttggttttagcctctagacacactttataatttgctttgctataaccttttgtaattgacttatgcttataagagaatttattctgacaaattctacctaaattcccttatgagtgatgatagattagtataatctaaggatcttatagcttaatgaccattagggtcagttttctttgtcaatctctagcaagttcatgcaatgtttgaacgtaggtagggttaccactttagttcccatatcagcagggttatgttcagtacgtgggagccttttccattatgacctctccctgtgtcactttgtctctgataaagtggtacttaattttaacatgattggttctgtcatggaagacaagattcttgcaaagatgaatgcaaccttagttgtctgagtagatggtagggacactcttaagtaggcttaattttttcaggacaactttattccacatgacctctttaatggcttatgttgcagagatatactctgcctctgaagtagatagggcaaccacatgttgcaattgggccttctaactaatgtagtttcctcctattggaaaataataggcagttgtagatcttttagtgtctctgtcaccaacatagtttgagccgcaaaatccttctaccaaggttaggctttgtgactgtttaaacacagggccaatatttgtagttcctattaggtacctgaatattcacttcatagcaagccagtgtagttttcaagggttaaacatatacttactgagcacacttatagcataggctatctcagggctagtacttaccattaagtacattatagacccaacaacattagaatagggtcccttgctcatctcctctttctcttttgaaaaacctaacagtgtctatttcttcttagttgattttaaagaacgattcttatctaagattgcatgaaacaaaatcagaaaacacacagatttacaagcttcatctgaccctagaaactcattccaggcgactattgcttgggttcccttgaaccagggtaataaccttcactatgaattaatcagaatacaatatccagtcttgattacaatttctcaaaagtaatttaacatcagctcatacaaggattaccctactgatttgatcacgatcaaatccaaacagtctaaaatccttaagacttcagaagccaagatccccttgcttccttgtagctgaaatcccttcaacatgatctgaactcccttcagacaaaacatatcattaattctccttcagctcctgaagatccaaccagcaatgacctgcaaattaactaagaaaaacaaagaaaagttctgccgtagcagagcaaaaataaccaaatgaaaaatatccaatcaaagaagaagagttagttagaaaaccggtaatccctgattatatactaacaactcaaaaacaacaaacttaacaactcagctctcaatgaaggatagctgtccaatgttttaaaccaactaaagctgacctgccaagatgaaataataaaaaccattattatgctaaaaggaccagatgagactagccaacagatagatgaccaaaaacacataatttgccacacagaacagctggatcttacatctttctttgtattaaggcccccttccttagagatcttgtactaacttgtgatgggctaactagtcttcttagcacttgtcatttggaacttctaaataatcttccatatgtagtcttcttggcacagttttaaagccacttttcctctgtctcatataatagtgatccctaagatttagtagcaacacccatatatttcatctcaaactcagatttgagaatctccttaattaactttaccttagatctttccataatgactatcaacatgttagctacatatagcagtaagtagatgacatccttatatcacttccatgatagtagaggcatgtgtcatagtaactcttagaaaaaccttatttagtcatgaaagcatcaaacatcttgtcctattgcctatttatttaggtcgatacagaacttaatcaacttacacactagatgtcatttccccttttctacaaaacccttaggttgttcaatgtagatgtcttcctctaactcaccatgtagaaaagatgtagtcacatccatttggtcaatttccatatgaaattgattagccagggcaagcatcaaccttatagttttgcacttgattacaagagaaagaaaaaaatatcagtgtagtccacaccttccttttgtgtgagccccttagtcactaatctagctttataccttactggttcacctttggatcttccttccttatgtctaaacaaccatttacatgaaacaatactcttcccttaagtatagggataattatcttagtcttattcttagtcagggagtgcatctcctcattaatatcattgttccacttcttagcatccttgcctttgatggcttcctcataggtttctggctcaatcttctgcccatccagcatacttagaagagcgtacgcagtattctcattctagatattgaagttgtatttaggatttccacctgacctatatcctagtctggatgaccttgttatgaattttgaacagttcctggattgactggccttaggtcaaagttgtaacatccctgcttcaagcctccattaggccttcccccacagatttatatggctcttcttattatacacgacgaatacgtcactctgatgactgctttttggactgatgactggtcctacaaaccaacacgagtgtttccagcatgctttgtcctcactcgcacgcttcctggaaaaacttcttagaaggtcacccatcctgaaattactctaaagcacgcttaactctttcgtgatgggctactagaaaataagatacaccttgttgatataggtcgtaccaatcaattcatttaagccatttttaattgtgtagtcccatacctacagtctcaaaatcatcaaacttgaccttccgcgagcggtgtggaattgcatgtcttacccggtatttccccttacagatcaagggactactaactgtcacaatcacccccttacggggtctgacttcctcatcgaccacacttctggttgggtcaaggctttgatactatttataatgcccccgctttatgcctccattgggccttcccccatgaatttatatggctcttatacacaactacgtcaatctggctacttattggactgacgactggtcctacacaccaacacgagtgtttccggcgtgctttgtcctcatcacatcacacgcttcacgctttttgggctttttgggaatcttgggaaaacttcctaggaggtcacccatcctaaaattaccccagaccaagcacacttaattgtagagttatttcatgatggacaataagaaaacaagatgcaccttgttgatataagtagtaccaatcaatccatttaagccatctttaactttgtagtctcatacctacacagtctcagaatcatcaaacttgaccttccccaggcagtgtggaattgcacagcttacccgatatatctccttacggatattaaaataaaataccataaacaaacttgtgtcaaagtactaatattacctttattttaaaataacaattttcaaaatataggtacccgattgaaatcaaagtgttactatttaagtaaatgcaacaaaaaactaaaagaaaacatccacaaatatgttttataaattttaaagtgactttcagaggaaaatgaccaagaccacacgcagtttcttgatctcacgagatacaccccacgctgcccaaactgaacttgccaccgaaaatttataggcttacttatctacacatgggaagtaaataagggtgagttgtaaagcccaataaggaaaaaaaatatatcatgtacaagcactcacacatcatagcacaactatatacatcaaccatacaataagtctcatcatgtttcttaaatagaggcagccacacaaaaaaaaaaaatatcacacacacaccccaactttcgtacaagtctagattgtcttacgttcttaactcgatcgtagtacccatggccagtgcacccttgcgtacactactccacttaccacatcagtatacatgtgtagtttccaaccacgtctaaatacctagaacatgattaaacaaccatacccaatacatcgataaatactatttcaccaaaactatcgcattccacaatttcagtacaatcaattcaacaagtctcgctaggtactcaaaccatataaaaagtacaagtataaagtataactattttttcttacctcaactcttctgtaattaactcttacgatacctcctaggccctatcaacaattagcgaacccttagaccaccaataaactcaatatatttagctcaaaatttgactcataaaacttttgaattagaaatcctactgctcacaaagtttttagataatcaaaagaccttttttaacggtatagagatcatcaaaatcggagttataacctaggagttacgaatattttattaaaatagtttctttaaaattctggacagccgatttctagatatagcctaaaaataacaattttaaatatagttttatctagatccagacaatacttccttcatgaaaaatgtagctctttcttaagctttaaaacgagataaggatcttttaaaatggatcaaaattgagagagatattgagtttttactaaggacactttttcttaaacaaaacttaaaacgaaatatcctaaccgagtaaagatactgatttttgacaggtaagaactccgaattaagaaaatgtttcttcaaagaaaatatgaattattgagttatctttctagcggtactagaatcactggaaaagaatagataccgagagagatatcacacttttactgaggcaatattggaagaaaatctggaaaaactataattcaaccactagcataaaaatatgaatttttgacacaggaagaatcagaaaaatctctacacaaaaaatgtatatctttaaattatctttaaaacagtacctagatcattaaaaacggacatacgaggagagagatatggtagttttatgaaaggctattcttgaaaatgaaaattaaaaaaaaatacgaatttagcttacattatcgttaatacctaaagaaattattgctcaattcagaagacgtgaaataatggtgttcagatacaagtgactgattgttgactctaaagcttcaagattagaattatctatttggtgatataaaaaatgtaatacttttagaaaaaaaaaggatacgataaatataaggctgctagggtttctatctatatttatttactcgtatactaactgaataataatagtatatatattatatatatatatatactcctaaccgtataagactaaccatcacaataaaaatcatgctaacacaatttaaattttaaattttaaactaactaatttgattctttaaatgtcatattgacacatacacacacgcacacctacctaatacttgatatatattttaatattaaccaaacaactattacatgcatatattttttttttgataaagtgattagaatcactcatgaatttacgacacatacgtccgccaccaacgctgaaacttcctcaaaccaggatagctcatcgtctaaccgtatagcatgctttgccaagtcatgggccactaaattgtcagagcgaaccacatgggacaaa

SEQ ID NO: 37365 - DNA, 2844 bp, Cannabis sativa
ttatgaataccaaagggtggagctcattgttcttaatattggcaaggagaagaaggtaattaagttcactaatcgtaccatattattattattattattaatttctttttctaattatattcgtttgcatgcatgcatattgcatattatatatataactacattaaattcattttcattttttatttttacttattttcgaatgttatatttggtctaaattttataattgtatactttaggataagattgttcataaaactactcaaaccatccgcaccgcactgttttgcaaaaaaaaaaaaaaatccggtttaaaattctttgtggtgcgatcgcagtttgaattttttctaaaccgcgcaaaatactaatttttatatttattttagtctaatatgtgaagaccagcttaaaattcactaattattgtattgtttaaacttgaaactttttttcatattaattttcaagtcttatgacatttttgacagatgttgctcaagctttattatatttgtgataatttaattatttggtgatagtccaaattacagaaatcgcagaaactgtactgcaccataccattttttgcagtacggtttttgtgattttttaatttcgtagtgcaggtgtaatttgagaaattagaaaaactgcatgtacaaattgatttaaaaaaaatgatcaaaaactgtactacccctattgcaaacaatcttattttaatacacaaagtgtaaattaaccctcaactcaacatagtgaataataaatttttattgaaattatataataaataattatttaaatgaccaaataaaaggagtaatatttactgttatgcaaatttcactcgtgcaaaatttgactcacttttagaatgtgttaaatataacatatattttatatccctattggagcttattttttaagtgagctaaactaatatagcaagacactattttcatagatgaaaccatcatatgacttgtgcttttttaggattcctcataaccttcattccaccatatttgttggtagctagtgttgatcaacgttacttttttaataaaataatattaggtttgaatatatcatatattttaaattataaataaattgggattcggcatattgatttgcacctatgacacatcaagtagtggtgttggaattttaagatgtcaaataatatatttttcttttatttttatttttatatatttttatataaaaaagtacctttagtgtatataatcttttttaaaataccattagtctataattagtataattaaattagcatttaattagtatagttaacatttggagaaaattaataatataaatacataataaaagtcatttaaaaaaaataattttctacaaaagactacttaataaaaatataattatcaaacttccaaatagattgtgataaccaaagaattaaatattcacatttttcattcatatttctaaatttctagaatatcaaaatttttagagcaatatatctttttgcctaaaaacttttagaagtatatatctccattacatactagaccaaaatattctcaatacttctaaaatatatatagtgatattctttatttgtcatcaaaaaaaatgtgaagtgaagtaataggcaagaattaactaagcttcgacataggctaggttagatctatacttagagcccacctaatctagagtcctaacaaaaataaatcttttttgaattatacaatttctttattaattttaaaaatatcacatttttgtcaaaataagagtccaatatttttttttcaatggtctattatattttaggaccggccctaaaaaaatcaagttcatttaattaataatttttaaaattataaaaatttattttagtattaatattttcttatcaagtgagtatcaaatattatcgtatttaatttatatgatataatataatatatatttttttttgaaaatgatgatataatataatttaaacatcataatatctaaataaaactaatatttattattaaagtgtgtgaattagtataacctataacgtaattactattttataaattttatcattaattttcgagtttttagcaataaccaagatattcgatcgattataagagttatctaagatgtttctcgatattgatattttcttatgctataaaaaatactttttaagatatttataaacatcataaagtggcaccaatatatatctagttaattgcatctaacacaatttattaaattgtaataaaataaaattaaaacgttgtgattttttagttgatatatgcgcataatccaaaaaggtggaatattaataattgattctactttgttatgaggaaaatgcttaactgaacctaaagacaaagtattaaagttgatgttgcgctatatctatattgtcttggttttccagatatggcttcatgttatatttatctatgatcaataggaagatagtggtgttggccaagcaaaataataaaaagctgtttctacatgtaagaaagtggtgaatgtaatgcatgtcggtatcaataatataataatggtatgacaaaaatcttatatagctttttatttaaattacaattttatttaaacctttttaattattattttatttgcacttaattctttaaatttaaattttgatattaaaactctttaaattattgaactacttgtaaatttaaggtgtcatctaattttgatagttaactgacaatatataggacttatgtgtatacttttgtacacgtgtcaaatttatattaatacaactaatattattattttaaa

SEQ ID NO: 37366 - DNA, 5553 bp, Cannabis sativa
ctggtgcctaatagcaatgctcgaattgaaaatacatatttattaaatttataatattaaacatttatttttaaaaataaaattataaaaaaaatattaatattatttaatataaacaaaaggttctagtgttgattaaatttaaaatattaaaaaattatatttaaaaaataatcaaagaacaaatatacatacattaattattataagaatgattacgcaatggttacatttatattgtaaccatgatggttacatttttgttgacttataataacaagttactaacacgtaaattttttattttagaattaaattaattataattaataaaataattaatttttaatttaaatatttaataagaccctttttagaaattaatattaataattttatttttatatttaagtctccatatttgatgtaaccattaaaatctcctctattgctatatatacaactctaatctaacaaataattaaaagagactgaataatacaatttataaaatatatattaaatgatttttaaatatatatatatatattaaactctaaaatatattgctaagatataatttaatttcgtattagtgagaatttagtttttgttagagtttaatatatgtttttcttaaatcatttaataaataattttttaattttatttagttagacgcgtggctggtatgtcacctaagctccaaaaatgccacataagctttcttttggccacttgtgactgaaggggcaaaattttataagggaaatagtttagggagatttttagcaatagaaaaaatttgaggaggcaagatttaaatgtggtgataattgaaggagcaaaattctatttctaataattattgaagaaaaaaatcattttgaattaaattttttttttataaaaggtaaatgaaaatttttattgatagttaaatcagacataatttattacatgtagatatagttcatcgtgcataatcaacaataatagacaaattaagttgtttataataaataaaaaaaaaatacttatactattttcaactaaataacccataaatggtgtgaagtatcaaaagaatgtaaaaaatatattagattttcatcttaaataaacatgtgacaaattatacttattaataacaatagtcttccaataaaaattcagcagagttatcttttttctgaaaacaccctatttattcaaattaaaataaacgagaataataaaaccaacttcactcaaaataagaactataacttctattgatccaatagaagggtgacaaattaccattattaatagcataaaatagtagaatagataaccattcaaaaataaaacagggaattaaaaacaacaaacaaaattaataggatcaccaaacacatctattttgaattcaaattagcgcatgcattcttgaattccaattgaggacaatggggacactaaaattgggttaattttctttggagcattgtctgtatagccatcattattatattaattatgttttctatttctatataaaataagctcaccccattttgtctaaagcacttgttgctgttaacttggatttcgccccacttctagattagtttcatacattacattgaataaatatcatattcatataatacaattcaaatcttttaaaatcataatatcaaataatgatagattcttttaaaaaaaattattaaattttgcgaaccttattatataaaattacacaaaaacaaagttaataaataaactttttatcttaatttgggctcggacgtgaaccttaaatctgaacttgaatttaaacctggacctggagcggaggttggggactcgacccttgattagaaccttgactctggacttgaaccttgacccggactcaaacccagtctgagatctaagacccgtacccaaaccctgacttgaacttagaattggggtctcaaccccgaattcaaaccaaacttaaatctcgaacccaagattctggccgaggtcaggattaagattggagtcaaatttatagtaaagataatataattttatacaatctattaagacaaattaatattaaacataatatttatattaaatatataactaatatagtacaatccaatgtaatatttatacaatatataatggtgaaccaaacaagcttcttacactgttattgttctataatatgactagaaattgaagaacgacaagctcgtgactcgtgagtgacagttgatgaaggacaacttggatgtagggataacacgaattgcatagttatttttaggctaaaattgaaatttgtatttggacaaatttttgaaaatgcacattttagtccatgatttgtgtaggggccatatgttttgcattttcaagattataaaatcatttccaattaaattgaaaaccaaatcacatcggccggcttccccttctctgttaacaaactctgtttaacgaccaaagccaaacgattattttttttttcttttttgtctattgactgttccattgtttttgtcttttaacgttaattgctcattatttttcagctatgttgaaatttgccttacaacttgaaattggcttaagcaaaagtacaagctagcttgtccaagttatgcacttattaatcaataattcttaatctaaataagtaaaaaaacaatatatacgtctatatttatccattcccaattatggtatcattttacgtaacaaggtactaaaattatgagattaatacaaatcaccatgaataatgatttgatagtcaaattcacaagtacgagctaattattcatctctagaagaactcttgaacagagttgccacgaaagcacaagcatgagcatgattaagacttaagagcccagcgatccccattatgagctcccaattctaagtaccataacggatcaagagagaatgaattaactattgaagattataagattctatcttaaaattaattggtcataagtggaattgtccatattcttatatataattcaatactctaccacatattttatttaggacaatgtgagaaaatgatgaaagtgatggtgaaattgttctaatggcaataataagccatgctagagccatgggcagaacaaaccctgaactccatttcgtttcataatatggagtggtctctttcttccaattaacgctgtataaaggagaaagcactactgcaccaattacatcagctagtatcatggccactgatctatgagatgatgttgatgctgatgatgatgagttttggtatgtgtaagaattgtaggcactagccattgattataccacagaaatttccagacccttttttttcttaatttttggattgaatgatttaagttgaaagccaagaatgtggtgttgtgggagatttaagttgaaaggaattagatggttaaggaatctagtagttggaaattaagctgctttttattagaatattaggaaaactgagaggatagagtcatctgtagataaacactcaaattgcacacttaaaacgaacacacaataaatgaagtccttattagttgtgaatcacttatttaattaattagcaaaaatataaattgaaacatataatagaggcatatatatatactgatttctcttccttaaaacaaacacataataaaaaaaaaattcagttaatttcaaccatatactcatctacccttcaaagtttaaacattagtggcttctcaacggtacttcaagacagggactctacaaaggaaccaagttaatgttaattacgtaaagaagcaccaattcacagaacaataacaacatataggtatttgcagagagatataattaattacaggggtcctatctacttaaaaaaaaaaaaattaaaaaatttaaggaccactaacttattaggatcaattttcatgagttaccatatgactgaaatattatctagttattattttaggttcccttaacttggaggaaacttaataaaattaatataatatccgtccaaggccaaaaaagacaccatattttttttttttcaattataacaaactttgtaactaaaaaagtaaaaaaatcatgattaaaaattataattgactagttatcactaaaaatttacgattaaattataatttattagtgactaaatgtacttgttgttagttaaaattaaaatagtgataatttagactatatgaaatgtaaaaattgtgctacatttgactcaaaaatgattttatgatatatttacatcaatttttatggttcaatacacaattataaaatttgatgcaaaatttaatttaattaatatttttattaaaaatataaaaagaaataaatacaactttatatattttattatgtataataatagaaaaaataaatattagtccataatttaatattgtcatcaccaaatatactgtaaaataataaaaataacataaaagcaaataaataaaaaattttgcatttacgttgatgtacaaattttgtaatataacaaatgttgtgtcaaattcagtacaatatttactatgtgctaaatctacatcatattttggcacaccattattattaagtgtcgtatatttaactttgaatcacttatgcatctctattagatatgttcttcactaaaattttaacaagatactcacttagatataaagtatttaaaacgaattgagaaaagttgaagagaagatacaaaacaatatttttataaaaataaatggtaaaaaaataaaaaaatcattattacttttcataaagataaaaatagtgaaaaaaattacatacaaacttaacatatactcgataaatacaaaatttattatcaatacatttagtaacacttttttaatcagtattgtaactttttaattagaaaagtaaaaatattttcaaaaaacatattctataaacctcttcttcacctttcaattttttaagtgagaatcaaaattttaataattttgaaaaaaaaattaattttaaaatttttttaaatattttttttttcttaatcaatatcttggactccgacctcaacttagatcttaggactcagacttcggccttgaccccagtctcggactaggaccacggccccagcccaaacccgtacttgaactcgactacttaaaaaaaatgaaaatgaaagttatagaacatacttttaatttctatttttaaaattaaaaaacaaaagagctagaacacatttttattttttaaagacataaaatttaatttcttttttgcaattaaattaaaaaaattaaaaaataaaatgttactaatacgaaaatacatttgggtaaaaatgaattcttattgaatagagaagaaggttacagaggtatatatacaaaactcaaaacagagcaggaaactaatcaacgactcagcctgtaaggactaaactgcccttaactaaaataaccacctaactaacttaataacagaacagacttcaactgaatataaaactaaatcttgtta

SEQ ID NO: 37367 - DNA, 4279 bp, Cannabis sativa
  modified_base (40)..(45): a, c, t, g, unknown or other
tatattaataagtaaatccgattatattgaaatgagtttnnnnnngggcataaaacccaacatatttatctacaactaatggtaatctcttgaataatcttgctagaggggttgtgaaggtggatttagatgatgataaaccatccttttggagtaaatttttgaaggtgcaagtcgacattgactttgctaagccccttacatctggatgctattttgatttagcaaatggtgaaaaaagatggttacagttcaagtttgaatgaattggaattttctgttataagtgtggtgttcttgggcaccaacggaggggatgcaagttggcttcacctgtgattattacaaatcgcgagggcaccccgtttcccatgtttggcccctggctatccactgagtttgcctatttggatgtcttctccggtccgatctctggttctgctcgtggagctcggggcacaacgccagggaaatcacctcatgtagagaagtcaacgagggtggttgacaggatcattggcttcggtctgaggggtcaagcttgtcgaccaaggggcacgaaggttatggtgaccgctcagggtcacgcggctgtgggttccgagatttcaaatcaggcggtgtggctccccaagactacccctgatgtcactgttcaggctattgccatttctggtgttggaggtgaagagggtctgctagtaggggaaaaggcttctgaggtggtacccgttatagcaattgaaggattgatcgtgcctcgtgttatgagaaaaatttgaatgtggtaaatgaagtgggttgtgcggttggtattgggccgagtttatgtgggcctagcgagttgtttaatgtgcctttgaccaactctaaggtggatgtggggactgaagtgttaagtgataatattaatattaatttgaatgtgaaggaaggcccactctgtggtgttaaggctacggcccagccccctttaggccaaaataatattatggacccctctgattcagtcaaggagtcaactaatgggcttgtggattagaatagtcttggtggggaattgggagcctcttctattttgaagaacgtggccactagtaatgtgagaaattcctttggttgtgcttttgaaagtcctcttcagcaacatagagaggatattttgcatggtagtggggttatcaaccagtcctctctcgggcatactaggccaacacttggtgtggataatattgtgggtaaggctggtggttcaaaggtcgtgacaagtgatgaagaagaaaatgctctagctcagttttttaagtgctcaagaattattacttcatgatctaaaacattttagaaaattggatttgtatgagattaagagtttggggagtgatattggagtagtgccttcctcggaaaccaatgagagaactatgccttttaagaagcgtaaatttgaaggctctgcttcgttgtgctctagacctcacaaagttatcagaacgcaccctgatgttgttcgtgacttcccgtgggatactaaggaataagaaaaggaagataaagtggcctatgaagaaccaactgaagagagttttggatcccctagctgctctgatggaattatgaggaaccctctggttggttcttttgtgattgaagattccagttccagcttgtctgttcactctcatacccctgtggaggagaatgtcatatctactccacaggagccatgagaggtgttgcttggaattgtagagggttggggcagacctctacagttcgcgaactgaagtccgtgattagagcacgctctcctgattttgtgtttctgactgaacttaaagtggaacccacttccctggtacgtatactgaaatctctccatttttattttaatgttaatgttcctcctattggcactgctgggggtattattttagcttggaaactgggttttagttttaagactatctcttgttcccgcaaccacattttcggccttgtttattcagatcctcctacccacacttggcttctctcgtgtgtgtgtatggccctccttaccttcatgctaagacaaagttctgggtgacctcatgaaccttggagataggtttgggggtccttggttgattctgggcgataccaattttgtccttagcaactctgaacgcgatggggcgtccggtagggacccttttatccctgtgatagctaatcttgtggattcccggggacttactaatatgcatattcaaggagataagatgacctgggataaccaccggaatggcacggaccatgtgaaatctgctattgataaaggtcttgtcaatggagcttggttccagttatttcctaaagctatcctttgatcctctcagacaagcacctcggatcatagacctttatgtctactctctggagggcaggaggtcaagtttaagagatgtttcaagtttgaagagaactggacgagggatgatagaagcaatttggttgttgccaatgcttggggctccgtttatcatccttgggcctctgttagaatcttcaagaaaattggtgcaactcgggtggccctgctgcattggaatagaactcaatttggtaagtttgattgggccattaaggagctggagactaagcttgacaatttccagaaattacctgctggtgtccgagattggaacgtggaatgtgatatttgtcgttccgtaaatgaaaatttggccaggaaagcgatttattggaaacaacgggctagaatctcctggctgaaggatggttataaatgctctaaattcttttttctctcgactgcaattagaggaagaagaaatgccattgaaagtattttgagcaaagataacgtctgggttaatgatagagaattaattggttttgaattcttagactttttcaagagtatctttacagcttctgattatgaaagggcaattgattgcacccagttgttccataagaagatctctcaggaggaatatgagggggtcattttatgcccctttcgagatgaaatcagatccactcttttttccatgaataatcataaggctcctgggctggatggaatgtcagtgctctttttcaagcactattaggagtctgttggacacgacttttgtgatgcagtgtctgattttttttgttcaaggcaatatgcacaagggtataaacactaggaacattgtactcatccctaaaggccagaacccgaaaagacctaataacttcaggcccatttctctctgcaatgtgatgtataaagtcatatctaaaatagtggcaaatagaattaaacccatcctcccctctcttatttgccctacgcaggctgcatttatcttgggtaagaatatccaagataataatgtgattgtgcaagagattatccactctttcaaccggaaaaaagggaaggaggggtactttgccattaaaattgatctcgtcaaagcttatgatagattgagttggaaattcatagatcatgttcttgcctgttttggattcccacagaagttctgccattgggtttctcagtgcatctccaccaccactctcaacatttgcctaaatggggttcaggttggtaagattatgccttcttgtgggattaggcagggtgaccctctctccccctatctcttcatatgtgctgctgaagtttcatctagactcttagaagaggcccttggaaaggggaatattcaaggcattcagctgagtaggggtggtccgatcctttcccatattttctttgcaggctatcttattctagtagggcgtgccaatctaagagaagctcaaagttactggagctgccttgagaaattttttgattggtcaggccaaaaagctaataaactcaaaacgtctatcttcatcagcaagaataccccggagggcatgagaaggggtattaaggacaccttgagaattaactatccggatggtgtcattaagtatctaggtcttcccctattcagatctagacaaaaggatactgattttaactttatactgggcaatcttacctctaaactacagggatggaaggaaaaaactttatccaaggcgggtcgggcgacccttatcaagtctgtgggcttggctttgccaatctatgccatgtagactactaagctccctaactggcttgtttataagattgatggtcttatccgagatttctggtggggattagagaaagggaaccatggtcttcacctaacagcttgggataagctttgtctcc

SEQ ID NO: 37368 - DNA, 8025 bp, Cannabis sativa
  modified_base (1176)..(1176): a, c, t, g, unknown or other
  modified_base (5846)..(5849): a, c, t, g, unknown or other
  modified_base (6245)..(6247): a, c, t, g, unknown or other
  modified_base (6276)..(6278): a, c, t, g, unknown or other
  modified_base (6307)..(6309): a, c, t, g, unknown or other
  modified_base (6335)..(6337): a, c, t, g, unknown or other
  modified_base (7876)..(7891): a, c, t, g, unknown or other
caattggtatcagagcgggacactaaactcttagtgtggtcctttaactttttcttgtgttttctatgcaatatgttgttctttgtagaaaatggctctatatctcgttcttcaaaggttggcaacaataaaggcatgtctaagtcctcgagaggtattatttacttaaaaccttttacatccaacaagataattttagcaatttaatatttataaatattgttaagtcctttttgacaaaatagtttttaattaatgtgtatttttattgagcaaatagattgattttattatgataaattcgtgccctaattgctccatttcttttatggaaagattccttctcagttggtctcttttggtttaggaaagttcttgtaagagaaggaattttcttatggaaagttgtctaactttgagaaacttgactttctctttttctaattgaagattttagttttgccttaattagagcagatcaaataaattttatttggtaggtttgaagtccaaatttgtgatcttggtctattttggaacattttccttctagtcctgatttgctactgcagagcccaattctgatgctacaaatcaggaaattttttaagaaatttttgtacagctggaaaatcatttttgtggctatctctagggttgctatgttctataaataagacctagagagcaaccaaacgatttcatctcttctagtatcatattttcatatctttatttgtgagaggagtgtttcatttgtaaaacatagagtgttcaactaggttttgattttcttattatgatctcatactatccatagaataagttgaagagaagctttgaacaagtgtgggtcttcgggagaagatttttctaagtctcatttcgggaggaagtgaacatatatcttcgggaaaagatgtgtttaagtcttacttcgagaggaagtaagcacacatcaatagctgaagggagttcactacttggtgtggttcaaagatcatattaacaaggtggattacaaagagttgcttcaaatcattagagggagtctaaatttgtttaagtcaattacttttgtaatatttgatactttactaattgattttattctctgggtgtggccccatagactagtagtgtttgaaagaacactgataccacgtacaattctcntgtgtcaagtttttaaattctgcactatttatttctggttctcatatgcaaatctgtgttctgtagtgacaggattgcaatctgttattgcagactgttacaattgcgttcttactaaaatttagtataattattagcattttttaaaaacagttttttaattggtatcaaagcaggacacaaaactcttagtgtggtcctttaatgttttcttgtgttttctgtgcaatatgtcgttctttgcagaaagtggctctttatctcattcttcaaaggttggcaacaacaaaggcatgtctaagtcctcgagaggtagtatttactcaaaatcttttacatccaacaataaaaaaggtgtacaatgtagaaaatatcatggttttgtacatatacaatcaggatgtgtaaatactttaaaaacaaccaaaaaggttacggatagtacttactctagaattagtgatgaaaaggaatcaaataatatagcactaacatctatgttttctagttccatgtcatttgcaggaaaattagaactttgtttgtcttgacaacactagttgggtaaataaagatgttgatgatgctttagggactgattatgatgaatcagatttggatgaggatcccttgaaagaagcgtacagaaatatgtatggtgagtggttgaaattgtgttcaaagtatcgtttatggacaaaagatattaaatctctttctcaaagaaatgaagagcttgaactaaatgttaaaaattttaaaaataagattgttgagaaaaattatgaaattaaacgattggccaataaaattgagcatattgtgaagaatacaacaatgccaaatctaagttcttcagcttttgaagaggttcaagatataggtcaaacaaatcatgttgggtcgggatgttgaatatcaatctaaattgaacactaaatttgttaaatctaaaaatatgccttctggtttttctatctaacactgcaggaatctgtttctacagctgaacccctgttcttaaagaaagggagcagctaggtaagaatgacaatttttataaaagaaggaaaaaaattcattcccacgtgtcacttttgtggtgttaaaggtcacattcgacctaagtgttttaccataataaatctcttcaaaaataaaaatttcaataattatgaaaaacaatctgttagaaaaaagagattaaaattcaagaagattatttgggttaagaaaaatgaatctaaatgtccttctaattttacttatcatattgcatgtgataataccagtactatacatatttctaaaaaacatgttcaacattcttgtgcaaaacacattaatatgagacatcattttattagggaacttgttgataatcaaatattacagttgaaatatgttgatactaaattttcactaaagccctagattcaagtcgctttgactccctcagaaaatttttggggtttacattatttaattcttttcatttggttctctattttgtacaaaatttttgagtagttcttatcttgcatatatctttctttcatccttggtaaacaaaacatgcttatgcttttgggtgataattaacttagtgtcttgttctcttcatacttttgaggttgtgttaaaagattcaggttacttacatatatgtgatcaggataaattaaagtattaatgtacaaagttgaacaattttttgttttagttcttatcaagcaccgttttttggggttctgcgtggagaaatggttcaccgtttctggaataacggtggaccattttttagccaaaaattcacaaaaattcaccctaagctcaattttattccaaatttaactaaaaattctagaacacctaattaagacatataagacataaaccaaccaaaaaatagcccaacaagcctctgaactaaggttttccattgatgaactaattttaagctcataaactcaaatttagctcataaacatcaaaccctcttcaaaaccagccaaaataaccccaaacaactcaaaactaagttttaaaatagctcccaaacttcccaaatcctaacagatttgaattatagaaagacatatccaaacctaactttttacttgaaatttaagaagaaattaagaaaggagtttaccttagcttgtctccttcctagctgctatgaattgatgtcaatttaaacctagtttgatctggtgacgggaaattcttttttccttggttcttgcttggatagaagctagagagagaatgaagaagtgggttgcttttatcatctgtttgatctttatcacaaggtaaataacttaataaagtctattaatattcagtttagtgtggatttatctacacaaaaacactaaagacaaaacttactaacttagaataaaaattttcccttacttagtcatgaagtaatctaaccacttaggggtaaaatggtccaaagtcataactccgaataatctcgacattctaaatgtctaattatcttgctctgctaattccaagatatttaatcgtatctaatgactctaatcccaaattattgcattccactatcactagccataaaacataaaagtcatgaaattcacatattgcatatgtaatactcctagaattcaaacatgtttgagaaaatattttcttaaggcctatttctcacaataagtcctaattttctaccaaaaatcacataaccataacttaattaattaaatccttaattatctgctaattctcatggtttaactatgcagacattatatcgcataacaataatagagaaacagataggccgggaaagagggagaaaaattagggttttcaaaatttggtttttctcatttagggtttcaccattttctatatatgccatatttaattttaccctaattaattattttattatttatttatttattacaaaacaaaatctggtgtaaaataatatgctaacaagaatactaaaaaaaatctttcccaacaatttatcactgttgggaatactaagcattccccacaactataaactattggatctacttagtattcccaacagttttaaaccgttaggattcatagtttttttttttaataaaaaatatttagtattgcccacggttctccaccgttagcaataactattctaacagtttctttccttcggtgctaaaccgatggaaaaaacctccgcttacctattccaatggttttcatacttgaccctcttattaaccgctgtgagtatcccattttgtagtagtgagaatgtcacatttattttgcactttacatttaataaataatggaataattacacataaaagaaatatcttctctattcccggaggtggttaagctttgactgtcttctagaagcttcatcttcgagagataaattgagaatatgctgaagggtcctctcccattggagagaaatggccttgggcgacaactaacaccaacatagtgttagtactcgtgtggtacataggttggtgagtacaaacactatgttggtgagtactagtgtggcacttctctatttgggcatcttgagttgaatttgacaagtccttcaaggttggtagagattccttagggttttgagcttcaaaacacccaaaatttctccttgaactagcctacacaagtactgccacaaagagaatgccggtactcgtgtaagacactccaacatttgttatgtgatcagtgatgtaggaaagaaccatttggccactagattcctttagtctcttcttgggcgagtactgacacatcctgagtgtcaatacacgtgtgttatgcaagtactgccattcagacgagtactgatactaagagagtgccaatactcgtttactactaatttcctccttttattgtgtaattttgactttagggtccaagtcttagtgcatgcatatgatatttttctttaagtgccaattcttgttgagaatttcttggaatgcgactactgatattaggaaagtgtcagtagttgtatatgactatctctcttggtatttggtgatgctattttgtcctttgtgctcttgtatccccaaccaattaagtattttatgttttgttggatttcttttcaaattaggattttggaataagtaacccttccccgaatttattaagaataccaactctagggctaaaattataaggggcgagtactgacacattaaaaatgtgtcagtattactcacatattacttcttttgtgtcatgtggcactcaattaagatgtcatctggtccatcgttcgagttttgactccgtctaattttcttgtatcttggtcaaagtcttaaaatttgactttttgacactactataaaagtagattttcccgatgtttttaaatagccgtttaaagcattctcgtcggtttctataactatcgcaaaatgggtaaaataggcgacagtttttgtgaacttcctgacggtttaaaaccgtcgcctataatagggtataggcgacggttttaaaccgtgccttgtactataggcgacggttaagccgtcgggaatgtaaaaaaagagaaaaaattacagatttttctgtcattaatggcagaaaaatctgtattttcccttatttttttcctgcattagttttannnntttacctaaattaaaataaaacatctaattaattttattagaataacaactaactttaaaatacattaaatttatacaataacaaaataaatatatataataaataaaaaagtatatgtaaataaataaatgtatttatatcgagctcagagagagagcaagagagagagggagataaacgggaggtggtggtggtccgacgtatgagacagagatgagagggacactgacgggaggcggtggtggtttgacgtatgcgacagagaaaagagggagaccgacgggaggaggggtgggtggagatcaatggacgagagagacgagaagaaagggagattgagagacggaggtagacggcgagagaggagggcgatggtgtggaggcatgggtggggnnngatggtgtggaggcatgggtggggttttnnngaggcatgggtggggttttggagagttannngtggggttttggagagttaagatttnnnttttagggtgtgggaaatggagaagaaataaataggcatgtaggaaatagaaaagaagtaggtgggcacgtgagaaatgtggcgagaagtaggtaacaattttttattgggcccttatacccaacggtttaaaattgtccctcgtctatactataggcgacggttttaaaccgtcgggtataagggtccagtaaatttacgaattctttaaaactattgcctattcttgtaaatatatatttataaaccgttaggaacattaatttttcttgacggttttaagcagttacttattttttttagcgacggtttttttgaaaaaaaaaacgtttttagtaccgccgtgaattctgacttctatatagtagtatgatttcatgaaaatcaagtacaacaattatatattttttgaacaatatagtaattaattaggcaccgtccaacttttatgaacaccattatttacaagtgtgaatgagataactggaaaatttatggaagaaattcgtgtaaggaataatatcaatatttaactagacttgattttgtcgtctattacttttaagtttattttttaattagaaaataagaaaggctttataattatagtgatgatgtgaaatagtcaaaatgattccagtgaaactgtaggacttgaagtcaattaacatttgtttataaaaaaaaaaaaaaaaaaagtctgttaacattgttgtgtacatcatagactccacacaatttaatttctattattattatttaaacaagaaaaattataaatttattttatttcaataatttaatactttccacgtccgatatacgtagcttggagtggtttttcgtatatgtcacaatatcacttttactttcacacataaaaagtatttttataatcttttattttgaatttaatgattttagtttgtaatttgcttatgatatagcttgttgcattaaatatttcaataataagtatacgtgtactcatttaaataatgtccatataacagtatttttttgtatgcccacattcaagtttttattttcatttttttataaaataaaatatctaaaattatcattatcttctataatgaaaacaaacccaaattaccacaaattaccatatgttttttttttattattattatttttcatctatctcacctatttgtgattttaatgttacaagagattttttttaattgtctttctctaagtgttaacctaattaaataatacatttaaatatttttagtttttactattatatttttttttactattttttatttcaaacaaaaaaaattaatgagccaaacaaagtttgtacaatattactatgataaagatcaaaagattaatttaaatttatatatatggggtgattctacaatgcaccccttaaaagggatgtactgatggacccttgacttgtttcggcatccagaagaattttttagtctaattttttttttcatatttatgtacgttatagctttttaaataacctacaaaattttgagaaattcagannnnnnnnnnnnnnnnaaaataatgttcaaactgtctattttacacgcgtataataggcacgcgtgcaatacactgtttgaacgtatttttcggcatgttaaacttttccaaatttcttaaaattttgtaagatgtcttaaataactata

SEQ ID NO: 37369 - DNA, 6945 bp, Cannabis sativa
aattgtgcccgtgcatgctgcaactggacaattgggggtcatttgtacgttgtggacacgtatcatccaaaggtttaacttttaaaagtaatgggcacgtgtcgctcaatagtttcaccttcaaaagtagaggtctgaaatatccgttcactaccatgactggacacaggggacaagatctgatccagtgtcagaaaaagcataaccgtcactaggcgatccggagtgcaccaaggtagacatccgcaacactcttgggcggtcgatatccgcgataagccattcgagtacccatccgagtatcagctgaacaggcttccatgtttactccgggtccgggagagatattatgtcttctgtgtccaggaaactaggataaggccaggtaagcttaagtcaatatctcgatcttgacttgttccagattccgtgaggcttctcttcaacaggattgcaatgggggattttaattagcaagattatgaggttaatcccttcttttatatgccacgtgtcacaagctcaggaatacggataacatttacaccccaagcttccaggactcttggagatccgggagcttgcaatcttcttccgtctcttagataagtttttgacacgtggtaactgttgggatcgcggatgtaccccatgagctgtcatcaattaaaggaccataaactgaaggtaccacaggcgtggcacgcatgtggcgcctttagtgcggttgttgacaacacgcgcgtgctgggggcgcatttcttgggagaagttgcaatgatggtaggacgattgaaatgacctctcctttaatgcgtacggtactcgaggcgtgtaatgatgaagaataacgctaggggtgagtttgtaatgtcatcttttcaacttcccatccatcggatcaagttgtgctttttggaagaagagatatgggtcgtccatttaaaatcgcaaggatctcggtcgaagtataaatggatttgccaaacccatttcttctgttttcatcacttcagactctcaaaatatccattttcaaatttcaaacctgaacttcctattttccaaaaaacttccttttcactgacgtcttcaatagtgaatgcaagaggtcttcgactacttgattcaatattttctaaatcaccgttcagcccgtttcccagacattaagtcattagacctcgaactgttccacccccagactaacgaaagcctcgacgctcaaaccggcaacgatcgtgcaatcgactgggttctacactcttcggtagatttccacgacaaccttcccaactcatatgacaagtatcctaacgctttgttgactatttgctatttcgtatctaagatagaaatgcttagttcaagctaggtctaggatgtcttgcatgtttgaatggtaaaatgttgtccgtagagattcatttctagaacaggattgtgtgaaaattttgtgcgccatgagggtgctgatactgtatggaaagctaggatacggttgtttgtactccataaacatttgcatgtttttaagatactggaattagagtttgaacttggcatgacaaacttttgaatgaacactaaaccaatgtattttcttcacgtccatttggagttgttaagacttcgaatggccttaatttttggaatttaacaactatgtctttcccacacttcagagaatatggcagctttattggcttgggaggacatagtcttatttgctcgtggggaaccttatagctgctcactgaatggttgcacccacacatacactttttaaggtatgttgttgtatactaactgtgattttgattttgctatttagagttggcttactaaccatttgttcgttatgtttgcagatactcccgaagcaaaaatgttgaagtcgttgagcgacaagataacgaagagctttgctaaaacggagggctccaaaggtaaggagaagggcaagactaaggcctacaggacctgtaaaccaaggcctccgtccacctcttcttctttagatgtccgagaagttcctcctcctgcgaaggctaacaccaacgctccaagttaccaagcccttgctgaggcagacaaaactcttgtcgcgactggggaggcttctagggaactggttgtgtccgagagtggcacagcccaagcaagccatctcacacaacaagctcaagtggaggctttgcttgacctggtcgtggaggggaccacctaagagaacactaggacagccaatgtctcgaacgagagcttgaattggcctgtgtttcccaaaaagggtgtttccgtgacaccgaagcgcaagactcctcccccatcttctgacaaggacgccaaaaaggccaagtttgttgcggatagacaacatttttcgggaggagaggggtgatgtttgcaaatccaccgctctactcccaaatccatcatcatcaattacaaccaaccaacaacaacagcaacaaaactagcaacaacaacaacaacaacaacaacaacaacaccaacaacaacaacaacaacaccaacaacaacatcctcagtcagaaaccatcgttccttcaaggggccaacaatctacttctagccagccactagggcttgtcacttccctacccagaatcctgctgttgaacttcaaatttcaattgaagcctactatccttggccatgacattctgaaaaaggtgggcgaggcaaacaatattctgaggaagcgccatgagaaggagaggattgtgctccagaagagggctagtaacttttccgcagtaaagaggactgagatcaccgaaggcatccgtaccactgttcaaggaggactaatgatagacactgaggccctagtaaagcgaatggtgcccaaggttggaagagaagtagtgtccttcgctgcagaactcctagatcaagtggcgggcagcacgagtgagctgacttcggagaagtgggcgatttgcagatcagcgatgcgtttactttggcaggcttcaaaataacaggttgtatgataagcctaagacttatcttatgtatcacaaaatgattaaatgaaatgcttagtcttttatgcacacaagctgagttgtcttagtattttaattctaatggtccaattgtaatcctaggtggcccaagtctttttaagaccaatgcttataaatagaaagggggcaacttcatttagattagcttggaattagataagagtagactctttgtggagagaccaatcctctcgaaacattgtgaatttggagagacgagcctctcgaaagctcgatattgtaactttgtcactcattttcagaataaagatcacttgagaaactcattactgatatttattttgggatatagctgataggatatttctactctaagattattctatcaaattggtgcggtgagctgtgaacatggtgcccaagaaacaagcagagaacagtttttctttcatggttttggaggaagattgtgaagatctgaaagttgcatcttttggaatcaaaggatctcttcatgattcaatacaagagataacacgacaacataatcaacagttgcaagaatctcttcgagacatgttacaacaacaattcaagactttcttggaagttcaagaaaaatcaagaaagaacccaaaaaagatgttaatggagttgctggcaacaaggaaaaggaggaaagcaagggcccaacgagccccatggcacaccaacacagggccacaatgctagaaaacgatcagcgaccacaggcatcactcctatggcaggattctatatgaatcggagctccgaggggtgtgtgcgtgccgctccaaggtttcacctttaagagtagagatctgaaatatccgttctagcaaaaaggtggatgaggtgagcgcactaccatgcctggacagaggggataagatctgatcccgtgtcaaaaaaagcgttactgtcactaggcaatccggggtgcaccaaaggtagatgtccgtgacactcttaggttgtcgatatccgcaataagcccttccagtacccatctgggtatcagctggacaggcttccatgttcggacaactccgggttcaggagaaacattatgtcttccgcatccggtaaactaggataaggccaagtaagcttaagtcaatatctcaatcttgacttgtacccgatttcgtgaggcttctccgcaacagggttgcaatggggaatttaattagcaagattatgaggttaatcccttcctttatatgtcacgtgtcacatgctcaggaatatggataacagacaagtttctaatgcggtattgtaccacacgccctattttacgcatgtatggaagttgtaaccccaattttttaacatgacagtatttattgtaattagagtaagcattgtaaatgttttcaagagatttggaatattctatctggactgtttggactttgtttttgacaccttaaactattccaaatttctcaaaaacgtgtagaatgactcttctagctataatacacgcctcatgtagaaacctgaaatataacttcacatgtgcaaactgaagcgtgtaatacggtacgacaaaaaacctgtggtaccatagttgttcccacatatatttatattgaggaggggaattagaccttgaaccttttatttgtgagaggggtaatactactaggctatgcctataactacacctataattaatattctctaacattagttatcatttacatacataatacctataattagcatcaatgttgcaactgtcaattaattgtgaaagaaagctaatcacaaaaaatcagacaacagtgtggcatatacagtatgactgaaatgacaagaattggaaagatacttacttgatgctccatgcgagaaccatcaaaggggacttcaagcctctgccgtaagtttctaagtctttcttcctacggggacacaatattacagttttagactaacatattagtaagggcaaatttgcacttggcaaagattattcaaaaacaaataaagtgatcaacaaagcttaaaatgaccaatttatgcaagttttgacctttaatgaacaccactaccttgaaaattaaaaagaaaacacaaagaaaaattgtagaatctcggaactgtttctttttctttgtttttttttttttcccatccaaaaagaagtataaagggcatacagacaagcctaaatcattaacttttgccccgaaacacacaaacacaattataacacaattatacaaggatatataaatgaaataaaagaacatagtttcttaaacttatacacattcttcttttttttcggaaagatattgtatacacattctaattatacttcctccgtggatttttaatttgtccacatataataagatagcacaacgcatttaatcagagaatgggagatcatcaagtacaagataaagatacagataataatctcatacctgtaaaggactaagtggagttcttagaaaattattgttttctcttatttgtccagcagaagtaagggtaaaaagccacccaatgaaggatacaggtccaattacaatatttgctacagagacaaaaactaatgtatgagtcaagaagaaagtaaatgggagagagagagagagagagagagagagagagatgaagagacaagatagtcctctgatcatatgcaaaaacaagcaaatcatactaccaacacagcataccaaaccagtgcgcccactgtgcaattaactgagagaatataaagctccaatggagttgttccttccttcgtgcatcatctaagagatcatctaggtgagaaccctataatataataacataagacaaatgagacaagacacaagaaaatgcattgaccaaactacatccctcactcattgccttccctcttaaatcattaaatactcgacatattttctaacctctggatgtctttcgtcatatctatggttcccaagtagaggctcatccaatccttctaagccagataaatgttcatgcccttttccatcaacatctgaatgatggagccttcttctcaaagctcttgatgtcattaaaaactttaatatacttcctgcttattaaatcaatattttagcatcattttaagggttctctagtacatccaagtaaaaatacaaaaaggaaaggataactaaatcagcagatgaggctaaaataatacccgcttctctttcccggcattcaaaaatttaaatatagttataaatagtaaaaaagaagtaataaataacaaaaacttgatttgccatgcctaagattaatcgttttctactagaatgcaggtatatagcaaaatagcatacacccattcacattaagcacaagaacttataaatgttagttcatcttgcgatagcaaaaataaataaatctaagcaccaaaatatcctacgatccaactctgaatattttcaatttctgtgtcaataaaacctaaaagaatacagcattgggaattaggtccaccagaaaagttacaattttttttcatgggtctcccacattaaggactggaagattaaggtacaagaaaaaaaaaagaaaaaagaattaaaagtaaaagaagaaagaggaattagaagggtccatacctgagagctgagaatgattaacaggggaaaaaaaccctaattcagtactggaaaggagttcgattggtatttctatattctttttacttacactacaagcaaaaattggtcatcaattagatactgatcgtcgattcctgtttagtgttcgttgctctgctgtcttctttctttatgtttaattttctctgtatattaatagaaatttttacaccaaaaatctttttttttttttgcactttttattacatttttacccctacacgtctacatcaactttttta

SEQ ID NO: 37370 - DNA, 4436 bp, Cannabis sativa
  modified_base (1364)..(1364): a, c, t, g, unknown or other
tcgcttttatatcttccccgattcgcctttttcttttgtgcaattaaattttagggttacagtattatttagttatgttacttttcttctctgtgaaattatgatatgaaattttctgattggtgcacttggttgttttttctaatttctgatgcaagagttttcagttttgattttccaacatcttcagtatcgattttgacattctatcattgatttttcgatcagtttagtttgatatgatcaattgaattttgtgaaatgtagtgtctccttatggcttggttggcgtcctttgctattggcaagtttataaataaggaacataatggtttttgcttatatatctgtttgtatattttatcgcgttagttctaagattttgaggtgaaccattgattaaagggttacacttcatactcagatcaatcttaaattttgtattgggatttagggagatgaatttgattacctgtctccttagttgggctattaaacttgtcaattcgaaattgcacccaatttcttagtttccatgtgccacgtgcatgcataaccaagaggataaataggcttattttagtcagatagcgcagatttctaaatttaagaagctgcttgttattttgcaacatcagattggctcttggcgttattgttgccactctaaattctgttaaatcttatgttggtctgatacttttttcctacctgtggcaagaaatcatgtatcccagtatacagtttttcctagagcctggatggagatgtgtgaaatccttcaataaggaaaattaaaccaatgtgcatttgcactacattgtatatttgccattaagatgtgaactctgcctcatgactttactagcacaagtttaaagacatgattaagtttatgaacaagcttagggaaccaaatcttttaaattctctatgtataaatttatgaagaaacatatggaagggtgtagtactgtagttataacagtctcacctagtttggcttggaatcagtcctattcttgtagctgggacctaaaacagtaagtatgaaagttttattgaatgagagggaacattgaatagcaagtataaactataatatgcatatacatgtgtatgtccgtgtatcaagtttggttacgcatatgcacaagagctctcatatcatcgagttctcatagcagactttcttttttttttactagtaatttgttcattaacaagtttgttgtgttggttcataagtttcttcgtttatgcatgaagtgagcatagttcttctggtatgatgttattaaatcatgctatccatctctgtttttgtgcatggtgttatgggattctctctctctctctctctntctctctctctctctctcatgagtatcttcagtctgctaagcctgcttttatttggatttctacagtcttcacttgcagctgcacgagcagacaacttttactatccaccagaatggaccccagatcaggtatgtatgaaccatagtttttgagaacattgtgtattgattcgcttttagcatacttacatggctttgcttctcagggttctctgaacaagtttcatggtcagcatgctctgagggaaagagcaaagaaaatagaccagggtattttggttataaggtaataaagcatacatatctttatcatgctttttctcccataaatataactaagaatgattggaaaggttctgttggttataatgtttatccaattttctcttacaattgctgataactttgtcatccaagtgccaattctaaacagtggatgttggtgacaagtaaagagtcttaactcagttgctaaatcatgtgtgaaatttcaggtttgagatgccattcaacatatggtgtggtggatgcaattctatgatagcaaagggtgttcggtttaatgcagaaaagaagcaagtgggaaattactattccacaaaggtactttgtgcaagctgaatatttaaatgcttaatcttatattgtagaaactatgactatattttacactgttaatatttgttcagatgcaagtacatgcatttcctacttgaatttacccccttatcgagatatcctttaaaggtattgttcttttgttcagatatggagctttactatgaaggctgcatgctgtaaacatgaaattgttatccacacagatccgaagaactgcgagtacatcatcgtcagtggcgccacaaaaaaaactgaggattatgacgttgaggatgcagaaacttttgaacttcctgcagatgaaggtgtgatttattttgttgtaatgtttgccgctagccttttttcatccaaaacaattactaaaactaaaaacactaacctgtgatctctttgttgtctgacagtctttggattttagtttgttttcaagtattataagttattaaccattatggtttctttcttcagaaagaggcaagctagcagatccattttatcgtctcgaacatgaagagcaggatctgaagaagaagaaagaagcagagccagtgttagtgcgcttgcagcgatcttcagatgcccggcatgcagatgactactccctaaacagggctctccgagcgaaacttagagtatgttatttatcttgtagtgttcactccattctcatgtaccctgttttctttgacctctataaagataacagtatgttttgctatgttgcttgaatgcatttagttaaaatatagtttgttttgaagaactattttttattattgatttgggaaaaaggaaacaaataagaaaagaaataatgttttgtcccttaaccatttcagggtcaaaagaagagaattgctgaagaagagtctgcttccaagaaaatgggtcttggtgtgcgtctccttccagcatccaaggaggattcttctattgcttccaaagtgaagttctcttccaaattcgaaaggaataggaaggacaagcgggctctaattaatgcatcttcaattttttcagagccgtctggttcttccgcattcaacaaacgactagagctagaatccaagagaaggcgaattaatgcagctgctgcatcaaacattctgacaggaggatttaagccatcatcatggtcgaatggtgcggctgctccaagtaagcccaagggaatttcaataaccacaagacgtttctagcttattgagaataatatatgataattacaagaaagggaaaataagtagtccctttataggcttaatatgatatggtgtatgttttccccccttttccttcatcttgttggtgtcaagagtttttgtacataagtttatgttatgttaaatacttagttgggcattgaatatatattgtataatatgattgctgtgatgcaacgtagcgggctgaccaagtgacaagtttgttgttttttatttttttcgagtacaattgccaagcttgttgagaagcagaaatttatgtcattgtagataggcatcatatatatttatatatatatatagtttataaatgagcaattttaatcaataattagtaattccggttcatgattctggattatgatgctttagttttagttttctctttcccacacttctttgttgagttggaaccaaagttgagagttgtgttggggttggaattatcttggatttaattttttcccccaataaaattcaagttccaaacaaggcttaattaaatgttaacattagtactgtccacttttggaacaccaaagattattaccctctgtttggtcttatgtatatgatgagtgattaatgaagcccagtttaacagctttgaaaaatttctttgtttgccacacatgattggactagattggataattttaccgaactaatttggtcatgctgggtgactaatctaattaagtctgtgtaagattagatcttctctaatgggagatgaaaaaattgatttatatttggtacaaataataatagttttgtgattttttttttcattaatttttattattatgctccaatgtataattgtaaatcttgaaaaaaaaatttaatgtcatttaatgcttatttaataatttattaaaaatataaaataataatctcgcaataaatataaaatttaataataaaataataatataattatgaaagtcatttgcaagtgagcatgctaactaaattttaataataaaatattaaaaatagcagtaaatgtaaaattatagtatttattgtgatgtaaattttgcagcatgctatattgtgattcaaatttggattaatttttgttatatgagatattttcatcacaatttaacatactattggagtagaattttgataaagtaagctatattttgtatttgcatcacttattaacatctcaattgaagatgtttttatttatcccatcgagcatatgata

SEQ ID NO: 37371 - DNA, 4266 bp, Cannabis sativa
tccacatccatgtccgccgccgttgcacccccaactctcatcaacagtgaatcactgcggtccctcatctctcatcgaagtctaatcgatcattttcaatcctctctgcccaaagcttcatcatcgctctgtaacccaattcggcaaagccatgacgtttcacccacttcatctctcctcctcatgccatcttggtccacttctccttctctgccttatataggggtcaagcttgtgactttcttcccagataactctgcaataaacttgcccggagtgcatgccattatgtgctcttcagctccacaaatgggcaacctttggcttccattgacggaaccgaaatgacccttataagaacttcatgtgtttcaggcttagcttcgagaattttggccagagacgatagccgagttttggtgatgatcggtgctggggctatggcaccacatctgattagatcccatcttgtggcaagacccagtttgaagaaagttgtaatctggaaccgtacggtggaaaaggcaagaaaattggctgagaaaatgaaagaaagtgtggaacttgatggggtttgttttgaaagcaataatgggtgtttggatgaattggttgagatgggagatattgtgagctgcgcaacaaactcagaggtgccgcttgtgaagggccagaaactaaaaccaggtgctcatcttgacttggttggctcgttcaaacactccatgaaggagtgtgatgatgaggctataaagagaggaagagtgtttgtggacaatgaggctgctttggttgaggcaggtgagttagtgggtgcttttgagagaggtgtgattgagaaaaaagacattggaggaaacttggtagaacttgtaacaggtgagaaggttgggagaagcaattctgaagagattactgttttcaagtctgttggatcagctgtggtggatatactagcagctcaattggtttatgagacctatatgcagcaacaacacaagtagataatatcctgtattttgttgctatttcttactagacatctttttaatattttagggtcctgtccctaatctactgccatacatattcagctccgaataacatatcttcttatcatgaagatagttttttttcttttcttttttctcttttatcttgagacaatgaggaagttcatagagtcagtttctttgacaactgagcacctatttagttagttggtagaatccatgtgtattacttacttgctatgtaaatggttaaagagcaaagtttgaaaaagaatgaattgccatgatctttgattgcatgttacaaatgatacatgagctggaggaccctttataagaaacccaacccaacccaacccaaccctcttgccttgcaaccctttccaattactaccttgcctacaacttacaattaaattggtgcttaaagggccaaacaatccatctagtagaatcaatacacaacagtgacgctggacaattgtgccaatattagcattcgttttgctgtgtttgtttcatcttttgtgatttgtgttgcacccttgaaaataataaatcatttagttgcctctccgctccatactcagaagttgcctggaaagaaataaaaatattagaaaataaatcacaattgggatattaattgttacatacatgatacgtttcattagaacatgtgaagaaaaaacaaaagaatgtgaatagtcaggagaaggtgctacgtttgttactgtgaattttgtagagtaaggatatagtaagcataccctggtatcaaatgcaaaccgcagtgtttggacttgtttctctgagcaaattctcatatcaaaaccaagggaatctacaccaataatcacagcctcctgcaattaccatacatggtattaagcacaattcctatatagtataataaattcagccatcttagatgtaaagttgaaaacgtgtgggaattgacttgagtaagcagtaaccaccatatgcttacctccacttgaatacccattactctaaagcatagagacttgagggcttgcgtaatcgtttctccaccatctttcaggcgagatataattttagcagctgagtgtgctatcgcatcaggctgagctttcgtgtagtcttctacttcaacaacggtctgtcaggaaaagggtctaattattgaaactaatacactatggaacttatgagtttgctatcagaaactatacctaacttaggattaactgttgaatcttatgatcagattgtatccaatatcaacagtcaattaagaagaaaaaaactatcttgatcaaagagtatacattctgcttcaaactataaattccaagaactatcttgaaactgatttttctaagtactaaaatcagaatttaagattgccattgattggagttaaaggaatggaaatgaatcaattttttaataggcctcgaattactttagtgtatgctaggaagaggacaaggaggtccaaacacaggggataatttagcaatgtaattctgttatgggagtgttatttggctggggtgaagctcagggtagtccctaggggaatatatataaataatgttggttgttgtttggaagggtgaacagtattttgctaagctttgtaggagagtctaagctctcaaattcctaggggctttctaatatcagaattatcttttctctctaatctcttgtcattttatttccattgcctgaattgaattgataggaaaatttaattatttttattccattcatttatttggtttcattttaaaatagaatgactttttcaacattttagtagaatgactttttcaacattttggtagaatgactacagaaggaaagatcattttgaaaatttattccaatgcatgatgaaaaaaataataattattttttattaatattctttatgcattttaaatttcatttaattctattcctattcacattctcatttttattcttatgtattcattccttctaaccaaacgaagcctaagagtatacattctgcttcgttttcatgaatcatgaaaaccaaagttacatatctaatgaaatttgcctagaagcccaaatagtcaaatgacacacccttaaaccactaaaaaggtacctgatttccattggctgaaaataactgaattttaatcatctccagcttgtaaaatgtagccccatttgttgtgatgtcatccttctctggttcttcttctgtcccagttgaattatcattgttagattcagattcacgttgatgaccattaattttaacatcttcttctgaattatcttctacagattctccaacattttcatccggtgcagcatcatcgctctctaggttggatagatgtttccgaatgaccagatgttccttaattaaggcaggtcttataaggccttgaatagctagactagctggtggctgctccatccaatctttagagccatctgaaacaaccttaaaatacagggaaaaaaaaaataaaattaatacaataaactatatgttcccacaacctaaaagatagaaaaaagaagcaactctaaaatgaagctctgaactaagcatatatatataggtatatatctaaagaatgttctgttctcaacagtcaataatagtttaatcatgcaacagcataaactacctaaacatcatgtaaaacaatatgccaagaactcctgcatgtaattccgttacacaaccaaaatttttacaagaaaagaatacctctgcaagtgttttggcaaaaaacataggatgagaggcacgcatagtctccaactttgcccagtctccaagtgcctcatcagaatcatccggatcgtcatcttcaagaatagcaacccagtcctgtaacatgaaagtcaaataagtcatggaaatgattgatggtcaaaaccatgatcatgaagtaatcttatagagagagacaactaccacccaaaaaataaaaaataaacaaatgaagtcagaccgaatcataatcatcagtctcttcatcttccccatcatcctcatcttcatcatcgctatcttcatcttcaatctcatcaattccaaaatcaatttctgatgggcctgataattccatttcactgatcatttccatagtgtccaagcctataataacttgctgcacacataaacaggaccaaagccataaatatttaagagcaagggctatttgaatacactagtgaaaacaaaaatcgaaataagtcagaactt

SEQ ID NO: 37372 - DNA, 2237 bp, Cannabis sativa
aaaaaaaaaagtcacaaccaacctgaaatagaccactttctatatataagctgaaataaagactttacaaagtagttaagtgagcaattttactttggtttctctggttaagctttaataaattatatattgattaaggggtccactctttttttttcttcattttcaattttctttcagttcaagatggttgaatttttatatatatatatatatatatatatatatatttagcctacatcaaataaatgtcaacactcatttatggtaagaaatttatgtgtagtatatttggaaaattgatagcaccaaccatttatttatctttgttgttattggctaattattattattgacagagagaacaaaaattacaagattgaatatgccaaaaataaagataaactcaaaaattgatacttgacattataattgagttgacataattatatacacaatacaataggaaagtacaatgatgagatcaatgatggttaatagcccatataacaacaacaaacaatttatataatatatatttatatatataggcttaatataaattactatgttcaagagagaacaaagctttaaactttggtaaaattcatgcaactttactacaacttgacatatataacataaacaatatacattttcatttttaatatattatatatatatacataatcagtaaatataacatatatgaatctccaaagaatgagggagggaattttccctgaaattaatgtataaagatttgtcaaaatgtttttatattaaaaaggaaagttccatttctatcattattttaaaaaataggatagatattatataaaaatatataatattaatttacaatattattataataataataatatatattattcaatttgtagtatataataaaaaattcctattatattttacttgtgtgattataaataatttaattaatgacatattttattttattttattaaaaaaaatgcatgtaatttaaaagaatatacatcattaccattttatataaagagatacaaatgaaatcctttaggtcacatggtttcacattgattcttactcttcatatctagtttattcattaaagaaaattctggtatagatacaggccctaaaaacttacaattaatataacctttttttgtaaatatttattgattttgactgatgccaatatttattgagaagttggtcttttatgagactttctctttattatatatataactttttatttggtaaactagaattaattttcatttacaaaagcacagaaaaacagttgacaaaatagaaaatatttattgtagaatatattaggcatagggaagttgtctaggaatttcacaattttggtacttaatttattatagctaggttacaaactataaatatatataaaagctggcatgcataataataatgctcaaaattttccacaggtggtttttatgaaacactcattttcattcatgtaccaaaaaagtcttaatgaacatgaactcacctttaccttatccttaagtcggcttgtattaactctagagtagtttagaccactactccattcatgttttcctacatagatataaatatgtattagcatgaattaaagaagtcaatttttaatatatttaatatatatatatatatatgcacatgctcttggaatattccttgttatataatatatatatatatattctcccatggaccatatagaccatggaccatggaccatattgtcatgtcttttatgtcaacacaacatctactcacttaatttgtagttcatgatcatatatagtagagaattatatgcttgtatatacttgaaattcagccctaatttgttccacattttatatatgtttgactggacttttcagtgttatcagtttatgaatctctcaaactaatgaaactaaattcattcaaatcaatgtctctgtgataagaaaactttgacaaaccattatcgtttatgtaaagataaattagttttcaaaatatttatttaatttaatttgtatatttgattagaattaaatataatttttattgtatcaatttgtagttatgactaatttgtattgagaaattggattaattatgcatttgttagaccatttttttttgtaaacttaaactattcaacattagtagaatatgtcatttttttttcttaaaatcccattctacccctc

SEQ ID NO: 37373 - DNA, 5440 bp, Cannabis sativa
gtacccattataccataatacatcaaaagcataaataacatgtataatcagtgaaacagtttaggtcaccaaggtcaagactttggatgtgcatggcaacatctgtgattggctattgttagtattggttggcattctttgaataatcaaaggactagttggttatcatcacgaattatgatagcttacagcatatttgttctaagatttggtcgtttcaactcatttatacgtgcttacttatgtatcaagatctttcattcattattgcactgataaagctataaaattttgtcatggttccaatacattattcaaaggagatgtatataagattttacctttggagataaacgcaatgaactcgccgatgaagaatgaagcccatgaaacccaatgtcatatgaaatggtaccatcagccttgaatagtccataatttttctcagatgttggtccagtcttcaaattttcattaaatattgcaaaaatgtatgccttcacaacattcttcgggcggaagggtgttcctttcttctttgcaagtctttttcgcagattataattatatgttcttgcattaattggtgtggcaccagattcattgtcatctccatgtgaagcccaccctgtctctgttattataacttccatctttttgaatccagcatcctctaaagctgcataagcagcatcaatctgagcatcaagcatgttatcataatgaagattggtttttggatcataaattccttgtgttgactgaaaaagggcataattaatatcaatattctctgggtcacccttataggcaataaatgggtatgcattcaaacagaaaggagatccaatctcggagaagaactccagtagcggctttatgaattgaactacattgtctctgaatatacatgaagaaggagggtatgaattatcaaaaacagcctgtgaatgagcagtggtaatctgtactacatcagctaagtgaagattgtttacagctttatgtatatttttcacagcacccaaaagagctccccacaattctaaatcacccccacccaagacttcatttcccacagcaattccaacaatgtgtgtctctggtaagaaagactgcacattttctttgacccaagtcaacgcgtgatcctcattcgcactcatatctttaaggaatccatttggaagtccaattactaattcaagtccagtcccactaaaggccttgagaacactgtgatctgcatcgtatattctaacattctttatcttagctgctctgagaagagtagcaacttcatccggagaagggatgttatctgcaattctcccgtaatttattccatacgttccagtaaatgcttgtgctctgtgagaaactggaaaaccaaacacaaacagaaacttcaaccacaaaacaccaaaaacaacatagtattcaataacactttttctacactacaccatataaccatgggaaaattatcaaacagagattttctaaaatttggtacaaccttcatcaattctctgattcaagtttattatacaaatcaatgagggatattacagtatagctaagccattaatactaaaggaatttctatttaagtaaataatccttgcatatatatatttataggttagtatgcaaaacaattatgacattcaacaaaggaccggagaaactttggtcttgtccaccagaacctatattgttgagatcatttatttggaatttggtgtatacaagcatgctgacataaattagtaacttgcatttaaaactatgcagatagacatgaaaatatatagtatacacatttaactagagcagttccattagaaaacaagttgacttcgtaggaaagcaacacagaccacaaatatttctaaactataatcattaaaatggaatagaggcaataccatgtaacccagaaaggaaattgaagaattacaaatcctatatggaagagacccagaaaggcaattacagaatcataaaaacgtatgtcgcagtaattcaaatttctcactcaacaaagaactattattcaaaaaataaaaaatccaaaagaaagtaaaccagaaagaactctaattaaaaaactaaagaaaaatataaatttaaacaacaagacccacttttcaagatagagtaaaatatcagtataatcaattactacaaacggaaaattaaaattaatatagcaacaactaaagacaaaaacccagaaagaaagttaaaaatcgtctggaaaatatcccaaacttgactactattaaccaccacaaaaacatatgatgataattaaaaataatattactcaaaacacttgaaaatcaaaatcaccataatcaatttcagtcaaagagatttagagggaaaggaagtaccaattggagtgaaaaaaagcatgaacagttgagcaatctgagcaaaaatcctcaaactattcatggctgtgaagtacaaaccagtaaaggatgataatttttggtaaagatgggaatatgggttggtgaggtggaccaaaatcaaaggggtataacggacaaataacaacaccttcaatgaataccactgtttcttcttcttcaggtgtaccaccattaaacaacgaatatacaatactttttacacttttctccctctctctctttacaactcaaacctctgctcttcatctccatcctctttctttcttttctcgatatatatatatatatatgctgatgctctctttcgaaagttggaaacttttctcttgcaaaagagattgtctttctgttaaaatagtatgcaagaaaactaattcaagaagaagaagaaagcaagagagtggggtttgggatttgatcgaaaatgattaatgggtcttgtataaaagagtatctgttgtaactcgtttggtgaaagctttgtcttcattggtttccttcatttatatatgtggatggagtttcgcttttctttctttttctatttttctgtgtcgactggtgttgttttttgagttcgtatacttagaccaataaatttcaactgcataaaatacaaaaaatattaaaataaaggttttaaattaaagaaactgcaataagtgatggtgcaatccccactcgcaaccttttcgtcctctcgtttgaagaaattgcataatgagtatgtttttatttaactattttcttttacagatgttttttaataatttacagtaaataaatatttaagtttaacttttaattataaataaatatttaaattttaatttttagccgtagaattaaaatcacttgtaaaaaattggtattccataatatattaaatcaatccaaatgtaccaactcaactaattatttttcttaaatactacaatttatttttttccttaaaatactctcaaataaattgatgtgtcatatttagattgatttaatacactatgatatactattttttaactggagattttgattcttagtcgtaataatacactattaagtattatgtaaattgccacttgtcaattcctgaatggtccaagttattaaatttttaatttttttaaaaaaataatttaaatataccaataaaaaaatcacacgttaataatgacttaatatttaacggttaggaacctacagagtttcaaaaatattacttagtattaccgtcaaaaattaaacttagatatttatttacaactgaaagttaaacttaactatttatgccgcaaattactcttttttaaaattattttcgttcacaattgttttttaataatttagtcacgtacaacattttttctaataggttagtctcatacaatttcttataaatatatgataatttgctccttgtatagaattttgaatttaatatgtcctaaaaaaattttaaaataatttacattatctaaaataaattttaaaatagttagttaaacactttaaaaaaatttaaaaaattagtgtgcagttgagtatttcaaccttgttttgtacactttaattttttttagaaattgatgggatgcatggtataattataatatccatcatcctatcaaaaacttagttaaggtaaaaacgtttataataataataatttaggtaaaaaatagcaaagtttagttaatgtttatgtaataagtttaatttaattagtttgatttaatattttaattaattgtttattgttaattttgtgtagatgtttatttgtggtgataccgcgtttaaaaaatttttgagacactctatattagacttggtaatctatttaaattttttattcaatatttaaaaaatttagaaaaaatttaagtttttcgcattgttaatttcaattatgtttaggtattagtgtgatattgttcgagtaagattttaatttaatattttaaatattttattagtatcgggttcattgtgttgattgaagagtgcacaagttgctatctttatttaaaaaggtataattactaaaactttaaaaatctttatttagtggagtttgaatatcttagatattcatcggtagttaaggttttgcgattaattatattgtggtcggataggtagaatgtgcatcttagatgagtttgaatatcttaaatattcatccgtagtgaagtagattctgcgaatacatgtactacggtcggattagtggataattttgtattgttaatattatttcttattttttgtagtgttttatgtgttttgtttattatttattcgtgtttaaaattttcaagaacgtccgattacagtcgtcatgctgttaaaattttggtagaattatgataaattcactaaaaatacataaattttactaaaatttataaatatgaggtaactaatttaactaattattttctacacatattcaaacaaataattgaataaagtatctttttagaagttttaaaattgatagaaattagatgagtgccaatagattatcaccgttgtataatcaaggtgttgataatttcttagacttttgtcaaaagtatgcgaaaaattctaatttgtccttgtcttaaatgtggtaacatggagtgtatggacattactaagataaagaagcattttttcaagaataaaatagacaagggttataaggtttgggttcaccacgggaaaaagattagattctgggcgagggaacgtccaagtttaataaggttaagggtattaattttgactatgatgatgatcacattccaaaaatgataggagatgcacaatttgaataaaatatcgatccatcaaaattttaatgttttgtagaagatgtcgagaagcctatttacactaattgtaataggtttactaaattattgacacttattagattatacaatataaaagtaaaataatggactaacaccttcataagtgggataaacaatcaccacaca

SEQ ID NO: 37374 - DNA, 2278 bp, Cannabis sativa
  modified_base (1260)..(1273): a, c, t, g, unknown or other
tccacaagtcacttttatttatggtgagattattcttaagttcagataatattcttcttacaatatttataattcactacgtttgtgaattcaaaagtcctctttacgcttacattctttgagtatttataggaggagaaatgagatctgtgttaaagggggtacatctcctccttacctctaggttctatctagtctccatagtaggagtttggtgagacaagacttatcttgtatgcggcttatgggacggtacgaagattagtcgtcactttgcattcataggaaaatggagtgtcaaaacagtatgactcctattgagggtaaggtcactttttgacctgtgccgaactagttatctatagtattctatcttggaacttgtgttgattgcctaggcagctccctaatgacatgtgattcggaaggctcttacctcctagaggccaacgtcgtagcccctttaaaactagttgggtcctcccgaacacacctcctttcttaggaagaggtcacagaattaatgatactaatagttgttattctcatgcatttgcgggtcctttgaacgcgtggcttcttattcataagccatgtattttggtaaaaaaaatatgtataacatttacctctaagttccaggtaataatttttgagttgggactttcatttattcttcactctttaagtctctctctctgagggtttaagatatgacgtcacaagcatgtgaaacactactcgtacggacgcgccacatgttttattgcaaatggccttcgcattagcatgtctttcttctatcgattttgatgatgctggttcgcttccttgacattaatccctaagaaagtcatacctacagtgtgtcagtcggatactcaagtatccaaacatcccctcataaatgtgtttgtttaggcttctcaccaaccgttggattggaacgtatttctttagaggctaggatcgtgacttttgggctataaataaccatcgcctcctcactcttcacactttacattctgcttcatttcttcagagctttcaaactggaagaattcttaaacaaaccaaattttcttatactctttctcaaacgttgccaatcattatatacaaaattaatttaccaagggactacatctaaagcttccactaatataccaatagatttgcttaaaggtgctctgggaaattcatggtgtagttagagttaattgcacaatttgggttcatttggaacgtcgtattaggtcnnnnnnnnnnnnnntatattgaattggattatatatcatatttttatataatattatgttaaactaaaatattatttctaattattttatatacttgtcttgtctattgacatggtgggattgttcctttgagtttttgtttgttttttctgtggtctgtctttgttttttacggtggtttttttgagatctgtttgaggagtttccagatggcgacgtcgtatggtaacgaggatgttgaggatagtttgtcgatcatcccactcgaggaggaagaggacccagcagttcaatatgaccgaccattggtcgacgatgtagagattgatacacggtggagcatagtcggtcgatttcttacagataacccgatatggcaatgcaaaacttgatggctgttctttggaagccaggtatgggcatgtatgtgaaagatttgggaggtaatagatatatttttcaattctatcataagataaatattcagagggttattgataggagcccattgtaacgccctgtctctcagggacgccacgtgtgtgcttttataaactaattattactaatctataaattttggaaaagtgtggttttattaaaacctttaattaaattcaacataaggactttcatttttaaataccgtcgtaatatggggatcccctgctaataatttttttttactaattacaaattcattagtacaagagtaggttatacatccaatcatagaaaagagttgatcctgcttcacgaaaaccaagacaacacggttgatatgtacactgctgggagacctctgacccatagctgaacagaactgctaatcttcttaactgcaccatgaagaacccgtgagtcacagtgactcagcaagaaaactactagataagaaaaatcatggaaaataacagcaaattatagtaccacagattatacataccaagagatcattctctttcaacgtacatatacaatttaacgtctatacaagcaaacttgttacaaaattaaga

SEQ ID NO: 37375 - DNA, 3885 bp, Cannabis sativa
gagactcaccagacatctgcccgtacgacgacaaagacacctctttgacaagttcggtttcctttgaagattgacaattttctgcttctttatttttgtaaaactcagaatcctggtgccatattgtgttgaaaaaaccactaaatctatagccccaatcattgagtctgaacagttttagagggaattcaaagccgccgtgacttaacaaaatagattcatgaacgaatccctgttcatctcctctcaacttgagtctcatgtgatgtaagaaattcttttctgcagtatctttctccacatcaagcaggccaccgcataattcgccaatcttcctcatgatctcaaagttccataagtttagaggcactccttctaccccaatccacgagcatctgcaatctactttcacctctttgtgttgttcttcccctgaccacttaacgaaagagatgatagtatcgcctgtgtctggtattacagttctgttgatcttaagtaaactttccatctcttcctctgtcttgcaccaaattagagtgcgatcatcaaacatttggctaaccaccaactttctattaatttcccgtgaaagattgtagaatatggcactccaagacatctcgctattgtttctgaacataatcacagctcgactccagtccttatcacaatcatccgcttgtaaaaattcatgaaaatttttttgttccattcgcctccttggaaacggattccgtggtctgaagctcccatttccttatcacaatcgtttggaatttattgattactacactatgctcccatgttatgaacaatcccaaattaggagcttcaattcatgcatatttggtagaaacatgcattcttttgataaatagtgccagtaatatttttaaagtgaaggtgttgttcagtgaaatttatgctctttcttttttattcttctgaatatttttttttttgttttgttcttagtttagtaattaaaaaccatagaactgactttttaaatgttaccgaccagcacagaaacttttactcacatcttgattataattttctctggtgttttaaattatatacttcaaatacaacagacaatagtgatacagagggaatatttaaatttttatttaatttaatacgattgttgcttgaagcctgcaacctataaaatttgttactcgtaaacattaatcaaaatagctcaatggcaatgtatgctaattgatgatttcattaattattttctctcccaggagctgacaataaatcttgaacatcaaaagatttctggagaaacaactgttcaaaatgcaattactgaagttgctgcaatgatgggtgaaaatattaaacttagacgggcttttgtgatatctgcatcatcacaaggtgttgtttctacatatctccacacaagtccccaaccaggtagtttaacttttaaataaagtttgtttgtgcagtgctttaatatggttataggtcataactttcaatatcttggtccttcagtgatgtctcaagtcattaagtagttagggaaatggaacctttgtgggaatttaattttggcttgattgttttctgctttatcctattcaaagggttgggtcgaattgccggagttgtgtctcttgaagtagaagatgggaattcgcaatctgaggctctccaacgggttggatctgaattggccatgcatgtggtggcagcaaagcccttattcttaacaagggaacatgttacttctgatgcattggagaatgagcgtgaaattctcaagtctcaggtaattagtgatacctggttaatctttgaagatggctattgctgtctatgatattatgacattgttttaaaagttttttcttccttctctatgttggtgacattgtgctacttacatagttcagatgggacaccacctgatcttattattattttttttaatgaaaccaagtgtcccagacttagccccatttttcagtctctactgagctttttatatttccaatagcagccattctctttctttcttcgcttttatcctatttgactatttgactgtgcttgagatggtgtatttgaatgcctacttatatgaaaggctacaatttgctttgatctaaacattgggttgtggtggaatgttgcacaatattgctcttattttgggtactacatataaaactgatgtaggtttgtaaagcattttattggttagaagactaatttcataaagtaaggaagataattaatatgagtacttgtttaattatattgttttggcagctgggtagcatcttatttattccattgcgaaaatctattagtcacgttacttcaccatttttcatgaaattcttcttaaaacgccattgcagcgctctcccttactttagtactcaaaataccataaacccattagccaaagaatcccaaatttgccaactttgtaggataggttctcttccggatgcatttcagattctgaactccattgatcccggcgaaatcacagtcaagccgattctatatgcttcccttctacaaactagcgtaaaagttcgttctttcaggcccggcctacaaatccatgctcatgcggttaagtctggcctcgagaccgatcggtttgtgggaaatagcttacttgctctgtatttcaagttgggttccagtattttggacactcggagtgtttttgataatcttgtagtcaaagatgtcatttcttggtcctcaatggttactgggtatcttcgggtgggaaaacccggcaaaagcaattgcattgttttgggatatggtggggttcggggttgagccaaatgggttcactttatctgccgtgatcaaagcttgttctgagcttcgtgacttgagactcggtcaatcttttcacgcaatggtgttgagacgtgggttcgactcgaataatgtcattgttagttctttgattgatatgtatgggaggaattacgtattggaagatgcaaaacaagtgttcgatgaaatgcttgaaccagatgctatatgctggacatcaattatttcggccatgacaaggaacgattcgtttgaaaatgctttgacgttcttttacttgatgcagagaaatgctgggttgttgcctgatggctttacatttggaacggtgttgactgcttgtggtaatatggggaggctaaagcaaggtagagaagtgcattctaaggtcattactcgcgggctttgcggaaacgtggtcgttgagagtagcctagttgacatgtatgggaaatgtgggtcagttaacgcagctcaagctgtttttgatcggatgatggtaaagaactcagtttcgtggtctgcattgttgggagtatacagtcaaaatggacaatttgaatctgttgtcaagctatttaggacgatggaaaaatttgacctttacagtttcggaactgttattcgggcttgtgctgctttagcagctgtaagacaaggcaaagaggtccactgccagtatgtaagaagaggtggttggagggatgttattgtagaatcagctctagttgatctgtatgccaaatgtggatgtatagattttgcttatagtgttttcgttcaaatgcaagttagaaatttgataagttggaactcaatgatttgtgggttggcacagaatggcagaggccaagaagcaattgacttatttgaagatatgattgaaaatgatattaagcttgattatataagttttgttggggttctttttgcttgtagtcactcaggtttggttgatcagggaaggaagtactttgatttaatgagaacagattatggaataaagcctggtactgaacactataattgcatggttgatctcctatg

SEQ ID NO: 37376 - DNA, 4091 bp, Cannabis sativa
  modified_base (2986)..(3005): a, c, t, g, unknown or other
  modified_base (3148)..(3160): a, c, t, g, unknown or other
actttcaaataacataaaaaaaattagcataaaatttagtatacgtgccacgcacgtaactttttactagtatatcaatatgttgacaataagaagtgaagaaaaaaaaaaagaaatgagaataaataatatgaatattcgtttaatttaattgtagggataaatttaaaaaaacacaaaaaaaattaaaaaaaaattacaaaaatatagtttgtatcgttattttaatatttttttttacagttttttagattttatttacataaaatacggttttctagtctatttttatattatatccttgttattttattattttttatattgttttgtggttgctttgatgttgtttttttgttacttttattttgttttcttgtatttttataaaataccgtaaaaatgtaaacaaaaaaaaaaaaatgaacgtaacaatgtaaattttttacaaaaattggtgtttcatgtaattatctcttaattgtatggtttgggttttataagcatccaggattttcatatataaaaaaaaaaagaaaatttggtgaaaaaattagtacttttgtaatatataataccgtgcggtttgaactgcgattataaaactcaaaatcacaaactgtacaacatcacacagtttagcgaaacacaaaccgcaaccgcgcgcactgtaaagaattttaaactacatttttcgtacaatatagtgtgatgcagacaatttatgctgcacaagcagtttgatgaagaccccaaccagcatatacaataaaattttggcaacaccttattagaacataaaaataaaaagtacgtgtctcaatgacttgccataaagcaaaaatttctccaaattaattatttctctaattggtgatcactactgccatgctgcataatctcttctagaaacaatgtcatattaaggtgtgaggacccaccttcttcaacagctctctttgccatctccccaagccttctagctctttcccttctctccttgcattcttctccatcatccaacacttcctctaaagcactcctaatagtttcgctcttcaccttgaccccaactttctcttcctccccccatttcattggctcttcaaaaccaagcgatacagctatattcaaaacttgtacaactagtttctcattaagaaactggtcagcaaaaagtggccatgtaaccatggggaccccagcacttattccttcaagagttgaattccatccacaatgagttaagaacactccaactgcagagtgtgacaaaattagtacttgtggagcccaaccccggatgaccaatcctctttccttggtcctttcttcaaatccatcttctttcatccatttctctacttcttctgaagtactagtccctccccttataacccaaacaaatggtttgttggaagcttctaagcccaatccaagctctatcaactgtggcactactaaattacataagcttccaaggcaaacataaattaccgatgctggttcccacaaattaagccacttgagacagtgatgttcatcaacacaagacttgttacctctttgggccttatctaattcatctttgttgcataaggagactgggccaatacaccaaactttaccgttccttacattcttgtagtctttgacaaatgcaggctccaactcttcgaaactatttattattgctccataagatccttgctcagcttctatcatttggtcatgaaattcttttagatctgaattagttggtgcagctggtaactgagccttggtaacttcaatgcgctcagccaagtaagggatgacaaatcgctctgtttcagaacttacattgtcaagaatcttggagctacgtatattatgaacgcttaagagcaataagcaacatactccatggaaagatattctcggaatattgaactttcgagctatgttgattgtccaaggcaagcacatatctgctattatacaacttggcctcagcttaagctcttcaagttctttctctgccggtagttgcatcattgaggctgcatggaggagttttttcacacaatccaaagaaggcatcgtgtcaaaattctcacacccttcaggtaatccaacttcttttgaatgaaacttcaatttgattagatggatactaagcccggtttcaatggcgcgagcgaaaactttttcgaaacgggctgcgttgcctggtgtggtgactatggtgatctgggcaccgcgttttgctaacattttggctatgtcgaccattggaatcatgtggccttgtgccattagaggaaataagacgaagtgaagttgtttgttttttgtagccattgaatttccaaaaagatagaatgagatggaaaactttagtatacgagatgcccttttatagtgtttcagaattttgtataaataggctccaatccaaattgccttattagtaatttggtgttgtaagctcatacgtatgcattttggattacgtgaaattgaaaagatacagtttggttcagtgacaaccagtacaagtgtggaccaattgtttcgctcatctctgcatcagtccataaatattgttttattttgctcgttctctttctagagtctctcactcacatacgtttctttctatcaattaattatacacaagtcaaatttgaacttttctttggagcaaaagaaatttgaactttttgtttgttttcttttttttttttggacaaaatttagagaaataatgagaactatatagggcatttagcctacctaaaaaattttgtatattaatgatgagaaattttatttacactccaaaaatttctatagacatctcattttgataaatttttattttatataaaatttatattttaaattgtactaagtttttttaacttttttcttccaattcatattattaaaaaatatacctatcgaactaaaataaagtatattttaaatattatgacaaaannnnnnnnnnnnnnnnnnnnatgaaattttcttagaaaaaaaattaaaaaaaaatatatacgtgagttcgaaaaaattatgaaaatgaaatcaaaataagtattaaaattaacataaaataatgtgaaggaaaaattcaaaaaaaaatattaagaataatttnnnnnnnnnnnnnaagtttatattttttttaataatggggtgtataagtttatggggtgcaaatagaactccccttaattatttggccttcattttttttttttaaatttagcaacactaaccaaaaaattatgagaaaattttattgtacacctctaatatacacgtatttgttccagcatttaggagaaaattgtttaatctaattttttttttttttttttatgatcgtgtacagtttagttatctgaaacatcttgtaaattttttgaaaaattcgaaaaaaaattaacgcaccgaaacaatgttcatacaatttgttgcatgaatgcctttattattttatacgcatgtgaaatagattgtttgaaccaatagcgaagccaacttataaattcaaagggggaaaacacactaaaataattaaaaatttatttatttttcatttttaatcatcagctttacatgtattttttttgaaaaataaaaaaaaaaaattgggggaccacggcaccctccgacccctagctccttcatcggtttgaaaactatgctaagctagtttttaggtgaatttttatgaagtgttttagaggtgtgttgtagttgattatgttcattttgatgcttgttttctacttattttagatttaaatggtaaactttataatatgaattgaaaatgggaagaaaaatattaaatgggatgaaaataaagaatttaccatggaatttagagttctaagattaaatgggtgagaaaattttaattttggatgctcaacacgctctgtttgggatcgaaaatcaaatctaaaacttcaagctaatttttaaggggttttttcattaatgtacaacaaaaattaatatattacaaaaaatgtgcaaaaaaacttaattataaaaactcatacattttaataacatatttactaatattt

SEQ ID NO: 37377 - DNA, 2981 bp, Cannabis sativa
cttaaaaagctataacgtacatgaatatgaaaaaaaattagactaaaaaattcttctagatgctgaaacaagttaagggtaatcagtacatccattttaagagggtgcattgtagaatcacccaatagtttattatatttttatttatatatttaatatggtttttatatagtttgaataaaattttaatatttttgttaaatcttttacacgtatttattaaaaaaagaaaattattttactactagtgtaccatagcacaattataaattaataaatataatattaatttatttttaagctatatttaacataaaatttatactatttatcgagataatcttagtgatgcttagcattattttaagacaactccttataaataaataagtaatatttataaataattaaattaaattatacaagtaagtaaagaattatattatataaaacttaatgtttaattaatagtaatataatatcttaagtgagtactaaataatattgtatcttctgagtattgctggtgcttaatcttacttagggcatctccaactatattctctaaaggaagcttcataattttttgataaattttttaatagtatttaaattaagaacactattacttttttattattttataaaaatttatatttaatcaatgtaaattataaaatatcattcaaataattaaatactaattataataaaaaaaaaaaataataaaagcaacaacaataaaagtaactctttattttagttaaaaaataaaaaaaaataccattaaaaatatatatcaattttataaaaattattacaataaaatgtaaattatgtagaagcaacttaaggagtggtgggtagtattttagcatttgtctttttatagtattaaatttatggaatagttagagaaaaataaaaaggaaaggtgtatggtgtaccaggtggcgatggtgatgatgatggaggggatgggttttagttaacagttacagagaataatggatgcgtggcatgtaatgaatgatgagttggatggccacatctcatcatcatacataatgtcagagaacagaatcacacatacaactaaagtacaaaattttaagcggtgatggggtcacctattatatgtacatacaaatatataatacatacactatttttagctatttttggtaaaattttatatgtacgttttttttacgaagatttattatatacttagaaatatatatatatatatatatttttgtataagtacttagaaatatacttattatcaacttttaccctcttaactaatttataatagtctctattttgacatttttttttttttttgacaaaacctaaaactttattgaaaagaaaaaagaaatataaagttttcaggttatgaagaaggaaggtaaagactcattttaaatatattcactatctaatccaagacttgccttagcacaagcatgatcaattttatttaactcacgaggtacatgaacaatgagcaaattaagactgaacaacaataaatccttaatacaattaataatgtcactaagaacagaattataacaattagttacataaattttatcaacaacactcttacaatccgattaaagaactgtgacaggaagcttggtggcctgcaaccaggaaagagcagtcaaaatggctttagcttcagcaacttcagggggaactaaacccacaatgggaacaatcaaaccagcctttatattgtcacagtcatccctgaccactattcccagactatgtttttttgcagtgtttctaataccagcatcggtgttgattttccagcatccagtcgggggagaataaacctgttcatcacatcttcaagcacaaatatctgtcttaaaactagagtgagaagcatgttcatattcccataaataattagaggcttgatcaaaaagttgccaagaaggcaatgatttttttattatgaaggagattattcctctgattccatatcaacaaaactaggcagaataaacagctacattatatttgtcatagagatcaatagcttgaacaataaaatcataaatatttaatcttttattacgaacataaaagtcaaaaaattgagaatgtttccaagcttttttagcacctgagcattcaagtatagtatgttccacagtttcccacttcatatgacagataggacaaatgggggaaggtatgatgcgtctatgaaatagagaagaggctacagggatagaactagacagcacacgccacaccagatgtctaactttcgggggagcagaggaagaccagatcctagaccaaaaatgtttgctttggcgaaaagatgatgaagaaggaatatccctagaagtaagagttaggcgataggcagttttgacactgaaaagaccagaattatttctgctccaaaaaagatcatcttgacagttattaccagagattgggacattaagaatgctatcaacaagttgatcatcaaaaaactggtgaagcttaagggaatcttatgccctagatggggaaataaataaagaatgagtagactcagatggaggaggagaggaatatgacttaattctaaaatcaggaagccaatgatcttcaatggtgcgaacagtattaccattacccaccttccaaataagaccttgcttcatcaagtctcttccccaaagaatactgcgccaagagtatgaagggctatgaccagggccaacatcgaggatagaagtatgagagaagtaacgagctttgaggattgagctaagaagaggattaggatatttaagtattctccaagcttgcttagccaacatagcttggttaaaatgggctaaggatttgaaaccaagaccaccaacaaattttgattgacacaccattctccaatttttccaatggacttttcgaactgttctctgtggctgaaggagttattaatggtc

SEQ ID NO: 37378 - DNA, 1258 bp, Cannabis sativa
atatacacatataattaattctgtagctttcatttgtatatatatgatttatatggttttttgctttctgtggatcttaatctttggtaatttggtatatatatatcctttattgtaacaacttgggatgaaattttaggcatatatattatccattctagcaatatgttattctttcaattttttttcttaaggaaaacttatactactaattacctttgaataatagtgaagagggcggctaattttatgtttgaaatcaaattagtattaataaattattaattaactatataacaaattgatggtgaaagttatttgtagtttcaataatatcagctggcactagtaattaataaataagatcaaagcaaatatatatatatatatataaatatgggaaagataatataaattaaaattgttttataaatagtatgatatatatggttatatctcaagctttaaacaagtcttcttgttcacacagaaaattgggtatttatcttttgtctgctctagctagtgctttttgtgcttaagtatattacaatggtatgttaattaatttgtatatatattttatatatagctaggactaatttttaatattttaggggtttattgaccgaacctctagtgacctgcaacggctgccaaccactcttgtagatatattggtttaattggagctgaaattcttgttaattagcagagacaaagttgagagctgatctatttaccttcccagaaatttaaagggatactatatattaatgtaatatagtatagaattacatatattttaattaataattattacgaaaatcattaaccattcctagctaagacactaacttataattttatttagaaaaattaatgccctaatagcaattctcttatcttaaacacagaaacacatacaagatatatagttgaccaagccattaatgtcaaaccagtgacgcatatggaaaccatctcaatgatacactctcggggagggacccaaaagtagttacgacttaggaacccatataaataatgtggctttagaattttttctgactttttgtacacactttctagacagctattttccaccaaatcttcactttcctccataaatattatcaattaattaccctcctatattattcttaattaatattacatactctacttctaataaaaaattcttcacactctacttttataataaaattgtgtattttctctttttaaccactcatta

SEQ ID NO: 37379 - DNA, 3708 bp, Cannabis sativa
tacaattattgtgttaagtaaaaaatagatatataaatttcaaattaaaaaaataattaattaaaaattataaatagtcataagataaataagtaaagaaaaattataagtttgtagtttgttagttgaacttgtaattaataatattcaagattaattaaataaaaaaatatattaattatggagtagttttcaagggttaatttgagtcatttgattaaatcaatggttacaaattactatccttattaataggtaaaaatcacaatacctattgtattagctcctaataaaaaaatatttttattttaataatttaaaataatatataaggttcctttacttaacttaacagtgtaatttaattaacaggaatatgattacatattatcctacacagccaaacacagtttacacatttccctgtaatcatattctccttcataatattcactataatcaaattattttgaacacctcgtaccaaacgcctccttaaagaatatataaatgaagataaaaattaaaacaaataaagtaaagtaggtatactgcaatttccacattattctagggataattacaccacatactgaaatttctaacttttttacttttatattgacttttttcaaaatactgtgtaagttttatgctgtgtactgtgttaaatttttattgttgttctacggttattttttagttgtttcactgttattttagttgttctgttttgtgttctactgttgtagtgcaatatttttgaaaagatttccaagtgacagtatttttgtaaaaattaactaaaattctaatattatttttttggtaagtttcccatattctattatcaattaatctcctatataatcatagcccactaccagaagcccaattaaaaaccagtcatatttagggtttcatccgactgcatagcaaaacctgttggcactatttcctttgcccaatctccgctcaatctctctatcggtaggaggaattccgttcgagtatagtctgttggattgtcgaataaattcggattcaggtacggttttgaggctgctaatgaggattgtaatcacaatccatggtggaagtattattattattattgtgaagtaaaaacatttttggctccactacggacaccttttcaactcacagtttatgtcgtttatatttattgatgatttggtaaataatgattacatgtgtttatactaatttgtatgtattgtatcttcttcacaaaaaattcctaattcaaagaatttatggctgttctgctttctttagttaatataggtttagaaggtttttaattttgtgttgttctttagtctatttttacataatgtggtatgtcctgtattttcttctcattctagtccttctataggttccttttgtttttactggtttggtacggtatgtaatgcacttgttttaatgctatctgacactgacatagataatatagcttaggagtttgtcttatttatgcttcgtaagtaagataattaatggtgtgaactattttggagtagtgtcttctgcttccatacttgaacaccttgctgaaatgtgcactatgataattgagtggagcaagcaagactgctttccctttttttgttccttagtttcaggcgataaagcagctaacccagtgatgtgctatgctcatcatatactttgagattagaatgtgtatgatgtattatatttgctgataattacatgtggaatatacatgaattatttattttcactaaattttaactcttcaatcaacagaattagattcattcatggatcctccaccacctgaaccggtcagctatatttgtggtggtatgctttccttcatctattttgttttgtttttttaatttaataatacagtgtgagagagtagttgagattttgatattgtggttatgtagattgtggaatggagaatactctgaaaccaggagatgtgatacagtgtcgtgagtgtggctaccgtatcttgtacaagaaacgcacccgtcgcagtatgtttactaatccccacaagttttttgtagttcttattcaaaacaaaatgtgttggtttgatctcttcataaatgaagaaaagaaacatgaatatttttagtgaagaagtatgagcatataattgaaattaattataagcaaaccacattttaattgcaaaagaactattgaatatgcatatatgtatatatatatatatatatatattggttgttttatggtatctaagtggaaaataagtaatgcctctgtgaaatatttttgtgaagtctgatttgttgcattgctttaccaaacacatttttgggatggagtgattgttgattatattcagtgtaacacttctgtaccacatgagcaagaacattgaaatgacctttgagtttctaaatacggttcttaggttgatctactagaatttgatttgttgtagattaagattaactacttgaggaacaaaggttggctttgagaattcttgtcgtaagttagcaaattaccttaggttgactccattctattgggttcaatatattcattctctttcctagaacaatccttgtcactctgaccatttggttaatgtatttctgcacatgtcctttacttagagcacttacaatgactcctttacgctattcttttaccgaaatgtactttttcttgttttacatactaacttttacaatacgatatacattagctgatctaattcttcttcatataatttaaattttacatttttgtaaatattttttatgcatttcaaacaaaagaaaatgaaagaatgaggtaattagagtgtagaaaagagaaactcgtaaaatatggtgaaagctcatgttatatatacactggaaccaattatttgctaatggctaccacctcacttcatcactgacatttgtgttgaaaactccaagataatgggggatttggagaatataaatttatatttttcatcttaatctatatcaaagctcttgcgtcataactatctgattgcaataagtcttgtttctcctgttaatgtctttttttttttttttgaaacaaatgttaaactattaatttaggttgtttttgattgggggtaatgaaatagaatggaaagtgttcattttttttctcttttgtgtttgcatttaaaagtattggaatgttatttcagtgaaataatttttccacaattatagtagaatgacgattctattttaaaatttgaaggattcaccattccaattccaatgcgagttgaaaaaacttttataatatttttaacttataaattatatattttatttcattctatttttctttttgtgttttggatactcccaaccaaacgaactcttttgttactagtgctagttttagttcacttcaataacatgtttatgtttaagctgttgatcttgtgtgaccctttgcttgatttgatgcagttgtccaatatgaggcacgctgaaaaaagatgagatgcggttgaactacaaactctctatgcataggaaatgttagacttctttcattttcagtagttgttaaaagtcatgatgtttatgggtaatgtaattaatgtgacttgtttagaccagaacagtgaaattgagtgatggcacaattttcatttttttgggtggagaaatttataaatatttt

SEQ ID NO: 37380 - DNA, 4581 bp, Cannabis sativa
ggagaggaacttttgctggacctcagaatagtcctgcaacaaatttgcaacatagccttttgtgtccaagttaaaataagattttttattaaatataacagaattcctattgttccaaatcatccacataattccaaagaacagactaagtttctcttttggtaaactctcgaagcccctaagaagaaattccttaatgtaattttttttttttcgaaagataaaagtgcatgaaggaagtttccttccacacaagttttgctctagaatactcgaagagggcatgactaatggtctcttcactattaaaacacagggaaaaaataggagtgcttaggatttgactcctctagaggtttaagccacaaaggtaaaatatgattgaaggctttctatacaaagtacttaatcttaggagggattttaacagtccaaatatttcgaagcgtttgaagatgaaggaacatgtgaaaagaaacgagatttagctaagtgataagtagaatttgcagtgaaaatacttgaagggtgatgcacctatatgaggaagtcacttgaagacttatcaacagggatttgtaagattttatcaaccatctttgagtaaagaattgattaagtttgttgacatcccaacatccattatcctcaataaaaagtaaaactgtattaatcaaaggaagagaactattaagaaatcaagggatattagcagaggggatctagttagaactgctaatcgtgatagacttaccatctcccacattctaaataagctagcctttcagaagcaactctctaccacaaagaagccactactagaaaattgacctttagaggcagttttcaaaggtttttagtgtcgatttcgaaaaaagttactaccgatgttgttccaagcgatgtcgtaagagggacgtatcaactgatggtataaggaaaccacatgtcgtcatttattatgaaatgacttacgacataggggggataattagggttattttgtttaatgaaaccattacggcgtcggttatttgcaaatagctgacgccgtaagatgtttcctaaatctactgaatattaaatatttttgtttatttttaacatattttaatttttgttaatttatataaattaaatatttatttcatataattaaaaattaaattaatctcatactaaatatatatatatatatatacattattctaaataaatctattacacaaatattttaaaattagtccaattatttacaagttattatctaactaaacataaaaaagtaagggaaaaaaatttacaaggtatctaattaaacataaagaaatagagaaaattcttttttatacaattcaacatcattgcaagctttcgtgaatcacaacaagtcttaatgaatcatcacaaataattattctatccactgtcgctgtcgctgtaacggtaacaactcaatttttgcatcgtatctcttctccccaaactataaaaagaaataaatattttattagtatatatattagaatatttattaatataataaataagataattaatagttaaaacttacatcttttacatcgaataaatatctgctaggatttgcacgtgcgacaatatcattgatgtatttcaatacataaaaactaccttcttgatttataggttgttttgggtattttgctattgaaatctctgcatatgccccaatgaatgcatttgaccctcctaatgtctcatatgccatgatttaaaaattataataatattgtaattaattaacatatataatttagctaattgaaacatttgttatataaagcgtaattaaatcattacttcctcaacattgcatcaatttgttcaggaattttacggccatttatagggtagatgtacaatctttaacctggtgtaatgaccactagcatccaatgtttactaaaatatacatatacacaagtgtaaaaataattcgaagtaaaaataaataaaataattttaaattatctcttaactagtatatacccgatattccatggaatgaagaacattttacattggcttttcatcaatgataaccaacgagccaatctttttgtcgcttgctttaaacttctattccttcacaatatcggttttatagtgcattacaagaagcttcgagtcgtaaaacttgaaaaaccatctcatatcatttaaccctttctaaatgaacttgcattaaattgataagtgttaaagttttataataatttcaacagaaattgatatataaagataattaggttaaatatcgtgtactttattccaaaaagaacttcattccaaaaagaattctttagtttccaatgaagtcacacaacaccacttattgtacatcttccccaattatcgtgatttcggtatgagtctctatgaatccacgtggtaccagaatttggactacaccgttttcttttttattctaaaaaattctccaatcatgtatctgatctacctggggatttgttccatgatctttggagtgaataataggtcagcatgatcactactagatttttgacaaggcataagaccttttcccttcgacataacacgttgtgatggtagttaagcaatgagagtacactatacaaaataacacaatagaacaaaattagtatatatgatttgtaattatgatttctaataaagaaattttacttccaatgttaaaattaaatatttaggccaaaggaggaacatgttcgctgtttccctaacatagtgtaatccctcaattgatactgggaattttgcatctaaagatacctaatgcgtgtatgcaaattaccatagggcatgttatgatttgtgatcacatcttcttttcaaacaaataagctacgaccactatgtttctaatagggtccaagtagagaaatattgtctcagttgtcatttgttcagcaaaattgtacatgggaggtagctcatacagtggaacaaattcttgagcataatttttttttttaacatactactaagcatgttcttatggaacatactcatcatcatcatgctcttgttcgacaacacttttcttctctttaagggatctgatttctacttttaacctgtctatctctctttgtttctgagccacaatatcagaaacttcctttttcttcctaccacaaattttagatgccttcgcagtaaacctgcaaattaattaataaatgaagttaatgaatatttattttgtgtcctaacttaaccaaaatttcgacagcctaatgactatatttgaacgttctcaaatatttaaacctaaataataataaaatataatccaaaacaacataaaataatcgagaaataactaacaatacaaaaatttgtcacccatttggttgcagtacacgtattcatagaacctactttactacggatgaatatttaagatattcaaactcttctaagcattgattttaaattagcatacccagcattcttgacatgtctaggatgatctagtgtccctaacgtctgcgtcattatgtcactttggccatggaccttaacttgtccttgactaagtttgtcctatagttgaacatagtgcacataatcaagcaagatttatataaattaactcattattacgttatcaacgattaatacttactatcttagcgaaaatttccttgttaaaattagtgacaagtttcatattcttttgacgagatttgatccaaatattattgcatgcggaagcttgaacctcaagttcttttttctgtattttgttacataacttaaatgagtactattgcacatattgttgtaaatttctataactttattttattcattatcaattgcttactacaacttctttgatgttgaccataacgctctgactactacagtgtctagattgaatttttgttgatcgttctctttggactttattaatttcctacaatgaaaacataataggttacctactagtatttgtatttaaaagtttatcttaacatataaaattagtacctaaaatttaggagttaggcgagttgaattttagccaatcttcttgatcgatttcatgatacatttcagggatactggccaactttgcatgtcatttccttctacagtgggatttatgatgtcatacgtcattctattcttaaaatcctttaataacttcctgatgattttcaagcattctcttttgtaatcttcccaaactataaaacatgcctagttataaggtaaacaaaattgtcagagttacatttgaattaatcaaaatactaacaaataaattgctacctttatatcattctaaattttatttttcaatgcagggcttaccttcctccagtcttcataggaaatcccaatccgcctacgacatctaactgataatgttgatatcaactggcgagagttttcgccataaaactgtcttctataattgactacgaggggaaatcttattgttacgaattttatgtttattacgcaagtgtacacaatcaagtagtatctcacgcaagtgaagtcgaaccacagggaattgga

SEQ ID NO: 37381 - DNA, 2291 bp, Cannabis sativa
aaaaaaaaaaaaactctttttttagggggcagttgttatgttcatatttcgagctataaatatggacatgacacgtgaaaatttagacacaaaaaccatagaagactcaacaataaatgaaatgtctcaggaagataattaatataacaagcaatgtcaatctcgcattacgcgcagacaatacaattgaagcaacatatggtgagatgataacactagaagtcttctgaggtataacagaatgaagtcatattgatggaaagggtagatagtgaattatttaagagcttgtagctcattgacccacatacttgtgagtatgttgaaaaattaagagaaataagcataatataacttatttcaaacgactaagtctcagggttgccctggaaaggttgagcgagaacaaaacaatttaaacatcgtctcgtagaatataaccaattattccatgtacattgttgaataacatgagtcatagtcagaatgtgttctcgattaaaaccgcttcaaagattagattagaagacagttgctaacagttattttatttgaaatatttacctaaacagaatcgaaaagcataattgtcatagaaaattcttataaatagggacaaaatctagagagaaagggacggccgatttcaaaaagagagaataatttagaaatatttatatcttatattctgtaaacactttgtgaaatctcaaaagtaatatgaactcgtggagtatgaaaaattaatttgaaaaccatgttaaaaacctttttattattattattattttagagtttatttatcatattaagattcatttattaattaataaaaatcggtattcacagaatgattgtaatcttaattattatgtttagttaaatataaatatgtaatgaaataaaatgtgtattatcaaaactatctctactttaatttaataaattagttatgtaagagtattaaaatcatttcattttatttttagttaaatgtattattttatcaaaagcgcgacaatgtaattctcataacatttgtttatgtacatattaatggtaattacaccatccaatataataagcattaaccctattacaacaacaaaaatgagaaaacaaacatggtaatggggactttgattatacatttcattcaaccaaacactaccttaatttgttttgagtgtgattagaataacatggaatctaaatctaatattattaagggtggcatcatgatcagctgggataatattaattggtgcctatatgaagctggaatctatatatatatatatatatatatatatataaatatccctatatattatacccatctaatccaaatccaaatccaaatcctaatgatcctaatctaagaacatgatataatctctcataataatctcacaaaaaagaaaaaagaaataagcacacccaacaacacacatagagcttcacttttaacacgtacatatcacaaccttcttttctttactttttctttttcgatctctttgttacattttttttttttttttgttttgtgggtaacgacaaatcacaaacctataattattccattattttacactttctttttttcttcatatacaactttttgattctatatatatcatcataaatattctccttccattactcaactctactgattaataattttcttttttcccaaacttatattgtaatgatatatatatgtatagatataattatagtgtttctattagggataatattttatgagattagattaggtaacattccaataatactattagagccgactcaagcatttgtccttgtccattattgttttcttcttctgttttttgaggtaacacaataccaaatttttacttattattaagacaacattgatatgtatatttttggaaaagaaatatgttattgttatctccatttaaagcattggttcatatatatttaaattgatttcaagtattgtcattgttaatagaaaaataaataataattataacgaatgactttgctttccatttaatcattattattttacttgatatttttttattcaaaaaatattttttattaaattaaatgataattatctcctgttgttggggttttcaagcttataatgattttgctggtatctcctttttatggaaagacaccaataaattttgatttattatatatatatataagaaaaattctacaatgcatcctcttaaaatgaatatattgatgtacccctatctgttttagcatccgaaata

SEQ ID NO: 37382 - DNA, 3482 bp, Cannabis sativa
  modified_base (1889)..(1892): a, c, t, g, unknown or other
aagaaggcgatgaagaagccgaagccgttgtatttgttacatatgcagaagcagaggacgtagaagccgttgaaccagacgacggcgtttcatcctcctcggtagtgttgagatcgatcagaatcagacccggacccggacccgccatatcgaatccaaacgaaaaaaaccctaactgaacacaatggtactttctaagttacttagttactacttcctcttcttattgttcttcttcaaacacttaacacactcccagtagtagccaatccagagagagaagtatcttctgctttataaagaagaagcctttggttaagcgcttattgcggaggaccaggttagtagagaagaaaataaatacaaaaacaaaagaaagaacagtacaagagactgcaacagtagagagagagagagagaaaagagtcatgcctgcattttagagggagttgaagttaacatctcctctttttttttcatataataaagtcatagtatgtacatgggagagagagagatgtttttttttttaatttattagaccaagatgaaagaaaatggctttttggtatcaaatcaatcaagggaagctttttaaaaagaaaccaacaagtaaaaatgaaattttgtttgagtgggtcggattggggttttacaaagggccgaaagaaaaattaaataaggaaattcaattcgattgagtgaatgagtgagtgagatgtagtacaataataatatgattatttctcataatttaattatattttgggagtgtgagagggtgcagcatagcagtgctgcagctactgcaatgctgcaactgctgctggggtgtgatgtgttgtgtgccagaaaagagaaagaaagtaaaagagaaagtataagactgtgttggacctgtactgtgctgtgaagactactgagaaagatgaaagagaaacagaaaaagtgtctttgttagttaaattccaaatattatttaatatttttattaaaacataaaaaaaaaagagagagagagactccccctgtatttccgggcggatgtctattctgtccccttctacacccgcaaatctcactcctatcctctttgccttaatctccccacaatcaaacttattattaacacaatcctattacgtttgagtatttagtctatacttcctttacatcatcagacagcatcaaatttggtggctttttctcatttttttttttttctctttccttttaaatattctttttataaaaacaaaaggattcttcatttcgtctactactgtaatcatcacgggagttgtttggggtagacccttttctggtaaagattctttctacatattttcatcacaattttagttttggtggatatatttttttttgaggtgattttggtggatatattgttgcatactataacttgaaaaattattataataactcttcaaattattcttagaccatcttcatggtcgaaaatttatcttaaatttagcttaaaatataaattaatattatataaaaaaaagtaaaatattattaataatattaatgagtgtcaaaaaaataataataattattatagtgtaaaatataacacaatttttagtatgtagttaaaatttaactacattttatatcattattgtagtttaattttataaatatagactaaaattgaatatgcactatctttatagtccttccttggaaacgttcaatcataaattatacatttctcatgtataatgtaatatagaattttagaatataacaaaataaagaagaagaagcatttgattataaataataaagtaaaaaatagataaaagtgcccatgttttcattttttttaaatataaattatctatatatctatatatatnnnnataaaggaaaagtatgaggcggtgatgtggcggtctaaaatcattctaaatagcttaatttattctctccttaattctctcatatttttaattttttattaaattaataaatattaatcaattaattaatcaattaatattaaatatctactaatttttttaaaaaaaatttagcattactaattaataaaattactaaaatatcctccattcttatttcgataaatatatattatacatatatattattttaatttattactcaattattaataatatattatatataattttaaaaaaaaaattcaacatccgccgcgaagcgtaggttgtttactagttaggcaatatagctgcccttatgcggtgttttatttgtttccctatgatagtttagatagtatatttatttttaatttatttattaattttattttatatttattgagttattattaatcaataaaatattatgaacatttaaaatgataaataaaagcataaattttaaattattgaatacatgtacaattgtctatactatacctcttacaaaaataaatgaatttgtattttattttttttaccgaaattttcgaaaaatagattaattagagcttaaggaaaatataaaataataaataatagataagtagttttttacgtggtttagacattaatgatccctagtccacgagtccgttgtattagtcttgttgacgagtgtttaagtattacaagtgtttataacataaatattagttctgtattccctttttttttctcttaaagaagaagaaaactcttaggaatttttgtagaggttttgtaagtaaaaaattattcactccttgcacataaaaagtagaggtatttataggcacacatgtggataaaggcataccctttacccacttagggttttttactcaacacaccataatggtcgagactacaacaagaggatctgaccgctagtttggtgggtagcttttccatcgtgtggtgcacggatgctgcaacataactcgtgggactaatgacatgtgtcgctcaaggttttaccttgtaaagttagtgtctaaacaagccgttggacaaaaaggagctacagagcacgtacacgcactaccaaagtctgatacaagggaaaaatctgattcgatgtcagaaggtatgcaactgtcgggttcagctccagataaggtataagcgaggtctaggaacgtctagctaaggctttcccaaactaaactaatctgctaccatcctggagcacgtgtgacttctgttcccacttggtagcagttttattaatgagaatcccggagtcctttcagtcttagctagcagagagagtctccgggtaacatctagtattatagcgtcttccgtgactctaagaagttgagggtgtacattaacaatgcgtagtcttccatggcatccttccgtgattgccacgtacacttcatttgggaatacggataacatttacttctcaagccctcagaactcaagagtgctgggagcttgcagctttctcctggatgcttgcctcatgtctctaatgttggaaattattttacc

SEQ ID NO: 37383 - DNA, 2004 bp, Cannabis sativa
taatttgattattcttcttctatatattgtagctatataggcaaccttgtggttgtacaagtcattttcgtggccggtagaacattagactttatgcttcccacttttacccacttatattaataatgctcatatatattgaagaaagaaaaataaagaacaaaacaaaaacgctttaaacaattcaacattatttttaaactttttgtatttgttattaactataaatatagaaaagatcttcgatattggaatgatatcttttgaaaatgagctcaaaaacaaatttgtaagggcttaaactctatcaaatatataatagtatttaaaataatatctgccatcatttaacaaaatatatattctttgttttttctaaaaaggaaaagacaagaaaagttgaagcatattctcgttgattataaatgagttggcgttgtttcattattctttattgatgcttcaggtaaatttctttcttaagcaatcttcgagtttttaattaattcatttttctatatatatacattactattgcattattgatttcatactctcataaatatttgttataagaatattcaacaatttaacgtgggatttgactcatgagtaagggtgtgttgtgtagatatcgaaccaaaacaactgtggttttttttaaaaaataaaacttctattttttcctctcagtatttaaatatatgtaattgtattaatgtttcttaccaaaggtctaatgaattgatttgatgcaattgtttcctatatacgtgacttttgatgcataaaccagttgtatgtaagtacttatttgaatatatatatgtagacgtgtgtctcaatataaaagaaaatgaacatttacgtaataaataattttcttttacttttattaatggattcattagtattagtgtaattttatttgatttttgacaaaagtgaatcacaagactctacgtacgacgaagacaccagaatatggcatattatttagccaaacggcatattgagacccaaactctgggctagctgtaatgttatattgttacaggccacataataccacttttattaatcaaatttacttctaattttatatttaattgatacatacctctttttatatatattgtacctaaaataccctgacataagagagtcacatagagaatatcttgaagtgacaggggcaaaattggtacaatatttaaaaaaagaggtaaaaatgatagactttaaaaaagagaataaaaataaaagaagacaatataaaaatagtatagagtataatttcctcaaatacttacaaacataaataaaattaataaaagatagtgagcacaccaaataatggtaatcataaaattaatatatacaaatattttgacatataaaagaatcgtcaaccaaaaaatattattgtatcaaaaataaaaggatttcttacaaaaatactgaattttaattaaaagtttacaatttttttatctcatgaatttttttttacaaaaatactgtgtttttataaaacaacagtaagacaacaaaactaaacaattaaaacaacagtggaacaactaaaaaacaaccgtggaacaatcgtgaaattaaactaatacacagtataaaacttacacggtatttttgaaaaaaaaaaattccgtcctagataaaaaaaaataaaaagatgaaaatttcagtacgtgatgtagaaccctaaaaattaaagggaggtatatacaggtaagccctaaaaaaattaaaatagtggtctattggtcttgggagagaaggagaaaggacagtcgagaatgatacagaacgaccaagcttttgagtttctattttttttttctttagcctttctttgctaccacttttggatgattgagaaaattacattctatactctttttatattgtcctcttttatttttaccatcttttttaaagtctatcattgttatctcttttttattgtaccaattttgccactgt

SEQ ID NO: 37384 - DNA, 2401 bp, Cannabis sativa
  modified_base (2163)..(2169): a, c, t, g, unknown or other
tcacgaccatggttcgaatcaaaaccctaaaattcctataaaactagattttacccactaataacctaaacatttcaaaaaaattcaaattttcaaatccctctcagccaaattctctaacaacctcaccaaatttcaaaattttcatcctattttcatcaaataaccaaataattcccatccccaaccaaatcccgctcatcaatttcttatttcccacaaaaatcacacccaatttcatcaattcaacctaattccgaatttactattcatcatcttcaaccgtgggaaattcttcaacaatggtgcttcattaagagatttctcatttgtaagtgcttttctcatcatctttctatttggattgaactatgattttttggttggattgttgtggatgatttttgatggtgtgattgaattattgtgaataattgggtattttgaaattttgattgcaatattttgtgagaaattgttggtggattggtttagtcttgtgattatgtgatattgggaagtcaaaaaattaggggaagtgctgtcaaaatttctaggggaaatttgtgcgtgagaaagtttgattgttgtgaatatgggaccaaaagaacaagggtgaatgaagagggtggttcatcatcaaatccttctcgagccacgtcaaagccacctttttataagacccaatttgtaagtgaagcggcgcaagagaggttcctcaatttgaaggataagccttacattaaagaccaggggattgattacaccaatacccctttaagacaccaaccatggtttgaagtgatccggagtcaaattgaaagcatgaactggaccacttttgtggatgccaaagaccgagccaatatcaccatgacttgtgaattcttggctaattgacccaaaaggaaacatggaatcgttaaggttcacaataaaaaagtcccagccacatttgatgctatcagcatgctctacgaattaccagatcatactagagatgaacagcgatggagagtgattgaagagggtgaacatcttgactatgtgaacatagctgaaactgttgggttcccgggattgaggttccatgaactggatgggtcgccgaatctgttgcataggtgtgaaataaatcatgtggcaaaaatatggctttactttgtgagtgcctgattggtgcctagcaagcacttctctgatgtgcaaattgatcatttaaagtatgtgtacgccatcatgaaagggtacaagattaatgtgggccaggttgttcgaggcagttttgacttaatagatcaaggtgccacgggaggtggagttgggttggctggaataattactgatctgtgtcaagaatatgaagtgaaagaattgccctatgtcaacaaagtaatgccgcaaagaaagatagatgtgagcatggtgaataggctcaaggagcccccatccctatgggcagccactacctgagggccaaccacaaggtagaaggtgccatgttgaacaagatgcagaggaggaaaatgtgccacaacgattgcctggtccaattgatttagcgatgcaatacacacatgcccagctcaactacatcattcaacaaaacaatcatatgcagaattacatggtttagaggagcatctatgatgagagtcaagtaactcaactcaactctcttatcacttgcatgaacattgggatcgaggaccccaactatctgacaccacctcctcaatttcacccatatatgatcagccgccaccaccgaaccccttctgatcagggtctcaagtaagtctctttccctttagttttatttgcacatgggggacaatgtgaattttagtttggggggcttaaaattatttttttaaaagttattttgctttagtttagtttttttttttttattttgttgttagtgattaaataagctgaaatatttttacaattttttttattttatttacagaaaatgcggtcttttatgttatactcttgttaatttgtggttaattttttatgttattttttgttgttgttttgatattttttagatattattttcatgttacttttatgtacgtttcttgttgttttcgtgttgtttctatagaaaaccgtaaaaatgtaacaaaaaaaattctttaaacgtaaaannnnnnnttttttttacaaaaaatggtgcctaatgtaattattttttatttatttataccataaaaaaagtaaactcttataatttttttatatattgtgtaatttctacaaaatagtttataaagtaattcccttattttatacagtagaatctctatccaaaaatacatttgagactaggcaaattatattctaattgagaggttacaactaaatagagttacactaggaaaaaaaa

SEQ ID NO: 37385 - DNA, 3291 bp, Cannabis sativa
tatttcctctcctgttttttggatagtaatatcccaattatcctattaattcatattttttttctgctattcccttcccatatagagagtttcctctttgttttctcagacaaaaatcaaaacccaaacttggattttccctgaaaatcaaaataataaacttgccaatttcaaactccaaaacccatttgaacccttcacttctcttcaaatgggttttcaaccaagctttgttatggtcacagttgctctgtttttcatattcactgttgcctcagcttcatgttccgatgggcagtgccgggtaagatttatttatttaatcccattgcaacaaaattgaaatctttataattgaaaacaaaaaatgaaacaaaatataaatatatacatagtttttttgtgtagttactagatgaatgctcaagtgatggagactgtgctcttggattgtattgtttttcttgcatcgaaggattttcagggtcgagatgtgtgagatcgaaaatcacagaccaattcaagctcctggtaattaattattaaaatcttctcatatgatatagccagttttgataatcgatctctttgtgaaaattccagtagatgcatatggctttctttcataaatgaaaacaaattttgagtttctcttattcacataacaaagtagacagtgacgtattcactgcaaagtgcaaaaacaaaccaaacgtgatgctcagttgttggttatctattactagactcaactataaagatgaaaaaacagtgtggtgatggtgtgaagagatcgaatcttattggttgggctattatgggccatggcccacaactcctatgtagctcattatggaaaaatgattgggcatagatcatttacttcacatttagggtggcttgtgtgctatttttgaaaagttgaattggatttaacttcaccaagttcaaaattatagaatttaaatttaattgtgttctaaataaaatgtaaattataaatgaaaccacatattagggatttgtctagcataccgttgaaattgaaagcacttctaaagcttacttgagagagtatttggataattttttgcatagtttttcaaaattactttttgggttgttaagggttaaaaggttattttactgggtagatgtccacgtagatagactatccaaatagttactagaaagacttttcttcagttattctattgtctaatagtagagtaagagatgtttcaaaggagcccaaagcttaatttgattactagctaactaatcataaaaagaccttagtcatattaaaaatgcaaataaatcaggaaattatacaagtaaaccaagtgtcaataaattagtttagtattcagtcatcaattaaaataagtgtttacttcaaaaataaaaaattaaaataagtgataaaaattgttaaagagaataaagattgctccaaattcagtgaatatacattttggtgatctttgtaagaaaccaataacttgataaattagtgtatatacgtttacttgtttggctactttctaagttctcattatgattattcgtggtgcactttaggtttttttttttttttaattattattgtaacaaatctcttaatgcaaattagaatatatctttatatctaaagcattgctagtaggtaccaataataacttataagtgattaattttcttttttatattatatattaatttaaaataagctagagctgatataaaattatcctaataacaaatagtaatatgttttttaaatagtgttgggttaggatatttgaggccttaaaatgattactagcttttgtgtacatttgaatagaacaattctcttcctttcaacaaatatgcttttttgacaacccacaacgcttacgcaattgagaatgagccatctcacactggggtccctcgcttcacttttacaaatcaagaagataccattactcagcagctaaatgtacggtaaatatcacacagtaacaagtaaaaatataagcatttcatctcagcaaagataaacttatttatcttcactcttcattttagacccaattttaacttttattacaatatcatccctacagaacggagtacgagccttaatgcttgatacctatgattttagaggagatgtttggatgtgccattctttcggaggaaaatgctacgactacactgcttttgtatgtacaattattaagtttttgataatgataaatatatgtaaaatcatttatttgcataatataataaaagactaatgtgtagggaccagctatagatacattgaatgaaatagaagcattcttggcagccaacccatcagaaattgtgacattgatcttagaagattatgttaaagccccaaaaggtttgagtaatgtgttcacccaagctgggctaatgaaatactggtttcccttacaaaacatgcccaaaaatggtcaagactggccactagtcagtgacatggtgtctaatagccaaaggcttatagtgttcacttcaattcaatcaaaggaacaaactgaaggaattgcataccagtggaactacatggttgaaaatcaatgtaatcctcattgtatacttggttaattagataaagtattgaaacgtaattttctgattttattatgtttataatttcttagatggggatggaggaatgaaagcaggaagttgtcccaacagagcagaatctccagcacttgatgacacgagtaaacgtttagtgttggttaactattttgagtcagttcccattaaacaaaccacttgtaaacacaattcaggggacctcattaacatgcttcgtacttgttatggtgctgctggaaacagatgggctaatttcgtagcagtcgattattacaaggtcatactcttgagcacaccacacactcgtattcatgttaattattctttttatctcttgtaattaaattgtatgtcttgttcatttattatgtatatgtgcagaggagtgaggggggaggatcatttcaggctgtagatacgcttaatgggaagctcttatgtggatgtgatgatgtccactcatgcgtggtaagtgctcataatgattcttgtacatgtagttgtaattatatacacatcatatgtatataatcttttggcaattttatacttgggcgctatttttgacgttattttctaaaaaatggatggaatgtctcttctcatcacttcaatacatcatatatatttgtatgtatagtaccaaaacaaaattgctcc

SEQ ID NO: 37386 - DNA, 3074 bp, Cannabis sativa
tattaatgtaaatcaaaatagtatctcactttgccaaatggtgaaactagctgttgaagagctgtaattctttctcctagcttctcttttctctatcaaaaacattaacattttaaaacaagacaatagaaaatgattgaatgaaaaattaattaatttacctttgttgtagctactgttttgatctttttagggagtgtttgatttgggactgtacatgtaatggtggtggcggtactcacacagtgaacagattcttggtccgatccatttcgctttctctggccaaatgcattaataagttttaaccaaagagaagcgagaaaaaggggaataaaaaaaaactagcaataagacaaaactaatactgacatttgatttagacatggtgctgaggctgacgctattactcgaagaagaagtagaagacgacgagtcactacaggtaatacctgatttctgagtcgactgatcagagaaaactatttcccctctgttgggaaaattttcaaaacagagcattctgggcgttttctcaacagatgaaaaaagagaggtattgatgctactattgttacacttattgaaaatctggttcacatcgagacccaaaacgtcgtcgtctcctaataacaactgtgaaaaactagttcccccggtcaccgccaggttgtcaaagtcgaaacgctcatttttggccattgagttcttgaattaaacttttgttgggtcttactttataagctcagaaacccataaaaaagattagaaatgtaacggcagagaaagcaagagttaagaaaactgaaaaaacaaagtggcagagagagtaatgactggcgcgcgtttttgggttagttggttttgtgaaagtgaaagaagagtgaagagagaagagggagtgtagtgtatattattattatggtctgtgttgggttgagggggttggagggggaatgaagaaggagtggctctgtggctgaggtttccgagggtttggtttttggcgcttcttggtcaaagccaccgggcccgagaaaaccgtggtttcgaggtccaaggcagtagtagtcgaaactcctccaacaaccggaatccaaataaatgaaattttccgtcgctttctttctcaattagtttgcatggaattggaagtgggtccacctgagttaattcgtacacacacgtcagttgtaggccatctgatcgtgtttatcacggacgaaaattcttaccacttggtgggaccagatctcagcttaaaccacagggtgtgggaaaagcattgttgcgaggtatcgtgaaaattgtcccgcttagaataaatatatgagataccctatttattattaattggttttgagataaaattccatcattctaaatatggtatcagagtcatattccttgcaagtaagtgatccgatctgtacctatacagatagtaaccatatccaatctaatacggttcaagattgatgagcaaaaaatagccatcatcttgagggagaatattgtggacattgtcctacatgaaataaatacatgggctactccactcattgtcaattggttttgaaatagaatctcatgattctcaacattgaggagcattgctatatcatgggtatgtgatttgagattttataattagtaagcacttttattaaattaaaattagaatgaataagtcaatattaaattgtattaagaataatattatattttataagagtattagatactaagactgttttttagtatttcttaacacttaaactattttggtaggagggggagataggtgggatggagaggggtggagggagagtgatagaaggagagactaaattatttgtttggcaagagggagtgaaggagggagaggagagatggagggaggcattctccttccaaactttcaaaatttaatccctccaactttagaagagaattttaaaaaaaaagacaaaaaacacattttgtaaaatacaataattatccttaaaatataataaaaatttatttttaaaaggctaattttgtaattttactaattaattttttctccatccttctcacctaataccaaacaatataaaggagatcaacaattctctctattcatcttactctctctcctctctaacctctccatccatcttactctctctccctctcatcgaacatagccttagtaccttaaaaagtgtcttatcattgactagaggtattatttaaaaaaaatattactttaaattatgtaagatttaatatttaaatgtactaataataatataatatattaaataatactatgtacaataccttttagtatttttctttttataattgagcatattgttattagagctactctaatagaaagtgaattatagaatgctgaaagaagtcgacacatttttactagatacttccttaaaatctaaatgaatgtcaagtaaatatatgcttaaaagtggcatccttattatttgtttttagagtatgaaattgtaattatttagcaaaagttatctcaatatacatcccatattaaattatctcaataccaatatgccaattaagtttctctcacaatcactttcttaaattttgacctcttgtttgctatccatatggcagttttcattggacccacaaatgacctgaatatagaatgtgggccccggacccacacaatcatctcgcagactctcccccttactgtcaagtaataaatgaaccatacacactaattaataactgcacatttgagattttgtacaagaatggttagagaaagaaatatcatttctatgatttatagctgtcactttatcattatttgtacattgttaattatagaaagaaaaagaaaaacggcagagtgagtgagtgaggtatgaaaatggaggaaaagatagtacgtaatacaaaatgtagtagttagtgtgagtgatgacgtgttcagttagtgggagtttagagagaaagattatagtattattaggtggcaaaagaagaagagaaaggacagaaatgtaaagacaggttaatgaaatgaagaagat

SEQ ID NO: 37387 - DNA, 3536 bp, Cannabis sativa
gggcataaaacccaacaataggttagttctgttagagtgagagttgttagttagttacttttagtgtactttttgtaattaattagttagtttctgtcttagtttataaatagtccatacacattgtaattcattcattctagataaatgaaaatcactcatctttttcaacttctacttctctatagcataaatggtatcaaattcatgtgaatcgtgagctctttttcttattattcttcctcatcgaggttcattgattgtttgtatcaatggcttgtagaagagttaatactcaaagccagaccgcactaagaaacacgtttgaagattctaatcctttctctattttcaaactgagttctcaatctcatgattcaagttaagatccttattaattttccaatagcgatcattctagtgcaaatcttgttcccaatatccttatgggaggcgacaactacgattcttcgaggagagcaatgatggtggttttgcttgctcaaaacaagatgcaatttataaatgggaaattgaagcacaacctgatgaagatcatgaggactatgatgtttggaattgatgcaataacttggaggtttcatggctacttcatgtcgtaataagagacaaagttgatagtgtcatgtacatgaagattgcatcagatattagggatgaccttctagaaaggtttcatcaaagaaatgtttcaagaatatttcaagctaaaagatctatgcaaatgttgaatcagggtgcattagatgtcacaacatactttactcggaagaaaacattgggaaatgattaaagagtatagactactacctgtatgtaaatatggtactatgaaggttgctatccgcatttttgaacaagcgacatgtgtgcgtttaatgtctgtagaacaatttacgggcatattttctcatggcccaaatgaaaagcggttaggccaaataacagaaggttcatattcggttaagattgaccaagagtaaacccaaattgacgaatcaggagagcagaccagaccgaagtaccacatgttcgattagacataaatggataaatggataccccatggtatcgcggaagggtagtccaaagtgtgtcacgaaagcccacctcacgaaaaattgactttttagaatctgtttgacgtggtgcgtctctgacaccaaatcccacagaattaggagcttgtccctcacaacgggcctgggaaatacgcacaacactaaaagtaatctacgttttgtccaatgtccactcttttgaccagtatcatagataatcggcgatgcatagccacctgtcaacaccaaagagtactatagcgtacggaggacagttatctctcaattgagcctcatctaccaggcccaatagtcaatattaaattatattttactccactagtggacttatttctatgtaccaatctctatcgggttcgagtttgacccaaataccaattttgacctttaaataggacttgatctcttcatgcaaagatttacgaactttgactaaaaactttacaaaaatttggcaataacacttgtgtaaaaatactccacaactattcaagcttaataatattgactcgcggactaaggttcattaatgctccaatcacataaaaattattgtgtcattatctttaatttattcttatttaagcttaattttttcattaaacgatttccaaaaatctcaataaataaaggttgttcaagaatatcaagaagaagacaaaattatgaagttcttgataggtcttaatgagtcttacaacaatgctccctcgcattttcttatacaagaaacacaacctggagttaacaaagcctatacttctataatttaagaagaaaggcatagaggaatttgtccaattacctttgacattaaaaaagattcaaattcagctccagaatcatctaatgatcagtttgtaggaagtactagcctcaatttcctaatcgaagtgatggagctccatcacgaaaagctactacaaatttctcaaagatcaaagaataatcaatatgaactgaaggcaaaactcaggttgggttctgagcataggcgagctaagtttgtgcctatggcccacctagcccaggggtccaaaaaaatcctcccttttaaaatcacaattttcttactgattttaaaaaataccacatttaactctaaataaatgtccaaaaatattttttttgcccactaaactgtcaaaatatcatcaagatctaatctcaaatcttactctccaatgttatcttagaaaaaccaaaattctccttcatctgtcaattcaaaccaaccaattgtgtcacactttttctggtaagactaatcttgcttataatggcaaatggattattgatacaaaggccatatatcatgtgtgctttgatattgcattatttgttgatatcaagaaaagtacttgctgttcttttgttaattttgtgttcctaatttcaatatcagcttttatctgtgagtgctcttatcaaatctgattcatgttcatttttttctatcctgatttttaatgatattgtatggtactatagcttagtctagtgtgtttagtgaagctgtaggttagtcagatctgttagagtgagagttgttagttagtgttacttatggtgtattttctgtaacaaattagttactctcttgagctgtcttagtctataatagttcatacacattgtaattcattcattcttgataaatgagaatcactcatctctttctcaacttctacttctatgtagctaattaaaactctcgagaaccaaaagtagtaaaactcgaactcctactttcacattagaatcattatcttatcaagtttttccttttttttttttttttgttttttttgtttttgtatatttgttgttataaattagtaaatttatgaattattctatatatatgaaaattaccttttctttcattctttctttatttattttgaaaatcactttctttaacacttaaatactaaaatatccctagtcatctattaggatcatttaactgaagtagtaaaatcttgatcaaaaactattacaatgctcatgtgacttgatacacggttcatcataaggtaatttaacaacattttaaattattaaattacttaactctcattttcacttaacattacagtagtagcacttacccaaagttcagccctgatatttatagattagaacacggccaactattgagacgggaccacaaattcgattacgagtgtagcttccaaatccaaatactcattgaacttctcgtactgctttgcatcatcccctgcttccaattcactttcactccgaaataccgcgagaatccccatcgaatatcccttccctctatccgagaaattcgcgccataagtaaactcactcacttcttctcctaaattctccttaatttctctcattccctccaaaatctcggatctgatcgtttcgtcccctaaaccttccttcagcttc

SEQ ID NO: 37388 - DNA, 2532 bp, Cannabis sativa
aagatggtggttactgaaggttgactaagaagtaagaagacaaaagacaaatgaaaaaaaaaaaaaatcacaatacaataactgtctcagagcatttagtgggcagacgttcaggattcctctaaattattttggttaatttaagaatgatattaaacatagaaaataaggtcagttttaaattaagcttataaaaacagtgagctaattaacattaattcttgcttttacacataattcgttttcatcatttaaaatattgaatatgataattaaattcaattagcatactttttttcttcgggccgaaaggtcatcgtcgtctttaattttggttaattagctatagtaatttctatgacagagtactagtttcagagtactatacattaatttgttgtaaggatcgtaatttattatacacaaatgagataaatatatgatcaattgggattaactatgctcaatcgtaaaagatataaatattgtgatatgtttgtaaaaaaaaaaaagcaaatgcatgttatatttattattgtacttcaatgcataataatattttatgttgaagattatgaaaaaaaaaaaaaaaaactattattaatgattataaataaattaaataattaatagtaatagtataattaaaaaatgattattaaaatttattattgataataaatgagaaaactgtaattgaaaaaacagaaatttgacacatgaaatttttaatgtgttaaatttaaataatatataattgaaagttaatttatatacaattacttatttaatatttgacgtttggttattattgaatcaattagttataattaaattagattgatttatgcacggatctctttatttagtgtaatttataaaaataaataaataaataacatgcatattttatttttacgggcttttaaaattatttggatcgtgattttagcattataaattactttttttttttttaactacgtacaaaagttaaaactataagacatatccacatcaaattcaaaattagttgagtactacccaaccttaaaaattgtccaaaaaaaatcttataaatatatgtttgatttattcaaaaaaaaaatattaaagtcaccactcctctcattacccacaacatcaggtaaattttttaataactcaataataatgtgttacgtattttaatttaataattattttttaaaaaaattaataatttactacacttataacttgttacttgtaagacatgttggcaacaataatacctagctaataacaaagctcatgcaagattaatacgcttggttcaaaccaaacaaaaaaaaagaagtgacaaagtgcatcgagcaataatgatcaaattaatatatcctccttcctcgaagcattccaaaaaaattatgaacatttttatataaatatatatatatatatatatatatattacaatcgatcatcgagttataaataattttaccagctagttatgaaaaactagatcaaatttattatatagtaaatctccaaaaagaaatcatgcttaaaaaatttgtccttatgtcgatcattgatcatcatcaagtaattaaacttcttcgcttaaaaaacaaaagacaagagtggtagtggatcgaaataataaaagcccgaactattatataattattgtctttattttttaggggaataataatatttatttctatgtatatatgccatgtgatcattaatttttctgatcatgtatatgaatggaatgcataattaatcaagcatacaagtacattttgtctagaaatttattgaatatatgtcggtcgtatcgtatatatatatcgtcttgatgcctaacaaaacactgtatacgtacatgatgaataatagtgtgaaataatgcataacactaatctacccgtgaataaaactgtggaataataaatataacagtacgaagatttcacgaatgagacttttatcactttcattattttctaattttgaacacttctatgtctcccaaacctttttggtctttagaattaatgggaaaaaaaatattaccctcaacctcttattataatttgttagtcaatttttgtactcgaaaacaaatgtcggaattttttttttcaaaattttcttattgcaatgttcgttatggttagaatatcatgccggtaaatttttaaaatttcgaatagtttatagtatcgaaaatatgtttgaaattttttgaacacgcatggtagactgaaatattaagaactatattttcgatactgtaaacactactacaaaaatgggttttctcgacgtttttaaatagtcgtttaaagtattcacgtcggtttctataaccgtcgcctatacgaccgtcgtaaaacagacttaataggcgacggcgacggttgaaaactgtcgctaatgtgagtttctcgacggtttaaaaccgtcgcctataaaaccgtcgcctatagtatagggcactgttataaaccgtcgcctataccctgttataggtga

SEQ ID NO: 37389 - DNA, 4636 bp, Cannabis sativa
  modified_base (2941)..(2941): a, c, t, g, unknown or other
  modified_base (3148)..(3155): a, c, t, g, unknown or other
taacaaggacctaagaatcggatctaatattgagatgatggaccaagatactataatcttctttcataaactagatttcagtgcacttcgaacttttactttacactgaaaataatatggcgtaacccagaaaagaatgtaacaaaaagtacaaagctgatccactttatttttttcacttataaaatgtaaagaaataataatgaagcctttttgagcaaatataattcaaccgtgagtctccattttaggtgagagccagattgcatatatgcaagatgtacacagctttttgcaatttaaaccatagatgattaatctatcacatccaaagaatggaaatataaaataccaagttcaacaaattcctacatttctggcacaatatgatatgaaacattaaaaaaaaataatcatacctagcgtactagaattatcttccatgggagcactgacaggagcaggactcttactttctggaagaaagggaataaaacacaaatagtcaaatagaagtttaactagcaaataaacaaagcattagacgtaacgtaatagcaaaccacataccataatatgaaaaaaagttatgctgcgacatgtatggcactaaatcaattgtctgctcaactctctttcttttcttcctcttcataactttgtttcttttgatttgactagaaaatggaagtgactttgaaccaaaaccttctggagtataagtgtcaaattcacgctgctttctgtcatcatatttttcaagttctctgtcatatttcatagcttgcgatcgaagttctttaatttgcaattccatccatttacagcgccacattataggacgtatatacattctccaatgaggcgtcatcttcttcttcctacatattttaagaaacagccgaagtaaagaaactattggaatatgcaaaagaaaataaatcaacatactacaaaattactaattaaaaaaattgtaagcaaaacatgctctaaggccaagaacaatttcaaacgaatgcgctactgtagtatcaactaaaatgatgttattttattgacgacacattttgtttagcaaatcaatgactaaaggcaagaaaatttgagaaaagaaacatcaaactctaataaaagtttttgtattgatgatttacctcaatcgaaatgcatcataatattcatcgtattctgatattgaagcacggtcactgcgcaaccgtgattgaacttcatcaccatctaacttaggactattctctctctcggatactgaatcaccaaaagaacttgaacttgaactttcaattacatcagcacgattggattcaatcagcccatcgtcacaagaatatgtatcaccaattatgtccaactcctcattatcacctccatttggttctgtggtttgttgagccagtgattcttccatgtcaaatatgtcgtccttataattactcaaacaaggcaagaaactatcatcatgatcttgctggatggttgtgatgttgtccttatgaaacgaaactctcattgacgcttctaactttggtttaaggtccaattcaggaaccatcctgcaaatttccaagtatagtcaacccttcaaagtggggaatcttgtctaatttattttaatatgttggtatgagtctacacatactatacacgcaatttatttctgaaaaacgaagcaaattaactgataataatattgggaaacatatatttttcctaagaccaaaaaacaaaaaaagccaacgaattttcattgaataaaaattgagaacaaataaataacttattattcatcacaaaaggtattttcgggaaacaaactctaccaaaataggcttcaaagaatctaagctcggtaaattacaaaaatttcttgggaaagatatacaaacacaactatttatatgatatagaaatgatcaataaaacgcacaagataccttattgagatgaaaggaagagaaccggcgaagtgggcaagccggaggacccaattggagcggccacagtagagaagtttagggttttttctgtgaaagaactgtgttgagagggtttaggggttaaagggtttttctgtgaaagaactgtgtttatctttagtagtgaaaacccaggaattgtaaagaaggaagagctgccccaggatttcgccacatagagaaaggggacggagatgaatagctgaacacagaaaattgagatgtaaaccctaaaatcagaagagagagacctgggttttagaggaatcttctattgagggcaaggttcgtactgaattcagttggaacttggaaatcggaagtgaaaaaaaatgtttcagttgattcggtctcagtgagttgacaggtgtccagaaattactccatctactccgcacaatctaatctacgatcaataaaataccctttctttattttttttttaattttttttttgttgtcttcgaacttttacaatattgattttggcttattcttcatgaatttttatatttacataaatttagttattttgttaagttctattccattattccgtttaaataataacgtatctttgtcaattagtaactttacccttaaattttaataactatgtaatcgtaccccacaaaataaaaaaaaaaagagtcgatattttttttaataaatcttaaaaaattaatttagatcttaaaaaaaattattttaaatgattaaaaaaattaaaattataaaactaattaagcgatataacaaatttttatttttattagaaaatttatttaaatatttaaaaaatatattaaaatgcaatttttaaaaattaaattttacgggaaaaaccttgagtatatttatttttattacaaaatgtagattttttttaagtaacctttatattttttagtttaatttataactttttttcaaaataattntatatttttattgaatttttaaaaaaattctttattttgttaagatatgagtttataaatataaataagtttaattttttcttcaaaaaaatttagtttatttaaattatttattaaatttttaataattttgatttaattttttaagatacatgttgataaataaaaaaaaaagtttgaaatatttttttttaagtaaaattaatnnnnnnnnattaatttaatatttttattcaattttttaaaaaattttattctttttttctaaattaatagaatattataattgattttaaagaaataaaatattatcatttttaaattatttttttttaacaaaatgggacaaaattctgtattagttaaagtttagggggtaaagatgttaatttctaacggtaaaagaatgaacctaacagaagggacataattatgtaactattatatttcagggagaatttttaacaagttgtatatttagggggcaaaatcaagtagtgtcaaaagttcaggggcaaaaatactaattattcttttttttttcttaaattgtaagtaatgggtaatatgtatttcgaatagttcaccttgacaaaaacaaaaagtatttcggatattggcagtaacaaaagtcagagttttgatgataatcaattactaataaaataacaataataataataaagcaaaattatagagatttggtcgtgtgtgataatacaatagttcttctgaaattatggggcttcgatggtagttcaatattttccttggtacccagacagggatgatagtccgatatgagctcgataagggcacgatggttttgcccgatatatgggttggttcaggcaaggatgatagcccgatatgggtctgatggggcccgattagtagtccgactttgtgatgggtccgattattttccgatgtggtgtctgattgttacctgatttgcagctaggacttaagtccacagatgagggcacgattgtgtgcccgatgggctcaatggggtccgatgcatgacagatttaaggcattttgaggagtttgtatcattttttcgttggatttttgttataaattgttaatagtgttttttaaatacctgtgacaggttcaactgtttttgcgttcattatgtataatggtgtttgggagcttaagggtagagattgggtttataactaggttgaaaatttgacatttgagattaatacgaacgtaagctactcaggtttggttgatcttttgtacaaagaactcaatgttgacaaagtgtggtatgatttgaaattggaagtgaattacaagtacatgaaaggctggagttattggaaatgataagtagtaaggtcatttttatctatgcttgcgaagaagccagatgaatttactcccttatttgtgactttgttaaagaagaatgtttgtatcgatcctagtcccacaccaagtactgttaaggaactcgtagcaatgttgggagttttgttccgaaaacgaatctagaagtattggcagctgatgtgttacctgaattaaacactatgatgctgactgttgacattatagcacaaatgccttttattaatggtttttgtgatggtccagaccctgaatgctatgttgagggcaatgatgacgtaagagacgaccaagatacagaggtccatgatgctatagctttaa

SEQ ID NO: 37390 - DNA, 3019 bp, Cannabis sativa
acacattattgtcttcatgagtccagaatcatactttgctttaccccctagtattcctaaaaaaaattttgtttaaccttaattactttaaagatttcttgttataattacatgctgacacactagcaacctctataccttgtttttcttcactataccttgttgatcacatattagcttttaatagtctctgcaacctaagcctataaatttgattattttcaaatatccatttcttaccgtgatgaggtacttcttgctacctaagaaattacatgtatctcaaacctaaagaagttatccaaacatcaaatttaatccttagaacattatccattagtctctgggtttatgcacctagttatttaatttcctgcaagttgctcttgaaaatcttccatattgtaagttttactttccaacaaaggtatcatagctaaaggttttatattatacttttgtaccaacttaagtattttttttccttctgtctgaactatttctggatatttgcaattgcaatcactgcaaatgtggtcatgtggcatggaatccttgcctagattggtctaaagccccatgtctattactaattgtgggaatattgacataacagtataagtttttaacattccctgaaaaaactgctactttcacatttgtaaaatctctaagtttcataattgaagagtcttctggtgcaaacaacatttcaaagcttaaaatcctctaaaggatgaattaaatttacaccatacaactaattaatttacaatattcaagaaacaaatgacaaaggttagatcttcaaaaaagcagcaaagtgaataatgaatatttaatatgatgtgaaacaatgttatccaaacatacccattgtgatggccatggcctccttttggctgaaccctgaggacaccatttggtaagctcatctcatcataagcctacatcagcaggaacgaagtatgtagtaaatcaccttgatgaccgaaggcacgcaaatattgattaatctacgcctgtgaaacaaaggacctaccagtaaaatatggcgtagaggtacttgatagtgtgcagcaagtggtccaaccttaacaacaaaagcaaatgtcaattccagttgtaattagctagtctttagaaaagttgcgaatccacattttcaactcattcaatcagatattctccattacatataaatgctcttgaagtacataaaatttgcagtctattttcttaatgatactctttaatttacattgtgggcaccatacccctgagaattagaaggtaaatatatagacaccacatatatgagaccattggcatgcctcaagtaattgaacagtccttcaagcattatagtttttacaccacaataacatgttaaaaacaatctaaagacaatttaacgacaacatgaaaaatccaacccatcaaaaagtttcatgtgaactttttaaacaataaagctaatgaaatacacaaaagtatgagattggaacgaaccgattccccactaaaattcatgtacccttgtggcttcaccaacaaaattggtacctcaccgatagaacctgtactgaatcaaacaaaaagaaataagtacattaaaagaagacaaaatccaccataaagaaaaaccaaaaacagtttgataagtaaacaaataagatatacctattccaaccaaggcctttgactgtattgtattcatgggaatgccttgtgccttagcaagggcgtcaatcatttcataaccaacctattatacaaatatcacatcaaccaaggcaagaacaagtagctaaccaaagagaaaaaatcactttagacttgtatataattacgttgtgtctagtcccatagtacttattccctgggtttcccaatccaacaattaaccaaggcgtgtactccactttagcaccagtatattgatttggcaacgaagcacgtatgcgaaaactagctggcttaactgaacgtttctgaagaagtggaaggttatgagggcttcttggatttgataaccaagaatttgggcaagaaattgcatacaacattgacctgaatacataaaaggaataaaagaaaaaacaaataaatcatattcttcttcgaaattctatgaagaaatgtaaggaattaaaagcctaatatatacagagataatttcttgaagggcaggaactccaaacctggattcccaatgtcggaaattcagaagatgaaatgagaggcaaaagaggaagatggagatgaaaagaagaggatatagaagagtgaagtgacaatgcacaacaacacctaactcttacctataagcttaaattgtaagtctttttcttaaaattaagaaatttgagacagtaacagctcagcaggacaataaaaaaacatacatgataacagtaattctcttcgccggaattttctcggcaaccaaacaaatgatatatgagaaaataaaggaaggaaagaaaagcttagagcaaaacaaacctgggtttgaatttgaagagaggaactgtaaagagagagagtgagaaagatagataggagcttgggtttgagcctcagttatgggtgtctacctctcgattaacttcttgatactgataagaatataagatgctggactgataagatactcataacttcctcgatcaacttcctgatcctgatatatattatttttctcttttaaaaaaaaaaaaagaaaaaatatgcttgatttttcttcagcaaaaaaaatatgctggatttctcaaaaaatattatccaataaattctattgcccgtgtattgttttctcgaatgaggtttcttttccaagtacatggattattaagttctcaaaaaaaaaaaaaaaaaagaaaaaaaaaagaaaaactattattgattattttaggggactcattaagtctcttactagcatttgaagtagggatgcacaggaggagatagtgctctcctgttccaattcttattaaggattttaatctctattctc

SEQ ID NO: 37391 - DNA, 3236 bp, Cannabis sativa
tatacatgtatacgtattagaaaagttagatatatttttttggaatttattatttttttttttattttcttttttttttaaatattttatatttttatagaaaattaaaatattaaaaaattaagagaattaatgatactaatgtggtgttgattcctaaaaagaagaatccggatagaatgggtgacttaaggcctatatctctttgtaatgtgctctcgaaaattatcacaaaggttttggcaaatcgtatgaaacatcttcttcattatgttgtgtctccaaaccaaagtgcgtttatttctgggcggttaataacgaataatgtgatgatagcttttgaagttgtgcattatttgaagagaaaacaaactgcccgagatggataaatggcattgaaacttgatttgagtaaaacttacgatcgagtggaatggcattttctttgtgccatgttatccaagatggggtttgacagaacttgggttaatttaattcagcagtgtctttcttcagttcggtatcacattgttagtgggggtctaaagttgggacctattgtgccttctcgggggattagacaaggagatcctatttcaccctacttgtttctggtttgtgctgaaggtttatctgctcttatcagaagatttgaagagagaaggtggttacatgggtgtagagtggctaatagagctccgattatatctcacttgatttttgctgacgacaactatatttattgcaaagccacagatagagaatcagatgaagttcaacggttgttaagaatgtttgaagtagcttcgggtcagcaagtaaattatgctaagtcctctgtattcttttctacaaataccacagtcacatgagaacttttatttatgctaggatggggattcaacaagcgggggacaacagcaagtatctaggtttgccgagccttatgaccagaaataaaaatgcggttctaggctatctcaaagacaaggtccgccaaaggatttagagttgggataataaattcttgtctcgagcggggaaggaagttcttatcaaatcggtgcttcaatctttacctacttatgctatgaatgtctttttattaacagaggagatcagcaaggacattgagcgtatgatgagtaaattttggtggcgtcctaaagtgaaccaggacaaggggattcattggatgagttggaagaggttgggtagaggaaaagatgaaggcggcatgggatttaggaatattcgggattttaatcttgctcttttagccaaacagggttggcgtttgttggtgaataatcaaagtttggtagggagaatttttcaagcaagatattttccgtcgggcacctatcttacagctgtgattggtaataatccaagttacatttggaggagcattcttgaagcgcaatttgttgtcaaaatgggtgtccgtaagtgcattgcttcgggttctactactagtattttgagggatccttggctcaatgatgagcaacaacctttcattatgtcttctaatccaactttggttaatcaacatgtgtcaacgttaatgaagactacttgtagagagtgggatgacgaggtgttgttggatgttctttgtgaccttgattataggttagtcaaagctattcctcttagtcagtcggttgatgatgatttttggttttggtctaaggatagttcgggggatgtttactgtgaggtcggcttataatctgattcaggaaaataaaggttcccggggccaagctgataactctgggttttggcgttctctttggcagttgaaggttcctccgaaggtgaaaaaccttttatggcatgcgtgttccaattgcttacctacttgttttcaactgtctttgaaacatgtgcctattgatgttacttgtcctctctgtcatggaggggttgaaaccgtcctgcatatacttgtggagtgccctttttctcataattgctagcgggctgctgtaattccggactttccatcggttgcttctaattttgcaggctggtttgatgatggaattaaggtgtggcggaaagatgatcaacatagggctgccatgttgtgctggactttatagaataaccgaaataaagttgtttgggactcaaagcactcttcgattgaggaggtggtgtcaacagcttctcttaactttgtctcttggagtgatgctcaaaacaagtactctacctctcctaatgacttgggtcatgagcgatatgttgagtattggactaaaccggagttaccttatatcaaagttaatgttgatggggctattttctcggaagaaagtcgatttagtttcgggatggtggctagggatagcaacgactttgtgttggaggcagttcaaacttgttgttcgggttcttggggtcctctaatggtggaagcattgggtctaaaggaagctctgagttggatcaagaggaaaggttggcatcatgtaatagtggagaccgattgtcttacactcatcaatgatattaagaatgctaagtctttagtttctccttatggtttagtgctaaaagattgtattagtttattaacctctttaatttcaattgaatgttattttgttaaacgatctgcgaataggcttgcgcatgcttttgcgagagcttatcttttggaggttgatcgtattcttagtggggtttctttacctgcttgttattcttccttagttttggaagactcgttttgaataaagctttgaaattcaaaaaaaaaaattaagagaattaaggagaaaaaaaaataactttggagaaattttagaccgccacatcaccgcctcatacttctcctttatatatactaggaaacaaaccgtacttcgcgtgcgattgtattttgtttaaggataattaagttataaaactgtatataatttcaaattttttttttttacatatacatgtatatttttaatagtataagtaactattttactaaattttcacttttttactcgcataaaaatattaaaaattcatcatacaatcagggtcgtctcaagcttttgaggggcctagtgcaaaatttcaaaattgggcctttttaaaagaaattattaaccataccaaaatttcaaaaatttatataattataacattaaacttaattaaaaacaatcaaatgtcatatattctatgtaattataataataattaaaaaaaaaacttaaaaa

SEQ ID NO: 37392 - DNA, 4648 bp, Cannabis sativa
ttaaaaatgattaacgatatatatgcttctaattatttgtacattttattataattacattctcctaattacaaattaagaatattgtatctatcactattattattttcttaaaatatatgtttagacataatatataaaatgtattttgaaagtaattgattatttaatcaaactcaaattttattaaaatattttctaatataatcattatatatagagagatcaatataaaatacgcatgacaatgaaatttattcttttagtgtatatataaaatacgtatatatatataatcgcatttaaaaagcacacactaatatagccgtaatagctaaaaacttctcaaatatcaacattttaaactctatttcaaaattaaaaaataaaaatatattacttaattgaaaaaattaaacatatatgtaaattatacttaacaccatttaattaaacctaattaaagtgaaagctaattattgtgaatttatattttttctaggagaaggaaaaattgcaaggcttagaggaagttatagtagatcatttcacatggaccaaacatatttggcattccatatttgcccctcacaattaccaaaattcaaagtacaagtggtgggtgagactttttagtagtcgagagagatgatgactttgcttgctctcgaggctaacgctatgaaaaaacttggttgataagccaacccaacacaatgtattacattaattactacaaagaaagaaagtaataaatgtcttttattacattaattaccttccaaacccaaaattttaaatataaattttagtaattacataatttattttggcctaaatttgcgagctgagagagagagcgctgttctcctcgttcatcgagtttagttatgcaaattggagggcgacttcttcaacagaagagtagccattgccatagctataaccataaccataatcgctgcaactgagccaaaaaaatcatggccaacttctgggatttcgtttcttcttctccctcttctgcttttacttccttctcctatggctcttctcacgacttctggcgggaaaacattcacgggggttgtgttactctccttgctctcctactcatcttgctctggcacttctctagaaaattttccttcctatttcgttttctgtcttcgtcttcgtcttcttctccttttcattcttcttctttttcttcgtcgtcgattctcgctcctccttctactcctgtcgccgcctcgaactctccgactccccaatttgggtaaactgactttgatcgattcaattttgctatttaactatttgggtttgtctcaatctcagttttattattttttattgggatttcaaatttcaattattcactggattaatctagtttatgcagtattgattttgttatgatttgtaatggttttttatctgttccatatgaaaatttgaatgttcctctcagttttcatatactaaaagaaaatagttgaaattcaagattttactggttgaaaaagattattgagttgagacaattgacatcatgagcggtaattacgtattcacattcatatattttaacattagatcgcgaaccatttcatttaatatctgtattttcagcttataattttcctagcttgaggctctagagaaagtgatttcagttattacgttattgacagtaaagattgagtttcaaaaacttaaattatgaaaagaagttggcattctgatgattttccttaggtttagcttattgccttggcaataatgtatatgtgaattttttaatatagaccttaagatcatgttatttttgttaaattgggtaattggatggaaagaagagataggagatgtgtagttgcttatttgttacctttgatttatacagtgttggaggataatgtattctatactgtgataatttgatttgacagtgaggtatattcttgtgattctgttgttgatatgttggttgaatatggttttgcagaatctcagagattgtatcagatgcagatttaatgtttctggtaaagaatttggatgagaagaataatgagaatgataaatgggagagtgttatagacaaaagaaatgatcatctttcctacagtgctaaatgctgcaaatctaaggttaccccatttctgcttgggttttggtattgagattcatttaacgaattgatcacttatgtattcaaatttaaggataagatacatttttgcgaatcttacaatgataataagggaagataaaaaaaccaaatccgctcatttacttacttgttaacaattacacaggagaaagaaactacaagaaaagggacatacaagtaattacatgacaagaggatttatttctgacagaaaagtcttgtttttcctgtatgattactaaaatataagtttatcattacattagatagaaaaaatccttgtctggtcagcatttctacgccacttttatatagttgtttttcctggcttaatgagttaattggctggtggtgtgactcctaatttgaatttacttgtacaagtacttaaattgaagcattattttttctggtttagacgattaagcttactaatgtgactctttgttttcaggatgttcccttgaaatacttgagtgttacagtatttgagaactgttcttctgacttgttgagagacttttacatggacaatgattacagaaagcagtgggacaaaacagttgtagagcatcgacagttacatgtggatgaaaagaatggtatagaagttggctgcacaataaaaaaatttccactcttgacacctagagagtatgttttagcctggagattatgggaggggaaggataagacattctactgtttcattaaggtaattttttacctttagtcacaagccttaatgtaaattactgcaactgagatgtgggtagatcttacacacatatacagattagaaataggcgatttcttaacaaaagaaatcaagaaaatagcacagaagcaaagtatggacggtgaaggacaatgtttttatggcttaagagaaagaatgccttgtggttgtacttactaatctagggctaccaaaggccaatctcttagtatgtcagactaaaactactaaattttattcactttttaactgcaagctatctagatgcataatgcttgacctgatcacacaatatgctatcattaaaacgtcctcccaagattcttctataacttcttaggcgacaagacaattctaaatctaagataggtgcaagtgaaaatctgaactttatttgagataaaacactagcttttcacttgcacaataccaaagtagattgccctaaagagagccttgacaaccatttaccgaacatgttcaattttagactaagggtgatagagtggcaccacttcgctgattaggaaaattttaagcgtgtgcttagattatgtttgatatattactaattataacccttttttggcttttgattgtcttctccactccatttggagaattctgctactgatgatttatttattgatatcgttcctttaataattataatgacaggaatgtgaacatcctatggcaccaaagcaaaagaagtatgttcgcgtcagtgtttttagatctggttggcaaatcagaaaaggcaagtctccaaatagtacacatcattcttaattgtccttaaaaggtcttgttaagaaagagaagttgtattttcctactttcatgtttctgcagaaccctgtattgaaattagtttagatctgtacaggcgtaatctaaatcatctcatgaattaatgcttaggtagactgtcagagtaggttcataatagctatacacttcctttttgttatcgttaatgagcaagagactttttcctgctagttttgtgattccaagtatcttattacagttcctggtagaaatgcatgtgagatcagaatgtttcatcaagaagatgctggtttaaatgtggagatggcaaagttggttttctcaaaaggcatatggagttatgtctgtaaaatggatagtgccctacgaaagtatcatactgtcagacgtcctcaatcttcttccatcagtgctgtcactttgattaaaatggttagaaaattcttgaacttaaactgcctatttattcctttagggtacgtttggttggaaagaatgaaaacaagaataggaataaaatggaataaaatttaaaatgcataaaaaaattaataaagaaattattaatttcttttttatttatatcttagattgtatggtctttcctttcattacaaaatggaatagtcattctaccaaaatgataaaaaagttattctattggaatgagattccaatactttgaaatgcaaccaaacaaatgaatagaatgaaaattgattactttttctatttcattatctccaatcaaatgcaaccttagttccttgtaccatttcttggttatggatcttgttcctgtttgtagatgttggtaacctgcttcattttacagttgcttaaggtgattccctttattttatgataaatgttagttttatatctatagttagtgtttgttagtgattgaggaagcctacctaaaaattacctgg

SEQ ID NO: 37393 - DNA, 3487 bp, Cannabis sativa
  modified_base (1066)..(1074): a, c, t, g, unknown or other
tttttttttcattattttgaaatagtagtcaataatgaactttaatcatgaaatatttatagcttaattttatgtgttttatttgataatttggacttggtttctttgctggaacaatcttcaatatattttgggatatatagcatttgtttatttatggcatactaataatgataataagtcatacagaacacgattaaattttgatttctgttttttttaataatgtatacagaacgatgataataagttatacagtatacgacacaacaagggatagagaagctcatatatgaacttagttctaggaaggaaaaagagagagtcaaggagagaaagtgggaaaagttcaacgaggaagagagagagttaggagatggatgaggaggaaaaaagaaaaaaaaatatttatttattttaataagtttataactttaacttttttattttaaaatgaattttttatattaagtgtatcaatataaacgtctcaaacgtataagagtgtacacataaaataaaattattccatgttggtagtcaactttaaattattaacagttcaatagtttgaagagttttactaccacaatttgagtttaaaaggctaagtataagtaaaatgctagttgaaagtttagccgccaaaaactctttcaagttttatgtattcacaacactttcaacaatatatctggctagcattagagaagttgctatctaaagcaaagatgaaatatttttatcagcaaaataatttttaaaaaatagttttattagtaaaataataatgtttggttgtatgagcatccaaaaattacccataaacgactattatagtcatttatgtggccataaatttacattatggattcgtttggtatgtcatattatatcgtattgcattgtataatattatattgaattatattttatgtaatgtttttatgtaaaattatatgtattattgacttgtatcagcatatagatatataatattttaatataaattaaaatttaagataatattatatgaaaatatgatatataatccaatttaatatannnnnnnnnaatacgacctaatacaacgtaccaaacaattcctataagtctattttatactttcatgtttcttgctttgcaaattttcttcattggagctatatagatggaattgagaaaaaaaaaaacaccattcctaaactcttgggctaatcgggccttgactctcaatgaggtaaaccttcacagtttaataatatttgcatctaaaatatctaccctaaatattacacaatttaacatagcaaaacaataagtgacaatttcaataaaaaataaataaatgtaattgattgaaatacaatttgagtacacatataatttactccaccttcatattatacagttaaatatatgctcactcatcacttgttgtatgccataacaaaatcaatagagattcccatttatttaaagggaaaagaagactgctcaatcaaaccaactttgtgtctgtggtttcatgtttccatatttgcactgggccaaatattgttgactgtcccaacccaaactcaaattattattaccatattgagttctcccacataaatcatcacataaaatcactcttttaaggacaatataacatatatgttcctatctatctatacatatacacacaaacttacataacagataagtcacattaatacatttgttagatggtaaaattagtgtttatccatttcagtacttactgctacatgttcttaaattaagtgatactgctaataatgattaatgtaacagacacaattttgacaattgaattgactcctgatatataccatcattttttaatctcctgaaagcttaaataccatgtgtttataggcctaccttgtctattctttttcatgttgaaaaccatggaaattagtggagaaaataaagggtttgttctttaaaatgcttatctgtaccttgttagttagtgctcaacaacatcaaattaaaccttttaagattgttttcttaattctttgctgacaagtgagaagcacacttagattaatgtttagtacacacacccactactgaatttgaagtataaagcctaaaaggaacagagccacttgaaaaggcttttatccttttcctactgcagaatgtttgttgagttattatcatgtgtgaaaaaaataaataaataataaaaattccttcccttccctgtatttatttacataaacactcctgaaattcaggggaacaaaataaaacagcacatacacaaatacaagcactatcttcattagttataacataaaatactgaccattaaattttaatgtctattaaggcagtaatcaattgcataaaacaaataacaaaaggaatggcttttttttttttttttttcattttctcacagttagaagtgtgagctgtaaatattgtttaatccaaggtaggcataacaagtaggaatttattatgatttgagaaaaatggtgcatttgttgttgatggaagagaagttattagttttggaaatattttaaggcaatgaataaaagtgtctgttgtagatgtggagaggcagacatgtgggttttgcagcttagtcatgattaaactcaataatcgataattggttaagacataatcatactattcgcattttcttattctctttctcctatctaacctttactgcatttcagatacaatgtcgggatattgaattcataaccctagttgacattttacatggacctaaacaatttcaattaatagtacagcaccactgctgtttatcacatttttatgtatcaatatcgttattggtctatttaagtatcggctctcatataatttattactagttaattcgtaaaacgacatgtctagaggtcttaggcactactggtgtgcaataataatactcttttaatttattgatgtaatataaaattacaaaaattactactaaaatatgtatggagagaccatctttgctagatgtatggaaaagataaattgtagtaaataattaaaaaatattgtactttttaaaatatttttattttaaaatttataggaaaaggactattttatattatttattaattaaattttatttatatacatcaataaaatgtgtaattttttgtagtgaaaagtcagaagcttcaaacaaatactctaaaaaaagagatatgtaaaatttattttcaatgtaggttgatccttaatatttataattttatgtgtaattaatttatttatttagataattgtaaactatatattttaaactatttttattaattttcataatttactctattaattcttttcattaatttcataataatctctactacttcaatttttctattaaggagtattcttttaatcaagttaatttatattatgtgggaatcttttcatactaagaaaaatgaagaattta
